United States Patent Application Publication US 2006/0134663 A1 - sequence listing, part 55

SEQ ID NO: 130227 - DNA, 755 bp, Homo Sapiens
  misc_feature (637)..(671): n is a, c, g, or t
  misc_feature (674)..(715): n is a, c, g, or t
ataggctcgtttatttattcattgatcaactggcacttcttgaaagcctgctgtgtgccaagcctttccccaaaggaggatatcagtggtggagccaagtctcagggtggaaaggacctggaccacacagagcaggactccagagcctcctccatatggcaggaatcaagctttcacaggggaaacgcaggatttcccacacatgcccatgcaacacttcaagtcacgcttgcactggccatccatctcacagaaattgggggggttaagcatcaaacattggccataagtcactgggcacttcccaggcttcctccttgttggttttggggtgtcaacaggatccaggcatttgatgccacaagtgtcaggacaacatctcttcttccctggacactgccagtcactctggcactcaggtttcttgtatctaaggcactgggcagatttcttaggaggacagactccagctttgaaggactttccagagccttccacagcccaaggtgccagagttcccagggcaagcagcaccaggaaggggaagaggccgctggacttcatggtgaaggcaggagtgactctccccggccgtaatggccgaattcccgggcatatgtccggtaccgtcgactgnnnnnnnnnnnnnnnnnnnnnnnnnnnnnnnnnnncgnnnnnnnnnnnnnnnnnnnnnnnnnnnnnnnnnnnnnnnnnntcagacgagctagcgccctatatgatctatcatttctttc

SEQ ID NO: 130228 - DNA, 981 bp, Homo Sapiens
  misc_feature (95)..(104): n is a, c, g, or t
  misc_feature (310)..(310): n is a, c, g, or t
  misc_feature (321)..(321): n is a, c, g, or t
ccaggtgagtttaccccccttatccccccttagaaagttttataatttcccttaggaacctttaaatcttggaaaggaggttgtcccaattatgnnnnnnnnnnagaataagggttccttccacaaagatcccaaggtacacgttttcccagtccaggacgttgtaaaacgacgggccagggcctagtttataatacgacctcactataggggccactttgtccaagaaaagtggggtacgggtaagcttgggcccctcgagggatactctagaggcggcccccccagtttagcggggggggcttcgccnttctcttgtgnggcaaagagaaataggctcgtttatttattcattgatcaactggcacttcttgaaagcctgctgtgtgccaagcctttccccaaaggaggatatcagtggtggagccaagtctcagggtggaaaggacctggaccacacagagcaggactccagagcctcctccatatggcaggaatcaagctttcacaggggaaacgcaggatttcccacacatgcccatgcaacacttcaagtcacgcttgcactggccatccatctcacagaaattgggggggttaagcatcaaacattggccataagtcactgggcacttcccaggcttcctccttgttgggtttggggtgtcaacaggatccaggcatttgatgccacaagtgtcaggacaacatctcttcttccctggacactgccagtcactctggcactcaggtttcttgtatctaaggcactgggcagatttcttaggaggacagactccagctttgaaggactttccagagccttccacagcccaaggtgccagagttcccagggcaagcagcaccaggaaggggaagaggccgctggacttcatcggacgcgtgggtcgacgatatcccgggaattccggagcggtaccagcctggctttttaaacagcgggttcatattactatgctc

SEQ ID NO: 130229 - DNA, 1858 bp, Homo Sapiens
acaaaatacaaaagaaactactactgtattttgttgccctgtcccttcaacttggctccaaattgcttggctcatcatcacagtggcctccagaaggtggcgagctctgcttctcaagtttcaactgtggaaggcacatctggtcccagaggaaggatgaggggctctctggggcttgagggcagcccaccttgtgtcctcagaagcccattcgaggcttcttccggaggggctgagagctagagaggacgggtgtgtgctgctgggagcgagtggcccggacgctggaggcctgggagtggggagttgtgttggcccagcttggggtgtccctctggggtggtagcttggccatgtagtcacggagcatctgccgctgctctgatgggacgccctgggcgcatgcatccggagtcaactcctgggagggcggggtcgtggggggcaggggcagagcatcagcaggtggccactcagggctatgaggggagctggtgtcctctgagggatccacatggccactgagcgaaaagctgctggacagctgggtccggcgcttgggccgcctggtctgtctcccgggctccgaggtcctgccctgctgcctctcccaccaggcagcccctcggcctgcccaggcttcccccaggcgctcactgagcttgtcctctaggcctgactcgggtgcagggggtggctctgccgcagggagggagcccaggtctctctgcagcaggagctgccctcgggccatggccttgcggagcacacccagccgctgcccttcctcttcctccctccgcagctctgtgctgcccagcatctggcggtgggtgaaggtgggtgctgtccacacaggaggagccaggggcacttttagcagggccttcagccactggctgcagccggcagtgtcctgggaggtccaggaagctgtgggggcatggcagtcaggttgggtgtcgccaggaggcccagcatctctgcggaggctggagtccacctgggggcggagctgctggtagaagacatctcccgccgccgagagctggaagagcaccaggcctggtgtgggcgctgagggcaagggcgggacgacggcagccagacctatggtcggtgctttcaggcgctcctgcagccgccactggatcttaggctccagcagaggaaatgcagggagggagtcgatcctggaaggaagagactggggggggcctgccaggcggggcaccgacgccccttctcttgccaggtgcagcagctgcaggttgcccaccctgggcttccgaggagcagggggtgcacgcagttgggccggggcggaggcagcagtcgggccagcaggagcggggaggggaggccatggttccacttcagcatcggcaccaggggaaggcgctcgtccactaggtagagagagaactgggtacagacgagatgaagagtaggggggaggcatttggggctggagtgccccaggtactgggtaagcaggacacgttcccctttctggcacgaagcctctgcccccaaacgaaaaagcaacagaccacagcccggcgggccctgagtgtccagcatcttcactccggtgcggtcacccacggtcagcacccgagggtgcgcagtgaagtctgcccaacgccacgaagaggagtcccggaacacgagggtctcagggtccctgtagatttgccgcagcccatcctcagggctccacaggcagacggctcccgagcggctgcagatggccagctccccgggcaggtgagggctgaggctgatccccgtggcccctttctccacctgcatcgcctgcagaagggatcccgagaatcccgcccatttcccagct

SEQ ID NO: 130230 - DNA, 1863 bp, Homo Sapiens
ttttttttcatgtcatcatgaatttattttcaggcaatatgataatctattaacactcagcatactctgaacttacagaataagtaccacgccatacttcctcattaatgactatcattttacatgagcttcttccacaatcacaatgagagaacagattgctacatgtttgctggtaaatgcattcagtaaggcactcaaatcctagacacgaactaaccacagaacgctcttccctgctttaataaattgaaacatgatctcatttccttcattttcaatactttttatagaaagacacgcttgtcttgaacttgtctaaacataggtttatataaactaatccattatcattatagttataatcaaggaaatgatttcacattgacggttttttaggtagggataagcgaaagcactgcagcagtttctgagggaatgtcttctctgtggttccccatacttagtacaatgcctggaatgtagcagggactaaatacagtgaacaaatgggcaaacctttaattcccagggatctgctacatattgccttgactggtagatcatttctccaggagaaaggaagaaaccaaaagacaaaaacaatctttttaaacctcacaggattttcttagaaaaaagttttaatttatatatctagtgcaattctctttgtaaaatatatttcataaaaaatccaaagcaaaagccctgtcattcatttatttcaaaagacaaatcatttcagtacttcttccttgaaatgcctgcaatttcttcctctggcctcagagacgggcattggctccatgctttacaatgtcaggataaaaatccaggagggagaaatcttgttgtaatggatagctgttttcatctaacacaaaaaggctctgaatctttaatacacaaggttctgcgctgactgccaacaaggagtggaacaggtctgccacgaccatcccataggtgatctctgaggaaggaactatcactctgttgaggcagtctgcagaaatgttgagaagaatcttctctatcagctttgattctacacggattacaaccatcatgtcttccatcaatgggcagtcattaaacgctgggcctataatatattttcttcatagtaaatggcaagcagctaaaacattgtttgtagatcctgttctcatctgtttctagttccaatccacattttgcacaaccagtatatacgatgttgggaagagaagaaaaaatactcttcagagaactgtgagcatttagcgctatcttctgagatgctgtaataggaaatgccagctctgaaatctgggctttaatcagaaccactccttttttcctttgaagttgagggtaccaggctgctccaggaccccataatacaagcgcataatgttgatcttgggcctgttccactgttaacataacttttttctgcttctgtcctctataactgtatactgcctctgtcagtatagtgaaatcaacaactcttagtactgcgtggactaatacatcaggttgaaggtgctccaattctacaaagtctatactgttcaccctctgaggctgcctcggaggaagatctcttaggtaggaatgttttgaggacacatatgccagtaagtcttgaagtacaacttcactaactacactggaatattcttcaggctgaatagatgaataactcccaagatttaataactgactgctaaatgttgattgtagtactgtctcgccaatccattggtcctcatgaataacaacatctgtgagtaaaattatatctccaagaaacactgtaaatgcccaaaatgctgcagtcctccacagaaaaacttcttctcggacgcgtgg

SEQ ID NO: 130231 - DNA, 1031 bp, Homo Sapiens
aaataaaggtctaggtaggaggctgggtggcgaattcggcacgagggagcctccagcctcatccgtgctgacagcttgtgccaccatgggcagcagggcccaggcagggcgctgtctcccgtcggaacaaggaggatctggcttcacctggggtccctcctgggtgcccgcagcagggcatgggtggtgctggcggctgccccctgctgccctgattgctgcctacaccgtcctgctgctcctgttctgcacatcccaggtggctacctgcaccatggcccctcgggccagcctggacccagtcatggtgcttgctttcttcttggtcatgggcccctgggtctggctaggcagtttgttctgtttccctcttttaagagtcccaggggtggggttgggtggggagcagcattggccggccgtacccagagctctggaatctgtgaaattgtatgtcttgtttcacatctcttctggaaaagggggcttcctcgagccaggctcagccccgtgacagccccatgacagcgaagggacctttctgtccccgcccctgtccctgtgctgggcccacgtactcacccacgtactggtaaggatcctctgaggtctggcttttccaaaatttgcgcacttgaccagtgagcgcaaggagggtgagcctcaggctgtgctttttgtccctttcaggtgcccggatcccctgggacacccagagccccccagataggccggtggacggagggtggagcgagcttgtcccgccaaaaatactggcttgtggtctggactccagtggccccatttcttgatgtcgccaaggtgttgcctgaggccatcggggccagggctgcggcagtgtctgggcaggatgggatgacccctgttcccaagagattggggcagcggggccatggtgaaacgccttgcatggggcttgagccgcagcttggatgttgtgcctgcacagggccggtggacgctccgcaagccaccaccggtgggccgctgaacacatagccactgcgagg

SEQ ID NO: 130232 - DNA, 700 bp, Homo Sapiens
atcctagttaactccaggatagagtaactccaatatcctggtttgtacccaacttgggagcttttatttacagaaaggcctgggtggatcggggagaaaggggtggggagttatgcgagaaagagaagggagatgatgtttaaatactgagctgggaggcagggaaggaagtagtggggctggcttaagggtatagccgcctcaggggagtcacccagcagcagtcacctggtaggtccagagagtgagatgggatcaggaactggcatagacctcagtcattggtcctcaagctgaggggtggaactgtagctgggcagggcccgggcctcccgaggtgcccatgtcccactgacccaaggacaagatggccagtggagaaaggtgcagattaagatgtttgttttggtaacagccgaatgatgctcgctggaaggaaagccgccctattccttcagcgcttcgactccatcgacaccacttgccctgtgtgttggcctcactttttcacccatcagtgctctacctccccttcccccatgttttagaattccttttccttaggactcctgagtcccagacagaaggtcctgggggagatggtttcctggactggggatgggtgcatgtccacccagaggggacctggtccttctcgccaggatgcctgccaggctctgtctgggcctgatgctcaagg

SEQ ID NO: 130233 - DNA, 873 bp, Homo Sapiens
gggtaaggggtcaaaaattttattagcaggactttttgtgtttttgaatatacaggtttcctgctgtccagggtaaaggggaagtggtgtcttgtggcccgaggtttggggcgcttgccttgggactccatccccatctctttcccgctagcgcagctgggggaaggtgcctgcttgccggccccacggattcttcggctgtggcataaggcactgtgtgttctgcaggaaggcgctcatggctggctggtagatgagaggcggccttctcaggggctgcaaagctgaggctgttgaggggttgagttgaacttggggcccctagtgaggaggccccaggcgatgggagcacggcctggtgagtctggtgccgctgcctccccactggccctgcaccaggtctcaggatgggatcatgcctttgctcctcttgcggtcggccatggttctccggttgtggttggctcttgtcgccttgttggcttccttcttcctgcgttcctgggttgtctcgcggctctgcccatggcctcgggggctgccggccactgctgttgagctgtcatgccggtaccctttcttggcgagaaaggccatgcgcctggcttctgccttctctctcagcactgcagggtcctgaacaaaatggtcgggcttgggagcctcctcgtcagcatcgtcttcctcatcgtcgtcatcctcctcctgcccttctctaggcactttggttctcagcacctgagggatggtgaatggcctgcggctgatgagctcgtcatcagagtctgccgacgcgtggtcgacaatatcccgggattccggaccgtaccagcctgcttttttgtaacaactgttctatagttcactaatagc

SEQ ID NO: 130234 - DNA, 658 bp, Homo Sapiens
  misc_feature (543)..(543): n is a, c, g, or t
tttttcacattttttgttaacctttattaaggtataatttataaaccataaaatccacccattttacacacacacatcaacgatttttaataaactgatcacgtagtgcaactattgccataatctagttttaggacatttccatcatctctgtaaggtaccctgtgcaatttatagttaactcccatttccacttctggcaaccactcacctcatgtctgtccctacagatttgctattctatacatttttattattattctgcacatttcacataaatgggaacatatactatgtggccttttgtgcctggcttcttgcatttagatcagtattttctaggttcacccatgttgtggcatgcatcgatactttattcctttttatagctgaatgtgactacagtatataccactttggccattctcatacttccccacattgagaagcattcggagtgtatttagcctgtagatgttgtgatatgcaaatatcccattccctggttactggcattcctaagattcttcatggtattttcanactttggataaatttacagattagaaagatatctgacagttaatctctgttctccttacaaattccttttgtgctgctggaaaggatctttggctaggtggatgactagttttat

SEQ ID NO: 130235 - DNA, 1605 bp, Homo Sapiens
  misc_feature (98)..(113): n is a, c, g, or t
  misc_feature (120)..(264): n is a, c, g, or t
  misc_feature (1491)..(1525): n is a, c, g, or t
ggccgccggggtttttttgtggaaacaacttatttccccctttttcctttccctttgggggccgcgcgccccccaaaaaagttttaaaaaattttttnnnnnnnnnnnnnnnncgcaaannnnnnnnnnnnnnnnnnnnnnnnnnnnnnnnnnnnnnnnnnnnnnnnnnnnnnnnnnnnnnnnnnnnnnnnnnnnnnnnnnnnnnnnnnnnnnnnnnnnnnnnnnnnnnnnnnnnnnnnnnnnnnnnnnnnnnnnnnnnnnnnnaaaaggatgagaagagattttagttattcagtgttttcagagtttcaacaagggatacagatacaagcagcttcttacagagtttacaatctggggagagaacatgaaagacactgtttaacaggcaaataattccaggaataaatatacatgaatgtgtttttcaaaatacaggttcttatacaaatgtataactaaatactgattccatagtggggtggttgtaactgaaagggctttgagaaaaggctttgaataaaactagtcatccacctagccaaagatcctttccagcagcacaaaaggaatttgtaaggagaacagagattaactgtcagatatctttctaatctgtaaatttatccaaagtttgaaaataccatgaagaatcttaggaatgccagtaaccagggaatgggatatttgcatatcacaacatctacaggctaaatacactccgaatgcttctcaatgtggggaagtatgagaagttaataattctcctagtgtctggcttcctttttctttgcctttccctctcatacgttcaatcacctgtgttacaggacacacataagtagttggaaggtgttaaactttgacagcaaagcaaaatcagaggtagaggcaaatgtttaaccaatcatgttcaaatataagctactcaatgaagagttttaggtttaaagagcgaaatattcaccattactgagaaatctcagtttctcattcaatttcgcattgcactttgctaccacaaactaaatgggtgtacatttttgagtgctgatttattactcaaaggtttgaatttggagactgaaacaaaccatgctttatctgtgtactttgagaaaatccatccacaagaaaggagccaagcgtcagtttccaatggggggaacattctcatggaggtactgtaaggctaagtctgtccacttcatttcttgttctttgacagattctgtggtgccaccattgtcttgttcaggttcaggaagctcattcagtggtattgcgacatcctcataaggcagcttgtcttctcgccaagcatcatcaatcaaatccaagatccttccatctctctgaacctcactgtccattttcctgcagctttgatcttgtcaaatcggcacccggccaccgcggcagacgcttgctcctgccacccccggccgtaatggccgaattcccgggcatatgtccggtaccgtcgactgnnnnnnnnnnnnnnnnnnnnnnnnnnnnnnnnnnncggccgcttcctcgctcactaactcgctgcgctcgtcgttcggttgcgacgagtagcgccctatagtgattatacatctt

SEQ ID NO: 130236 - DNA, 984 bp, Homo Sapiens
tccctccacccagaaaaggcgcccagggtgcagtttccaagggggggaccattctcatggaagggtctgtaagggttaagtctgtgccactacattgcccgttctatgacagattctgtggcgccaccattgtcttcttccaggttcaggaagctcattacagtagtacttgtcgacatctttcataaagccagctcgtatttctcgccaagcatcatcaatcaaattcaaagatcctatccatatgctctgaccatcactgtcccattttcctgcagctttgatcttgtcaaatgtgacagtcccgatgccgtgcaatgctgctttgtgtgtcttccttgtgtatgtccagtgaacccacagtcagtctaaaaatcttaggtcccaggtcgcttcctataggagtccgcctccaaaccccagtctgagttgcggtcccggtacccacccctccaggggtctctcagttccttaagcacagagcatggcaccaactggggagtctgtcaaaacagtccagatgaatgtctttccagacatgcggtgcctgcgtttccagggacagggacacgtcttatcaatttttatatattacagctttgtaaacataatatttataaaatcaaagcgggaaagccttgttccttgctagaaatgagcctcgcaggccacctccatccgcaccgtacgacaggccgtccctcagctgcggcttcctgcctcaggcaggatgtaccaaacgtggaagcggagacggggaggtctgggggtgcctcgcaagtccctttcctcctgacacgagtgcagtaaagaaaaccggttatgagcgtaaagtgacagcctcggccgatgggaatagggggaagtctgacagtgagcaacgaacgcattcccgcgcctccaaaacctagtccgggggctctggcggacgcgtgggcggacgcgtgggtcgacgatatcccgggaattccggaccggtaccag

SEQ ID NO: 130237 - DNA, 1058 bp, Homo Sapiens
  misc_feature (650)..(857): n is a, c, g, or t
  misc_feature (1003)..(1003): n is a, c, g, or t
aaaagtactctaagcagaaggttctaacgtttttattgattagatttgtgtacagtggtaatccttccatcatacaggtaatatataataacattcaaaaatctgacattaaaataacttattgactaatgctaatattaacacacaatagttctatctctattaataataaaaaccaaaccactgagtttatcttagaaaacttaaattcaggccattattttacaatttggaagtctgagtaatccaacttcaagatgactttttcattgttgaagtttgctttgtcgatgtgtgatttaggacttcctcttgtttcaagccattcctgcatatgacgcaccttggagatgggaccttgcaattgtccttgcactgtgccccggtcagtgttctggacccagcctaccaatcccagctttttaccctcagcctaaggggggtaaaaagagagagagatccagtgagattgaagaaaacaaggtaagactacaatctgttgccagaatcttggcctagaatcaagccactgaaactaatttgatattgcccagaacagtcaaaagaaagacagcaagaaggatctcattgcttatcttcacatgaagtattggccacttgactgcatgtctcctcgtgccgaattcttnnnnnnnnnnnnnnnnnnnnnnnnnnnnnnnnnnnnnnnnnnnnnnnnnnnnnnnnnnnnnnnnnnnnnnnnnnnnnnnnnnnnnnnnnnnnnnnnnnnnnnnnnnnnnnnnnnnnnnnnnnnnnnnnnnnnnnnnnnnnnnnnnnnnnnnnnnnnnnnnnnnnnnnnnnnnnnnnnnnnnnnnnnnnnnnnnnnnnnnnnnnnnnnnagctgcattatgatcggcaacgcgcggggagagcggttgcgtatgggcgctctcgcttctcgctcatgatcgctgcctcggtcgtcggctgcgggagcgtacactcatcaaaggcgtatacggtatcacagatcagggatacgcangaagacatgtgagaaaggcagaaagggcagacgtaaaagcgcgtgtgggttttca

SEQ ID NO: 130238 - DNA, 514 bp, Homo Sapiens
aaaagtactctaagcaaaaggttctaacgtttttattgattagatttgtgtacagtggtaatccttccatcatacaggtaatatataataacattcaaaaatctgacattaaaataacttattgactaatgctaatattaacacacaatagttctatctctattaataataaaaaccaaaccactgagtttatcttagaaaacttaaattcaggccattattttacaatttggaagtctgagtaatccaacttcaagatgactttttcattgttgaagtttgctttgtcgatgtgtgatttaggacttcctcttgtttcaagccattcctgcatatgacgcaccttggagatgggaccttgcaattgtccttgcactgtgccccggtcagtgttctggacccagcctaccaatcccagctttttaccctcagcctgagtatgcttacggaaaaacaccccttgcaccttcccaaaaatttcataatccactgatatcagggtgtttccttctgc

SEQ ID NO: 130239 - DNA, 1234 bp, Homo Sapiens
  misc_feature (1189)..(1189): n is a, c, g, or t
  misc_feature (1191)..(1194): n is a, c, g, or t
  misc_feature (1196)..(1197): n is a, c, g, or t
cagggactgacgaggtcggggggaccccgttccagcagctgaagcaggtggtggaggagccgtccccccagctcccagccgaccgtttctcccccgagtttgtggacttcactgctcagtgcctgaggaagaaccccgcagagcgtatgagctacctggagctgatggagcaccccttcttcaccttgcacaaaaccaagaagacggacattgctgccttcgtgaaggagatcctgggagaagactcataggggctgggcctcggaccccactccggccctccagagccccacagccccatctgcgggggcagtgctcacccacaccataagctactgccatcctggcccagggcatctgggaggaaccgagggggctgctcccacctggctctgtggcgagccatttgtcccaagtgccaaagaagcagaccattggggctcccagccaggcccttgtcggccccaccagtgcctctccctgctgctcctaggacccgtctccagctgctgagatcctggactgagggggcctggatgccccctgtggatgctgctgcccctgcacagcaggctgccagtgcctgggtggatgggccaccgccttgcccagcctggatgccatccaagttgtatatttttttaatctctcgactgaatggactttgcacactttggcccagggtggccacacctctatcccggctttggtgcggggtacacaagaggggatgagttgtgtgaataccccaagactcccatgagggagatgccatgagccgcccaaggccttcccctggcactggcaaacagggcctctgcggagcacactggctcacccagtcctgcccgccaccgttatcggtgtcattcacctttcgtgtttttgttaatttatcctctgttgattttttcttttgctttatgggtttggcttgtttttcttgcatggtttggagctgatcgcttctcccccaccccctagggtaccagcaggcagagccttgccctctgctcaggctggggtccagtgggaggggcccaagatctctgctcagagaagtgcagggggagccttccagctcactctccctgaggactggcttgacaggggctatgggtttgctttggtgttgtttttaaaaaaagaaaatatatttttttcaaacaacgactgcccatcccgggtncnnnncnngatgggttggggcagttacctggttgctgttttaatt

SEQ ID NO: 130240 - DNA, 1788 bp, Homo Sapiens
gaatcaacatactttattagacccactaagtgccaggggaggggcctgtgccctagagccaggttacagggctcacccgtagattcagtctggtctctccccatcatgcctctcacttccagtctgggcttctaataggagggccccgacttcttccctcccagtcattctctcgaatggagaatctttcctcattccagggacaccaaggctcaggaaggggcctatccatcatcagtagagccagacaagctctcccatcggacgtcctgtggctgggcccagaaatgggtgccgctgcctgtgggactgcccttccgggaggaccagggtgtcttcagtgctcttggcctgcacgtggaggagagtaggcagatgtctggtgctctttaagctcaaaggcatcatggccctctctgtggaacaaagggatacaagtcagggatccaggcagcccttgagctctcgcacagaacattccacctgcacccaccggaagcagcgggcacagaagaggtccccatcgcagccagcgcagcgtagggtggcatcctcattgcagatgcagcaccaggggagctcctcttcctcagcctcaggcctggggtccacatcctgggcctcaggctctgccccgcgggggttgcgtccagggtcgagaagcctgctctgcaggggatgtttaagccacttgcttcatccaggggcagcttcttcagtgagctgctgcaggactctttggatggctgtctcttcatcctcgtcgtcatcactgtctgggaggcgatagtcctggagggtcactctctttggggtcctgttccccgcagcatggttagtcgcttggccagggccagaattccgttcctgcctggtgtttttcctccccgcaactcaaagtgctgcctcagcccagcagtttgctcttctctccctccaagggaccagttggcctgcctcttggaattagtgctccctggggccaccctggttgagatcattctggagagaggcagctgggcctcctcctttccagctttcatcgatagccacctcagctgccagctgcgttagcagatcctgtgtctgctgggcttgggtcctggtgtccggtgtgtgatgtgccggctggggggtttgagaaggtagaactctgccctgcaacgctgcaagtcgtgcctccatttcctgggtggaagggatggaaccctgacgttcatcctttagggcagccagccgtgcctctatctctgcctgtgaggggactaacttgggcttgttctcctggcggagtcgtgctaggcgctcagcaatcatctggtcttgtcgtgtcagtccctggctctgggaagtgctgggcttttgcttggcttccaaggctgccacacgcttcttatagttctgaggtggtgaccacttggaggcattggcagaagaccctctggtcaggacctcatggcattgcttgcagactttctgttgggtgttcccagtccgaggcactgctgcactgaagcttaggcagcctgaacagaaggccctgccacaattcttacagccgtactccttcttgaagagggtgaacttgacagcgcagccgtagcacctactctccatggtggctcccagcaccgcagggtctgcagagctgagatcacgccggccaagtcctgggccccttggaccctcaccccagctccgcccttcccttccctgccctgccccgccccacacgcccactggcactgtcccgccgcgacctagagcagggaatccggatcccggaaa

SEQ ID NO: 130241 - DNA, 1219 bp, Homo Sapiens
ttcccaatgaatcaacatactttattagacccactaagtgccaggggaggggcctgtgccctagagccaggttacagggctcacccgtagattcagtctggtctctccccatcatgcctctcacttccagtctgggcttctaataggagggccccgacttcttccctcccagtcattctctcgaatggagaatctttcctcattccagggacaccaaggctcaggaaggggcctatccatcatcagtagagccagacaagctctcccatcggacgtcctgtggcggggcccagaaatgggtgccgctgcctgtgggactgcccttccgggaggaccagggtgtcttcagtgctcttggcctgcacgtggaggagagtaggcagatgtctggtgctctttaagctcaaaggcatcatggccctctcggaagcagcgggcacagaagaggtccccatcgcagccagcgcagcgtagggtggcatcctcattgcagatgcagcaccaggggagctcctcttcctcagcctcaggcctggggtccacatcctgggcctcaggctctgccccgcggggttgcgtccagggtcgagaagcctgctctgcagggatgttaaagccacttgcctcatccagggcagcttcttcagtgagctgctgcaggactctttggatggctgtctcctcatcctcgtcgtcatcactgtctgggaggcgatagtcctggagggtcactctctcggggtcctgtccccgcagcatggctagtcgcttggccagggccagaatccgttcctgcctcgtgttctcctcccgcaactcaagtgctgcctcagccagcagtctgctcttctcctcctccaaggaccagttggcctgcctcttggaattagtgctccctgggccaccctggttgagatcattctggagagaggcagctgggcctcctcctttccagctttcatcgatagccacctcagctgccagctgcgttagcagatcctgtgtctgctgggcttgggtcctggtgtccggtgtgtgatgtgccggctggggggtttgagaaggtagaactctgccctgcaacgctgcaagtcgtgcctccatttctgggcttgttctcctggcggagtcgtgctaggcgctcagcaatcatctggtcttgtcgtgtcagtccctggctctgggaagtgctgggcttttgcttggcttccaaggctgc

SEQ ID NO: 130242 - DNA, 399 bp, Homo Sapiens
catgaaaaagaacttatttttattttccctcaaaatccaataatagaacaaaacatggaaatcaatgagatgtcaacattactgcctcaaaaagaaaactggtttttctagacctcagattacacctcttctttacatgtcacatttgcagttctatgttagacgtctaagccataatgaagttaccatgcactgcctgacctcactgtgcagcgcgcctcacaaaaccttggtgttccctccatcacaacgtaacttacataatcaattaccagaacactgcaacacgtgagtctggccaccaaaaagtaagtgggccatctttgaaaagattttcggacatgataattagctatgacggatgacgccaactgaaacgactttaaaatgacgcttgag

SEQ ID NO: 130243 - DNA, 708 bp, Homo Sapiens
tacaattagttttttacaattttattccgtttcatcattctcaaaatatatcccccaaaagtaatctacaaaagagtgcaggctgctccccttaaaggaatggacaagtaatatacactacaaaacaatgtttaagatcatgtataaatgttactctgaatctcatttgttgtcatcaatttctttagtatctcagtgctttggggaatattcttaaccaaacccttcaagcttctggtagaaagtataggcttaaaagcttccactgtgattaggtctaatttcatcacatcagtataacacaagtacagaattgctgggattttccatacttgacagtagcttagaactgctgcaggaaggtcgtgtactatattcggttgttctagcaatggacaacacgccgagtctttgaaattctgtgtttttagggctctcaggaaaggagaaggaaggctgccggtggattctgaggttttataatcggtaacatgtcgacatgtgagaatagttatctgcatgttcttccttggacaagagccaaaaaccttttccagccactgatactgttgatcttctgcaacatagcatctgcactgacagagaaaaaccgagggattgggttttagatgataaaacacacaaaaagcctctgtggaggacagatgtgtagtgtctgttgttctacaccattcattccagagtttg

SEQ ID NO: 130244 - DNA, 438 bp, Homo Sapiens
ttttttagttttttacaattttattccgtttcatcattctcaaaatatatcccccaaaagtaatctacaaaagagtgcaggctgctccccttaaaggaatggacaagtaatatacactacaaaacaatgtttaagatcatgtataaatgttactctgaatctcatttgttgtcatcaatttctttagtatctcagtgctttggggaatattctgaaaggagagaaaaaagtgaatacagtgagaccccagggattcaggcagaggcaacacccctccctccacgaccaacaatctccacactcgagacttaaaaacagccatgggacaggcgtggcctttactctccttctcaacgaaaaggcaagtgggaaagtcagttcaacaggccctttccctgccacactcgccgatgatctcctggccttcgatggtctcct

SEQ ID NO: 130245 - DNA, 994 bp, Homo Sapiens
  misc_feature (173)..(173): n is a, c, g, or t
ccaggtaaataccctttccaaaaccaagggtttaggatcatgtataaattgttactcggaatctccatttgtgtgtcatcaatttctttagtatctcagtgctttgggggaaatattcttacccaacccccttcaggcttttggtagaaagtataggcttaaaagcttccacntgtgattgggtctaatttcatcacatcagtataccccaagtccagaattgctgggattttccatacttgacagtagcttagaactgctgcaggaaggtcgtgtactatattcggttgttctagcaatggacaacacgccgagtctttgaaattctgtgtttttagggctctcaggaaaggagaaggaaggctgccggtggattctgaggttttataatcggtaacatgtcgacatgtgagaatagttatctgcatgttcttccttggacaagagccaaaaaccttttccagccactgatactgttgatcttctgcaacatagcaactgcactgacagagaaaaaccgagggattggattttagatgataaaacacacaaaaagcctctgtggaggacagatgtgtagtgtctgttgttctacaccattcattccagagtttggcacaaccaacttcctcccagactcctgaattcataacaaatgatgacagaaatgctactgcattatttcctatagcaattataaacttggagcacggatatttttctagcaaagaaacttccaaagatgtttttgtttgtcttcgaaggagccgcacttccctggggctggcgccgctggacgccgcggcttcacggagacccagggcccaagcagagccaaggagcggcggcaaccgcgggggccactcggaagaccgcggagccccggccttaggcgccgtcgcggctgccaggcccgcgcaccttccagctgcggtgagcgcgctgcccttatcccggcctcgtgtcgaattcgccacccaggcctcgctaccta

SEQ ID NO: 130246 - DNA, 771 bp, Homo Sapiens
  misc_feature (587)..(643): n is a, c, g, or t
aaatttacttatctaactttattcaaaaataaaaattttcctaagtgcagtgaggggtaggaaacatggaaacctttctcaaacttataggtgatattaaactgaaatatataactgccttttgggaacagtattttttctgttttctatgaattacccataagcatagcaaaaccaagataaatttaaatttaatattgttaaagagcactgttcaagataaactttcatgtatatcacagtatagcattatacaatgattttacgtaaaaatatttagaagcacagtgatgattttaagaagccataaaacattttaatgaaatataagaaagtcatgaatatttatgtggatatgtatgttgcaaatttaaggtaaatcaacataggataaacacagaagattacatacaaaccctacatattttatttctggtgaaacatataaacactttcctactatagtacaaaatcaattagttcctctaccagcactaaagacttgtcatctaaatatattcattttaggggagaaaaaaatgcttcacatttttctaaaataaagactgcaataaattagtgctttnnnnnnnnnnnnnnnnnnnnnnnnnnnnnnnnnnnnnnnnnnnnnnnnnnnnnnnnnatgaatagcatttcttttcctgccatcatatcctttcttatctcattcctacatagaatgaatgataagctaaattatttagacatgtatggtgactgaaagcaatgtcttcaaggaaacagcttccc

SEQ ID NO: 130247 - DNA, 1390 bp, Homo Sapiens
  misc_feature (51)..(83): n is a, c, g, or t
  misc_feature (109)..(118): n is a, c, g, or t
  misc_feature (1314)..(1314): n is a, c, g, or t
agagatgttggtctcgctttgtgacgtagcctgggcttgagcgatcctttnnnnnnnnnnnnnnnnnnnnnnnnnnnnnnnnngcatgagccactgcacccacccctgnnnnnnnnnnaagtaaaccattataataactcatttataaaaaggttacttcaagagggctttcaacttaagaattattttcattttgaacatgaaaagttaaatagtaactaagaaactgagaactctgacagtgacctctaataggtaactttaggcaaaagtagacaagtttgtgggtattttgttgttcatgttaaaaggcacctgtacaagaatcaagatatgaatctagtttgtagagggaaggtcttatgcaaataccaaatcatacaagtggttacacatataatagatcatttggtccagtaaaagtgggttcagcttgtttattccctacttttgttatcttaaaaacaatgattttttgcatgtaatagaaggtttttcacttaagatgctattgagtgaatcagtgaggggttcttagagttagtattcattaattaaacatagaatattagctaaacagttctgggtacactgcaatgcatggtctatggaagactagatgtttggctgaagatgctttattgttgcattatcaaaatggttatagttttcaattaaaactgtaattgatttctatgtataaaacagctttgaagttgtaaatgtagtttccaatcgttagttaatgctacattagttagcaatatttgaaaattttattggtataaaatgttttaattactaaggctgtttgtaggctgcatagtaagcttcaggatcatcacacgttttttccctgtaattggtgggataggaagcctttaaggtctcttgcttctcatgggtgggctacaaggagcagcagccatcgtggcaggcttgtgatctttttcctgctgacacctgctgcttgacatggagaagttctgcacagaaagcagtggcatccttcatgaggtggtacttggggcagacactgagagcattgtaatcgtcttttgtatcaatctctctaaagtagaccaccacgtatttgtgcagatgaatctggcttcttagatcactgcagaaaaggttaaaggcaagggggaagaggtcttgagagttctcactgggactgccctcgctcttgccacaggtaccatcgcacacactgttgacgtcattggaaagaaggaagacgactttgtctgctgccttcttttgagtggcaagccactgcactggacccatctctgctattttctttttctngcacttttcaaggatgactcacttctgcaatggtttttgagaattcagtgaagtacaaatgtgtgatggaacatat

SEQ ID NO: 130248 - DNA, 966 bp, Homo Sapiens
  misc_feature (228)..(228): n is a, c, g, or t
tttccatattaacccatttagaaaacccctatcatccccttcttagagggggaaagtgaatttcttaatttttttagttgcaaggagtcacttcctaggccaactgactagagaatgcagaatgaacaggggaggaaggagctgatggcacagccttagaacagtaaccaagaacacaccccccattcaaggtcacctccaggaaagggcgccccaccccccattccnttccgttttctgggctcatatttaggtaaagctctaagactcctgagccaacttttatgtaactggctttcctaggctggggcttgaactaagtaaagaagccaaggagttcagatctagatagcagagaagtaagtctcattctaaaacattgcaactactgttagagtccaccccatgaagctgtttcagattgtgtatctttgactgaattctataagtatatattgttcagactaaaacaaatgttgctagctaggttggctgtgctgtctcagtaggacattgacagactccagctttcaccctctggagaccttggacctaagtgccacatgcattatgagacctggtccaggagctgtcctgccatggctagctcacggcttgacagcaatacttcttctccttctccgcccagcatagacttggtcacctttgtctcctttttctcccttgtgtcctcgagggccaggtggcccaggatgacctggtggcccagcagggcccctgtcacctttgggtcctggagtgcccatctctcctttttgcccagggggtccttgaatggctccataagtttggaagaagtccatgaggtccgcagtcacgttgctgtaggcagagaagaccttgctgatgccgggtggcccctgtggcccaggctggcctggtgggccctggacagtgtaggccatcccttgcagtaggccctgacgctgcatgctctctgacacc

SEQ ID NO: 130249 - DNA, 929 bp, Homo Sapiens
  misc_feature (490)..(490): n is a, c, g, or t
ggcagttattgctttagtctttcattgcaaccactgggctccctttgaacccggcccaatctttggtcccagcattttcccactccagtgtatccagggtgttccaggtgagctggggaaggaagtgagcatggcctcagctgcagatctcctggaccagcggcatcatggcagacaggccctggatgtgctggatttggtacccgtaggcctcattaatgctcgggagctcagccagcaggcctagcaacttcgcatacagaaacctttggaggaagtagtggggttgccaggaaaacaggagggaaataaggcagttgggagtcttgtctctaggccctgatcccctgaactattcctcagtgaagccaggtctgaaccttagagaaaatcatgctctggtatgacagactatcagaggttccaaaggtcctccagggggcctcgcgtctgacactgtcttctctcaccatgctcagttttttctganacccagagctctgagagccgagtgtgaagaaagctccagacttggccagaactccaaccatgtggaatctgagggcctggccttctagagcaggttctagaaggtggatgtgttctatggtataaagcatcccctttctggccaaactagctcttggaggaacgagcaaaacagaagcggtgcatacctcagagcctggataaatcacagactattgaacctggaactggctttgaccatgaaactgtgaatggccctaacttcaagggaaatgagaaatcgaaggaattggcccaatggcgaggagaggaaaggccaagggaagagaaaagtctgcgttagtctggagaagttggactagtgaggtaatggatgtcatcaatctcaggaatgctattacccagagcctctgagctactactttgcatctgtactgaat

SEQ ID NO: 130250 - DNA, 694 bp, Homo Sapiens
gttttgcgtgaacagagttcttattgatagtcccatcacctccaaagcagtgggcccaccctccctcctaccagcccctccccagcacccagcccctcagtgcagcgccacctcgcaggggtggaggtgggcagcacgggcagcctcgtaggcacggcggaactcctggaatcgtggggcacagcccagccgggcctccccaaagcggctccagcccatgaagaggaaggtgcctgggcccgggtggacgccacagcgcagtggggtacgaatggaggtcagcccctggtccccggatcgccccgcctggaacagcggcggtgtctggcggaggacacgggcggccaccacagtgatgacagactcctgcagctccacgtcatgggtgaccccatggatgatcccgtgaattacgaagtcgctggtgcatgcggccaggagcagctcagcgtcgctgcagggcctgcaggcaccgtctacgccgagaccgtgggcctgcgggggcagctcggggcgcccgtcctcgcgcagctcaaagcggaaggcggccacgcggcggctgatgtcctggtgcggcgtggcctgcaggaagagggcccggcgctcgctggggtccccgcgagcgccgggcctgcaggaagagggcccgcggacgcgtgggtcgacgatatcccgggaattccggaccggtccc

SEQ ID NO: 130251 - DNA, 611 bp, Homo Sapiens
gcgtgaacagagttcttattgatagtcccatcacctccaaagcagtggcccaccaccctccctcctaccagcccctccccagcacccagcccctcagtgcagcgccacctcgcaggggtggaggtgggcagcacgggcagcctcgtaggcacggcggaactcctggaatcgtggggcacagcccagccgggcctccccaaagcggctccagcccatgaagaggaaggtgcctgggcccgggtggacgccacagcgcagtggggtacgaatggaggtcagcccctggtccccggatcgccccgcctggaacagcggcggtgtctggcggaggacacgggcggccaccacagtgatgacagactcctgcagctccacgtcatgggtgaccccatggatgatcccgtgaattactgtggggaggcatgtggctgcggtaggcattcaggggaaggcaggctccaggctccccccatggcggggacactcaccgaagtcgctggtgcatgcggccaggagcagctcagcgtcgctgcagggcctgcaggcaccgtctacgccgagaccgtggcccctcgtgccgatttaaccccagcctcgtacctagccgaagt

SEQ ID NO: 130252 - DNA, 725 bp, Homo Sapiens
  misc_feature (545)..(545): n is a, c, g, or t
  misc_feature (634)..(634): n is a, c, g, or t
  misc_feature (706)..(706): n is a, c, g, or t
cagtgtataatacaagtttaatcaatttcccttttgtttccgaaactcccacctgagggcatatacaggttcagctagccaaagtgatgctgaccctggtgaccaagtcagtgagcggcacccacccaagtacaaggctcagtccacagtcatgataactatagccttatactcattataaggctatagctccaagaagctcagtgccaaaggtcaaggttaaatcagaaggtgggccaagcctcaccagacaatggctaccgtcctgcccagagacaaagcatttgcagtgacaggtaccactggagggataacagacatgagtaccagggacctgaaccctggggtcacacctgcaggcgaaggcttagggctcttagcttgctaatggaactgcagtgaggtggggtaggtgcgtgtgttatcagggcagtaactgggggcagagccaggaggacatggaggcgggggcccaccctgagtgtcactcacactggcagctctgaggttgggtggagctcaggccatagtgaccaggccagtangagtcacagtgctgaccccatacacacactttgcagcaacactgcccaaagaggaggccatggatctcattaatgtgagcatcacacanatccccttccagacacccacagggtcacagtcacaggctagatcagaggtcagaggttaaggatggaattangtcagaggtcacatggagc

SEQ ID NO: 130253 - DNA, 1048 bp, Homo Sapiens
  misc_feature (124)..(124): n is a, c, g, or t
tcaaaaaggggggaggaaaatgtttctttgttaggcgggttcctttgccccttggtttttctgggcccggctggccctttcccagaacggctgggtgcaaggttccttccacctccgtgctttntgcaaacttcttcaaaactccctcccaggaagccagcctttggctgtatcctcggactcctgcttcttgttcagttcccaacactcggttttcaatgtcagccgcattcaccctcgtggcatagtacggctgccgcaggtagaccaaggcgcctgaggccctcctcaatccccgtctttcttgaaatgctccaccaggtccgtgaggctgtcgaaggtctcccaaccacccactgtgtagcgtccaccctcgcacatgaccttgatgtgggtgaccctgagcggggagcctgggccagccttgggctggtcactgagcacagaaagcacgaagtctccaggctggctgaggctctcacgcacaagaaacgtccagggctcgcccttggcctgcagcagcgtctctgcctgcccgccagacatgtggccatggtaccacctctcactagtgggatcggagcagttcagcgggtacttgaggtggatgatggtgccgtcgcggtcctgcaggacaccctgctgctgagtgtagtactccaccagctctgtcagagtcgcaaacttctcccctccatacaggtcatagaaatcccctgagttctggatccgaatatgggtcacctgatcccccaccctgacggagagcgagaagtcacctggttcttgcgactgggccgagccaggaagctaccgtggacacctcggcccttgagcagggtctctgcatccagcccactgaggtctcggtgaaaccacccacgggacagcatctctctgtagggagggggaagccacggcggagggccgcagggggcggggctgagccagcggcacagctgtgcacagtggcccaagccaggtgaggaagaaccgctcagtaatcagccacttcctcctcgatcctgcctgccaggccaatggcccc

SEQ ID NO: 130254 - DNA, 2224 bp, Homo Sapiens
tccaaggtagcgaggcctgggtggcgaattcggcacgaggttttttttcacagtgatcccagggctttatttacaagaggagaagggttggccctgcctggggcctggctgggctatatacagggtcagggagaggtgggggggatgcagccatttaaattacaaaagaatggggcactcctaggttcaggttgtgagtctgtccatcgcgaaatgcttccacagggtcagggctgaggcatggccacctgaggacagcaccgctcacttcctcttgagggaacccttgctcttctccttgtctgctgaccgctgcttcttcactttctcctccctcttgttcttagtgtgcaggttctcatacacatcctccttgtgtttggacgaggtgcgggaggccttggcatgggcattcttcatggctgggggataggtgatgttcccgtactccgactcctggcccttctgcgactgcaggacctccagcttcttcttagtggtttcaatgaactgggcgatggccacgtagatgaacttgtactgcgcctccgtctgcaccatgcccgagcgctgcgcccgcaccatctggatggtcttctggatgtcaatgtcacagtccaggcccttggtggagatgttctccatgagcatgtcgatgacaatgatggtgcctgtgcggccgatgccggcgctgcagtgcacgatgatgggccctgcgtgaggcagactttcctgccgctggttgatctggtccaggaagctgaggacacccccaggctcactggggaccccatggtcgggccagctcaggtactggtaatgccagatctcccgaatcaggtctccattgtccagcggggagacctgtaaggtacggagtttgtattcggttgtgtcatgctccccgcagttggtcacagagtagggcccataagcacgctgcatgcccacctcgggccagtatgggacgcatttgttccggcctttctccacctctcgggtggtcatgacgatgacacggctgttctcctgccacgccatctgccagaagtcattgaccgtggcctccagacagccctggctggcgatgtaggtcttagcgttctcatcagggcctagcagctggttcttgatgtagttggcattgatgtagtcggacccggggatgttactgtcccgtccctgcaggatcactcggctgtggtcaaaggggagaatgttcttgtagcggttcttgcccttgttctctggccgctgcccttccagacgctggtgcaagttcttcacctcctgcttctgcaaactctcaaactcctcccagaagccagccttggctgtatcctcggactcctgcttcttgttcagttccaacactcggttctcaatgtcagccgcattcaccctcgtgggcatagtacggctgccgcaggtagacaaaggcgcctgaggcctcctcaatccccgtcttctgaaaatgctccaccaggtccgtgaggctgtcgaaggtctccaaaccaccccactgtgtagcgtccaccctcgcacatgaccttgatgtgggtgaccctgagcggggagcctgggccagccttgggctggtcactgagcacagaaagcacgaagtctccaggctggctgaggctctcacgcacaagaaacgtccagggctcgcccttggcctgcagcagcgtctctgcctgcccgccagacatgtggccatggtaccacctctcactagtgggatcggagcagttcagcgggtacttgaggtggatgatggtgccgtcgcggtcctgcaggacaccctgctgctgagtgtagtactccaccagctctgtcagagtcgcaaacttctcccctccatacaggtcatagaaatcccctgagttctggatccgaatatgggtcacctgatcccccaccctgcagggcaccaggcggtgaggccagtcggtgcaggagtagaggcaggagggcagggatcggctgaggtcctgacggagagcgagaagtcaccctggttcttgcgactgggccgagccaggaagctaccgtggacacctcggcccttgagcagggtctctgcatccagcccactgaggtctcggtgaaaccacctcaccatcctgggggcttccggagaggaagggggcgcagggaatgaggaggtgcagctagtctgggcaggcagagagatcagggactaagcctccgctgtctggaa

SEQ ID NO: 130255 - DNA, 852 bp, Homo Sapiens
cgtatcctcggactcctgcttcctgttcaagttccaacactcggttctcaatgtcaccggcattcaaccctcgtggcatagtacggctgccgcaaggtagacgaaaggcgcgctgagggcgtcctcaatccccgtcgttctgtggagtgctccagccaggtccgtgaggctgtcgaaggtctccgaaccacccactgtgtagcgtccaccctcgcacatgaccttgatgtgggtgaccctgagcggggagcctgggccagccttgggctggtcactgagcacagaaagcacgaagtctccaggctggctgaggctctcacgcacaagaaacgtccagggctcgcccttggcctgcagcagcgtctctgcctgcccgccagacatgtggccatggtaccacctctcactagtgggatcggagcagttcagcgggtacttgaggtggatgatggtgccgtcgcggtcctgcaggacaccctgctgctgagtgtagtactccaccagctctgtcagagtcgcaaacttctcccctccatacaggtcatagaaatctcctgagttctggatccgaatatgggtcacctgatcccccacgctgacggagagcgagaagtcacctggttcttgcgactgggccgagccaggaagctaccgtgtacacctcgggcccttgagcaggttctctgcatccagcccactgagttctcggtgaaaccacctcaccatcctgggggcttccggagaggaagggggcgcagggaatgaggaggtgcagctagtctgggcaggcagagagctcagggactaagcctcagatgcagctcccagtgccggccgcctcaccacccccgg

SEQ ID NO: 130256 - DNA, 367 bp, Homo Sapiens
ccagacaggatgtgactctgggggttcggggcaagggaacagacggggagtcagcactgccacggggaaccaggaatgagtggttcagggcctggatggcacaagagagtggccaaaatgcccggggttgcggggggcccacctacctgacggagagcgagaagtcaccctggttcttgcgactgggccgagccaggaagctaccgtggacacctcggcccttgagcagggtctctgcatccagcccactgaggtctcggtgaaaccacctcaccatcctgggggcttccggagaggaaggggcgcagggaatgaggaggtgcagctagtctgggcaggcagaaggagctcagggactaagcctcag

SEQ ID NO: 130257 - DNA, 769 bp, Homo Sapiens
aaggagtaactcagagaatctaaggaaaagctagtctttggaagaccaatagcaaggcatcccaaaacctgcaataatagacgggagctatgggcagtctcttcaaagagctgacgtcagaatgactcacgaacaaccattttctgcccctgtgtcattcagctcaactttcaattctggaagagaaaatcggattgggagaatccaggtcaggttgtagaggccaacactaaggggcggggaggagcttgttcatcggactgtgtaggatggaggcagggaatttctcaaagaaaagcgggatgctatcaccaaaagaagcagtaaggatgctgagcttatgaaaactaaacccccccaagcacaatgccttcttaaatgacatcgagatatttatacacaagagggagttacaagaacgaacttgctatttatttgtcattgtagttttcatccatatatcatagaatgttaaagttcaccgtaaaaagacgactttggaaattattcagtttaccctagtatgtgcacttttcaaatcaagaaactggatgtcttgtccaaggctgggtaatagcagaggtgggaccagaagcagatgttttgactgtgatatgaggccccgttgctattccattctgccttgctcatcaagaattacttttaagttgcttaaaggcacattatcttcttgtgtggctaaccatttcttttgcaatctgaatgatgcaattaaattgcctagacatctttgttatacattgtatcc

SEQ ID NO: 130258 - DNA, 774 bp, Homo Sapiens
  misc_feature (669)..(669): n is a, c, g, or t
  misc_feature (707)..(707): n is a, c, g, or t
acgaatttgagaaagagggtttatttagcacatctcagagttacagctcttacagaaagacacttgtctaggcacagcaggtgtgttcaaatttatatgaatgactacttgagttcagacgggattacgtttttcttgcttttgacttatattatttcacacatcttgaattttagagtctaggcttacacatcgtccagtttcttggcatggcttgcttaatctgagctttcaaacttcagattaacctggactgaggctaagagtttataatgaaacccaaaactaagcaagcttcccctggtttcagtttaattgttgaagtcttcataacttcctgggcataggaaacatgtatctggcacattgtagaattagtgatttttttaaaaaggcaaatctgcaatatatacaatagttgactccttgggcatagctattatgcagttgcaaaactggaaatcttcaagaatcctttcatatttcctctttattggtgctaattttccttctgcaccctagtccttagtttggcaagttcctcttctaaacttttaatgtgttccttcaatgtagccttatcttgctgggctttctgattggcttggcttcgtgcttcttcaatcttcctttcataccacttttccatctgggtagaaacagcctcanaaaaatactgggtaagctccagagcttgggaggtgtcncgaatgtgagggccagtctgctcgctgcctgtggctggtggcggctgccacaggtgctgctggctgc

SEQ ID NO: 130259 - DNA, 1541 bp, Homo Sapiens
  misc_feature (76)..(128): n is a, c, g, or t
  misc_feature (449)..(459): n is a, c, g, or t
  misc_feature (721)..(771): n is a, c, g, or t
  misc_feature (924)..(924): n is a, c, g, or t
  misc_feature (928)..(928): n is a, c, g, or t
  misc_feature (968)..(976): n is a, c, g, or t
  misc_feature (1464)..(1498): n is a, c, g, or t
tggaaacagtggctttaggattattatctggctgcccctcaacaataacaagtgattcgatcgacattccttagcnnnnnnnnnnnnnnnnnnnnnnnnnnnnnnnnnnnnnnnnnnnnnnnnnnnnnctgtacaaatatgtatttttccctgagggatcaaggtacacccgcaagtgctctatgtacatattgtactagagaggaatgaagaacatgtgcaaaaaagcaacattgagagaagcttacatactacttaaaccttttcatgaaagatactactaggttgttttgcattttggaatgtcggaacacaacaactagctattccttagtctaaaactaaaaacacacatttctactatggcacattcaatgaaataaaaagttttccaaagacagatagacaaattccatcaagaaaataatacaaagtttgtttgtttgtannnnnnnnnnnagaaaattacattactttctttctttgtttcacattacaaaatctttttttctttacacaaatcacattttattgcaggaatatttcaagtgccatcaaatatttatagaagggttaaaaaaatagaagtctctctaaagtggtccagacaaggctttgtatagaataaatctttttttccccatcttctagttttgatttaagtattttgaatacattttcttttccattgacacttagtagcctagaagcggtccgacgnnnnnnnnnnnnnnnnnnnnnnnnnnnnnnnnnnnnnnnnnnnnnnnnnnntccttcctcacctgaccctcagcccacccccatacgctcacagataactgggtatccacactataatagacccacccaacttagaacgcagtgtcttaagtcatgtttttcttaagttagaaagggtgaattaggatgctgaagactttaaanaaanatccatagctttaatacacgttaagatgctgaacactttnnnnnnnnntccgtagctttaacaccatttgcaaactgtcccaaaagcactttcatctgtacttttgtttgcattgtgaccaaggccaggtttttcacaatataataaccatttggacaccattggaacagaaggtattcaggctttgtacaaaagccttatttgccttatgtaaaaaaattgtacaaaggcattgtagcagcggggctgacagtgatgtggttccaatccttaaatgtttattggagactgaagtttaggaaactttaattataaaaactattaaggatagttgttctgatatcacccaagtattttatgtcatcacataggtgtttttgtaataatgacgccaggccaatgcaaagtttttcacatccttttctgagctccatattttttttaaactgaatttattgtttaacatcagatcccaacttagatcccccggccgtaatggccgaattcccgggcatatgtccggtaccgtcgactgnnnnnnnnnnnnnnnnnnnnnnnnnnnnnnnnnnncggccgcttcctcgctcaatgaactccgctgcgctcggtcgtt

SEQ ID NO: 130260 - DNA, 249 bp, Homo Sapiens
tgctgtttctttgtgctctttctgtttgttttgcacttcaataagaacagaaataaagctgtttttcacttccttttcaaactccagttcatctcgtaaagccaactgctgcaccagctcctcagagtactccttaatggcagtctcaatttcttccaggatttcatttaactcagacactgagagccttttcactctctcttcataactgccggtactagacctcttgagatttggaatcctcgtgcc

SEQ ID NO: 130261 - DNA, 1971 bp, Homo Sapiens
  misc_feature (1134)..(1189): n is a, c, g, or t
  misc_feature (1864)..(1896): n is a, c, g, or t
taaggctctcaaacatgtatttttacttcttaaaaaatttattaaatgccattgatttgactggaaccagcaaaagtgctcatgatattgatgaatccataagtagctgtatctagaattcatacttaagaaaaacacacaggcatgaataaaataggacacagtaatgagaatgggcagttctgcagtgtacactttctcaagcacctcagaggacacacacttttaaagtacaattcttcacagacacatgaagcagaacatttgaaaatcaaaacttaaatacaagattctaaaagtgaatggcaatttaatggttaaaatttgaccagtggtgaaacaagcagcaagctacaaaatccatcaccaccaacagtttcaatgttagcactaagtattaaaccaaagtaatgcatattctggttttgcttcttcaagaacagcccgtttattctgtttcaatctctctgaacaatactggtaggtaatagttacactgacaattctcacaaaaaaacagtgttggttcttgccatcactgaatttatagtataaatctcccaaggctttaatctagttcatcagtgcagtttagataagaaagccataaaaacaaatgggcatactgtcagttaatgagaaatacaactgcacatgcacaattaatattactctctcttaatctactaagagaacagtttattagtagatttaacaaaaaccatctctagaattcaaaatagtgcccatatttccgttggttctataatataaagaattagtgtagtcaagatctgttaatactgaatcaaacccaagttcaaatgtgctgagtttccaatagcaagaagggtaatggtagccagctctcaggatgatgctgtcggaaatctagcttggagcccaccgcagataaagttgctgctctatgtaggacacagaactttcagaatataatcagttaacaagctcggaactttttcactgtcctccttcatggcacgaagaatttttgttaatatttgaagatcttcaacagacggtggtccgttttttttctcataaggaatgactgtagtcaaatatgtgccgggcatatgacttctctcattcttcccattctgagagctgccnnnnnnnnnnnnnnnnnnnnnnnnnnnnnnnnnnnnnnnnnnnnnnnnnnnnnnnngcacttcaataagaacagaaataaagctgtttttcacttccttttcaaactccagttcatctcgtaaagccaactgctgcaccagctcctcagagtactccttaatggcagtctcaatttcttccaggatttcatttaactcagacactgagagccttttcactctctcttcataactgccggtactagacctcttgagagtttgaatttcctgggaaagcattgaaagccgatctgactgtgtaggggttttcatcatcttctggggtccggtgatttcctgcatcatttcttcaatttcttcaaataacctggtctgccgtgaagaggggttcatcattaacacaggagacgatgattgagtgcatatccagctgttctctcagctcttcatcatctgacgtatcaaagagcaaactgtcacttacccctttttctgagaggttcagagtaagcaagtgcaaggtcctagtatgcgatgacttccagtctacaggcatcacattcccataattatctgtcagggcattccaaatctcgtccccctgcaggaggctgcgctccgtgatgggccgcacggccgtcctcgggggctcggcgcccggatccgaggggcggaagcacaggctcagcttctcctccaagctgcaggccagggccgggaaaccgtcggcnnnnnnnnnnnnnnnnnnnnnnnnnnnnnnnnnaggctcggggctcgcgttacagttctcctggtccaggaggctccgggccggctcctggaactcatagaaatcctg

SEQ ID NO: 130262 - DNA, 762 bp, Homo Sapiens
  misc_feature (607)..(607): n is a, c, g, or t
  misc_feature (746)..(746): n is a, c, g, or t
ttttcaactttaaaaggctttaatcataatgcaggacacaggtaactcctctggctccttatttcgacaggctataaagacagccctggaaaatccagagagcaggcccaggtgcggcccagtgggtgatatgagctggctccggcacagacaccagcatcaggccagccctaacacatcagcctttggcggtccagctcattttgtgggtacccgcaacacctgagtgggaggaacttgcagttcagagttgatcttggagttcagatactgctgcagtagcgcctgcagctctgtgttctgctgctccagagaactgttttccagcagcagcttggccctctgggtcaggacaaggtggtacttctccaaggctgtgtagagggcatcccagaggttctgcttggaggaagggatcactgtggtcagggcctgccagtactccgagtccttggagttgtcacgcacattcttctgtaccctcagcggggcccgcgagtccctaggcttcttcagacccatgacgaaggcctccagaatcttgaggacatcattggggtggatgacccagggggagggtggggtctcctcctcttcctccttctcnccttccaccaggctttcttccttttctccctccatctccgtctgctctgccagctccaattctgacctcgtgcttgtctcctccatgctcggcttctccatgctcgcctgactgcagggcttgatctggaggctggaanataacggtgagctcga

SEQ ID NO: 130263 - DNA, 1019 bp, Homo Sapiens
  misc_feature (42)..(57): n is a, c, g, or t
  misc_feature (756)..(756): n is a, c, g, or t
  misc_feature (779)..(779): n is a, c, g, or t
  misc_feature (782)..(835): n is a, c, g, or t
  misc_feature (865)..(865): n is a, c, g, or t
  misc_feature (900)..(900): n is a, c, g, or t
  misc_feature (913)..(913): n is a, c, g, or t
  misc_feature (943)..(944): n is a, c, g, or t
  misc_feature (948)..(948): n is a, c, g, or t
  misc_feature (950)..(950): n is a, c, g, or t
  misc_feature (953)..(953): n is a, c, g, or t
  misc_feature (957)..(957): n is a, c, g, or t
tttgtcgttgccaaaaatatacacatcttcttttctttattnnnnnnnnnnnnnnnncccaacaacaaaaacccaaacagaaacacacacagaaaaatccacacatgcaaagagactgacaaggccggagcctggggaagctggaaacccctaccctgggctccaaccccagtgcaactgaaacagggacacaggcttcgccttgcctctcgcctctctcctgactgtccactcagcctctgtgccaaaggcctgggcaggcggggactctttgaaggtgagaattgcccactctaccctggggaaatagctggtgggtgaggggacagttgttagtcagcttagtggctcccctggttggtgggggtggggtgcaggaggcaagctggctaattctgggagggaggcttttgctaaaagcagtggcatttccccccaccttacgccctcccccaagccctggggctccccttgtgccagagaaggaggaagctatcagtggggtaggtggccctaagggggccctgagaccatgtggggtcaggggagggaaggcaggatactaccctgattcaaagccctgtgcccccagcgactctccaatattggagtactgctctggtgtttgttaaccattcatgcccccagagagggaccaaagttggtgaggtggggagggtgcaataagagctgggaggtccctctctggcgctgcttcatctgacactgcgcctatccctgcccttggctgcctgngtcaggaggagagagcaggcagnagnnnnnnnnnnnnnnnnnnnnnnnnnnnnnnnnnnnnnnnnnnnnnnnnnnnnnntgagtcgggcagctcatctccccacctcgnactccctagtcatagtgcaacaagggcgggcacanggaagcagagctnccgcactgccctctctccatcagggcccannagtnangangtgngctgatgtatctctctgccctctcagcccacattgtggtttaacaccactgtcctgccgggg

SEQ ID NO: 130264 - DNA, 687 bp, Homo Sapiens
tcaatataatatatgttttattaaataaatactattcttcttgtcccatcaacatatactttttacatttttgcttaatttacaattcgagttaatattttgagaacgtaaggaaagacaaataggtaaatgtcttgttgaaagggttaagatactgacaggacataccttcctgttccatcctatataaaatccactcatgagttggatgccaagtatagatttctgaaactcataaccaccaatcacgataatgcaatcattaaaactcacaccattgcaaggaccaagtataaaatattctgctactattttagatacttcaaaaacatccactactttaaatgaaaagctttaaatgtgtcaatgctatttgctttttaatggaaattaaagaagaatttttctattattctgtttcgatcaactattaacctttaggataattgttttatgtgaaaaaaattagaaatttttttaaagcaaaattagtactattggtttttatttattttactgttcttaatacagttaacttatgaccaacagcatggattatttatacagggtttgaaaatgcctctcaccaaccacaaatacaataggcagcaaataccaggctcatgaaattagcagtgactcaataggacgcactgtatgtttgatgactggcaccactgttgttct

SEQ ID NO: 130265 - DNA, 681 bp, Homo Sapiens
tttcccttccgtctgttttcacgttcacgtttattcaaacaacagagccgactcgggcgaggtctgggagcggcgggcgggcagtgtcgcctcctgggctctgctgacccctggtggtggggtcggcccaggctgggacctagcccagcccctctcggccgctgctgaccgccatcccccacaccgccttctggagcccgcagagggaggcaggggcgtccccggggacagctcaggcggccacagttgggggcggggagcatcagcctgtgcggagctgggagcctgggaagcaggaggccagagggtggccccttcggttaagtgtctggggagcggcccgggagcccagaggggtcgtcgggggaagcgcggggcacgtgctcgcaggtgatgaggtgggtgggcagcgcctgggtgtcgtggaagatgacgaagatgctgggctggcagatgcagtccacggcgctgtcgtagcgcaggagcacgtggccaggaccccgcagagggggcgcccgcagaccgcggcggccctgcccgtagtcgccagtcagcacccgtgccacgaacaccgccttatggccatcggcgttggggggcgagtagcggtcctgcaccgacagggaggcgcgcctggcgaaatacacgcccttcccgtagaccgtggctgcagggcgagac

SEQ ID NO: 130266 - DNA, 729 bp, Homo Sapiens
  misc_feature (674)..(674): n is a, c, g, or t
caatttcacttgtttatgagatgataggggtttttcgtgaaacattcattttgaaaaatgtggttgttcatcaggagaagattctaggtgataaagacagagaagactccgccaggacaatgttacagtagagagagggaagaaagagaggaggaaggcgagggacggaggtctgttccgtgcccggtgatgagctgatcccattaattcggtggggacagtatcggtcagatcatgggtttgactgacatgatctgacaacctgccacgctgctcagccagcggcaggaacgggcactcaggagggagaagccagggatggagacacagaggaagccaatgcaccattaagtggaatcattgtttagactcacaaaaggcagagctgaagatgtcctccccaccaacccaaacgcccctagcaaaggaaggcataaatgaaagaaatccaacagagtttattgctgtgatcgcttttttgaagaaattactgctcttgaagaaacaaacacgcactggtttatttaagaacaagcagcgcagagttacagaattattgacaaaaccagcctaaacttctgtcgttcagtttggcataagtcttgcagcagattacacatctcatggtatgatgtgaagaacgtgctatcgggttaaaaaaattaatgcctttntgatgcctctacataggagaatctgtatgtactattcccccgcccattcagagat

SEQ ID NO: 130267 - DNA, 2546 bp, Homo Sapiens
  misc_feature (983)..(999): n is a, c, g, or t
tttaactttttcaataaatattttaattaaacagtaggcaaatccaagctgatacacatcttaatgaaaaataagcagcctgaaagaaacctatttaaaaaatagattaaggtacaaccaagaattaaatcttttagtctttctaatggaaggaaagtttcatctatgccttgagtgacagtgttgtccaattaaaagagactaacatctttccctatgagaaacgtctcattacaacggcacagtgttttaaaaggccagggtaaaagaggaattacacatacatgattaagtttcttgtttgttaaatcaagctttattgataaaatggaattcagaatatcttactaggaacagcagcaggcccagccaatcatgatagcaaaaatgtggcagtttcctactatatgtaggaagctgctgcttatcaattagtaattaaatgtaaggacttgaaaagaggtgcaaagaaacaaggcatttagccccaagattgagattcttatgaatacactgtattattacctgcaatactcatggaaacaacgaaggaacatcctgaaagacagttaaatgaagggactggctttatcaacaatgccaactcccctaccaagaacatttaagatagttttcaataactccttggatgttcagctttgtaagattttgaggttattttccataatcatctgcacatttgagcgtgtagctgacatggctgctgctctccctgttccaaccccaagtccaaacacaacatgacttgaaagggctatatatctgttgcatcacacaataagccaaacatttcttgtaactttgatagtgatttaaagcagttcataattaaatatgagcattttgtacaaggacaattacactttacaaaaaaacaaaatcatacaacaaaaattgctggagtctgatttacaacacgaattatggtttgaaatcacgcttacataagtctcaaatttacnnnnnnnnnnnnnnnnntcagttctgggctagctgttgtactgctgaagttctctgatgtaatcattctcacccatgtcatatccccttccttaaagttgaggatggatgttaaaagtttcaacaaagttgagctgtactctcctttggaggtgaaggtaaactccatggctagatgagcagttttaccacatatcatctgttgatgtagagtcagtgtcgtcatttttgtaaggattcagtctattgtaaacggcttcaatgacattcctcttgcttgccaattcaccccctggtgggaggctggggatgttctcactcgctaatgtgcgcatcacatggactaagtcggggacgccttccccctgcttctttatgatttcttctactctgcattccaggtacttgtccaactctgcctccttcttcactgcttctggcgatactttgggtgcatttggaaaacagatcaaaatcacactcatgttgtctcgacttcccttatacaaacaggtgtcgactacttcattgcaaactttctcaaggtcatcagtgacttcaagtctggatcttacaaaatcacagagctcttcatttcccataacatcccagataccatcacatgcaaggataatgaactgatcatcttcttcagatctttcaatatcatggacttcaggctctggtgagacaagctgctcagtaggaccttttccatggacacatttgtaatcaaaatcctccaagggccctcgatacagccagagagccattcacacgctgaatcattacagagccacctgcattctgaattcgttctttctccagcggattacttggtttgtgatcttgtgtgaagaaatgacttttcctgttcctacaaagtaaacctcttgagtctccacagttaatgaaataagtatgttggggagaaattaagacacctacagctgttgacccacttctatctgcaccatgtttcttctctgacataactctcatgtgttcatcaatctccagaaaacctgttctgattccattctttacattttccacagaaggtgctcctgcagaccctttaaaatcctggttattggtgatgtgatctaacaaatgctcacagcagtatttggcaacctgagaaccagcatgcccatcatacacagcaaagaatgaccacgattcaagtccacttggcaaaccgatcacagccgtatgtgcatcctccatttcaacacgccagccttgcatgctgcttagcccatatcgcaacccattaccctgcccctgggcattatgcttttccatctttggcttgtctaaaaatgctcccattatgtcttgatcctctaggtccggagcagccgcaggcgggcaggtccctggtcggccgaggcggcggcggcggcagccggggagggggtcaccgcggcggcgacggcggcagccgggggaggggtcaccgctgcagcggcgggccaggtcaggctggggaaggggcggaggaggggaggagccgggctgcgtccgggcccccggctgtcggcgccctcgcggctcagagc

SEQ ID NO: 130268 - DNA, 1082 bp, Homo Sapiens
  misc_feature (337)..(346): n is a, c, g, or t
aaatgcttggaaagatactacaaagccaatctttatagaattgggccaagataaatctatgttgttttgcatggctattgttaagctccaaaggttcactgtgtttctgccgctgtcctggagttgtcaccactgactgggcaaggcttcttgggcatggatgtagaactgttgtccttttcccactaacagttatctttgactctcttgcctgttatgcttacaaaatggtgatggcttatggaaggctgttaaattaatattcctgttaaaggaaattaaagtttgtctatttttgacaataaaacattatatatttttaattctcttgtcctcnnnnnnnnnnctttcacctacttggtgcagtggtcataggatcagggctgcaattacaagggctgtaagtagggatggctcattataaaccttatatcagaattccttatgggcctgatagaagtgggttgtgccttcatctcatttggcaaaattggggttaacagtgaatgcagctattttgcctggtagtaaaaacagcccaccagttctggacctgtgtagcctaaccctatctgaatatgagtggactgaaagggagcacctgctagactggcattgctgcgttccgcctagacagacagggtgtacaaatggaggcaaacctttgcttccaaaggtggaagatttggggtataaatgaagagaaggaagaatagtcactgaggttaaaggaattaataaatgggttatataaggatggaaatccaatattatcacttcaaaagaggatcagagcaagtgatgatgatgtcttccagctgaattataacagatgcctgaaaaggtgaagctatgtttgcagagactacttttgaaatcagacagggtcgaatggaagcctacaaacttgagtgacctcatcctgggagacatatttatactacacaacggacttgattaattataaatgattcagtgagattctaggagtgctgcagtatcttttaagttgtatgtccttttgatgtaaggaattctcattggaagattagggtggtctttaaatatatattgtgaaatat

SEQ ID NO: 130269 - DNA, 540 bp, Homo Sapiens
ccatcgggcccggcggagcggcccggccggagcgcccccgcgagctcggaccaggctcaggcgcccagtgggctcaggcccagagcccagagcaaccagcacaatagcgtccaacagctggaacgccagcagcagccccggggaggcccgggaggatgggcccgagggcctggacaaggggctggacaacgatgcggagggcgtgtggagcccggacatcgagcagagcttccaggaggccctggccatctacccgccctgcggccggcggaagatcatcctgtccagcagccacctgtgggtatttatgagtttcatatgaagtactgtgccccttcccttcctcatcccgaccctgcccgagcttcctgaaggtcctcactgtttgcatatcgctcaggccacctccaaaccccacctaggttttataatgtatattatatatttttttgtgtatttttaaaatccagctgtgatgggttatatcataaatgcagcttggggttggagcaggggccctcaaaggcccagctcctgctc

SEQ ID NO: 130270 - DNA, 453 bp, Homo Sapiens
tttttgagcaggagctgggcctttgagggcccctgctccaaccccaagctgcatttatgatataacccatcacagctggattttaaaaatacacaaaaaaatatataatatacattataaaacctaggtggggtttggaggtggcctgagcgatatgcaaacagtgaggaccttcaggaagctcgggcagggtcgggatgaggaagggaaggggcacagtacttcatatgaaactcataaatacccacaggtggctgctggacaggcccagctggctctgggggcctgggtgttaagaagggacagcaggtgaagggttaaccttcagtcccagaactgggtctgggagctgctactctaggcaggtagattgaggtggggaagaacctaagggagcagtgcccaccaagggtttgtcagattcaagcctcaggcaagagaaaaatcaaaagc

SEQ ID NO: 130271 - DNA, 724 bp, Homo Sapiens
  misc_feature (285)..(285): n is a, c, g, or t
cccgggggaaattttccccccaccaaacccctaggggggccaggtttattttaattgcccaggggcttaggagccgtttcaaagcttattctaaggtccaggttctcccggaaaggggtgttccaaaccgaggattggaaaacgcctggcaaggggaagtggctgacttgttgcaggacatggcagagcgatttggcagaggactggacgcatgctctgaaggctttgtccttgagacctgtccaggttcatggcttgatgcaaacctgtactcccgcaccttcnttcgagctagaacctgtatgtggctggacacctgttttctcgtccgagtcttccccgtcctcagtttaatatagcgtgcaatcaactcatttcggccgtacatcttgccctcgtctgacaggatgatcttccgccggccgcagggcgggtagatggccagggcctcctggaagctctgctcgatgtccgggctccacacgccctccgcatcgttgtccagccccttgtccaggccctcgggcccatcctcccgggcctccccggggctgctgctggcgttccagctgttggacgctattgtgctggttgctctgggctctgggcctgagcccactgggcggctgagcctggtccgagctcgcgggggcgctccggccgggccgctccgccgggcccctcgtgccgaattcggcgcgcctcgacttcatactctctcccc

SEQ ID NO: 130272 - DNA, 979 bp, Homo Sapiens
  misc_feature (55)..(65): n is a, c, g, or t
  misc_feature (654)..(654): n is a, c, g, or t
  misc_feature (734)..(734): n is a, c, g, or t
  misc_feature (767)..(767): n is a, c, g, or t
tttttcaaaacaagtgttatttattataaaatcagtggcttctgattagaagacnnnnnnnnnnnaaaccaaataggctcaagaagctggctggaggttgaattggctgacgaacatcttcttcctccaccagcagtttgtgggacacatcacgtttctgccaagtgctacagctgaagcccatattcatagaagcaccctgacagcccttctccagcaacttccagaaaacagaacctgagcactcaaagctgcatcagcccatgtggccttgctcccagagaagcatctgccagtttgggcatggaggaacagaaagtgggcagggaattctccttggctccttagaaggcagtgggagcccagggaagcgttcggccccagtgcagcctaattgggagggagggatgggtagaggctggctgggcttctccttcctcaccctcatgtaaggtgactgcccctctggctccttcagagctcttcccttccaagttcctactgagaaataagaaggcacaaaggaaaatcagccacctcctggaggtcactgtgggccacctgctttgctaagagccaagcacagacccctgcattctccctgcaggagagcccacccggctcagaagaaagcattccgcctgtggggagganaggaagggacggaagggaaaagacacatgggagggttgaagagcgagcagagttctccatccctctctccttcctgccanaatgcattaagcagtggccagactcagcgcaanacagcgcttctgcgggggaatcaaaggctgtacatgggaagggaggcatcggccagattaataccacctgctgctttgacgtgccctcgtgcgatctggctcagggcaatcctatatgagcgataatcgtacatgtcaacgtccgtggaatgtaccccacatcaacacacaccgagatatttagctggggcttgatgacatcaatattgctg

SEQ ID NO: 130273 - DNA, 1545 bp, Homo Sapiens
  misc_feature (1132)..(1152): n is a, c, g, or t
  misc_feature (1165)..(1165): n is a, c, g, or t
  misc_feature (1168)..(1168): n is a, c, g, or t
  misc_feature (1359)..(1395): n is a, c, g, or t
tttgagcgtaccgggttttctccatgctgtttcttactctcctcttttgcacccctcccatttccctcgtttttctttgaaaatttctcccccctccagttcgctgtccggccctcacatgtgtgagaggggcagtgtgccgttaatggccgtgccgggcaccgggccgctctggtagtgctgggacatgtgaagtctgctgggggcggcgggttccggcacctcggcgccggggagatacatgctgatcatgtcccggaggtccccggcctggcagggcgccctggagtgggaggaagaggtaaccacaggggggctggagctggcctcggacttgaccaccgaacccatggagccaagagccatgccaggggtgccctgctgcgagtaggacatgctgtaggtgggcgagccgttcatgtaggtctgcgagctggtcatggagttgtactgcagggcgctcacgtcgtagcggtgcatgggctgcatctgcgctgcgccgtgcgcattgaggcccgggtgctgcgggtagcccagctggtcctgcatcatgctgtagctgccgttgctccagccgttcatgtgcgcgtaactgtccatgcgctggttcacgcccgcgcccaggccggcgcccaccccgaccccgctcgccatgctattgccgccgggggccagcagcccgccgggcagcgtgtacttatccttcttcatgagcgtcttggttttccgccggggccggtatttataatccgggtgctccttcatgtgcagcgctcgcagccgcttagcctcgtcgatgaacggccgcttctccgtctccgacaaaagtttccactcggcgcccaggcgcttgctgatctccgagttgtgcatcttggggttctcctgggccatcttgcgccgctgcccgcgggaccacaccatgaaggcattcatgggccgcttgacgcggtccgggctgtttttctggttgccgccggccgccgccgcggtggagttgccgccgccgccccccgaagtttgctgcgggcccggcggcttcagctccgtctccatcatgttgtacatgcgggcgctgtgcgcgggcccggcccgccggcggccgccgaccctcggcccggccgggactttnnnnnnnnnnnnnnnnnnnnnagaggagaagggnagncgggcgggggtgtcgggagcgcagggctccgcgaggaaaatcaggcgaagaataatttgggggaaaaaaagagagaggcaaactggaatcaggatcaaaaaaagcgcttccctcctcctctggccgatcctgccgccgccgatgattgttattattattttttggaaaggcttaagcctggggctcaaacnnnnnnnnnnnnnnnnnnnnnnnnnnnnnnnnnnnnnagtcctagtcttaaagaggcagcaactactttcccccttttgcaaacactctcttctctgcctgacaactcctgatacttttaagacaggtaatagcctcgccgataccccggctacagctagttggattaggtgcggatgggtgtgtgt

SEQ ID NO: 130274 - DNA, 933 bp, Homo Sapiens
  misc_feature (107)..(107): n is a, c, g, or t
  misc_feature (764)..(803): n is a, c, g, or t
ccgggtttccgcacctcgcgccggggagatacagctgatcatgtcccggagtccccggcctggcagggcgccctggagtgggaggaaagaggtaaccacagggggcntggagctggcctcggacttgaccaccggaacccatggagccaagagccatgccaggggtgccctgctgcgagtaggacatgctgtaggtgggcgagccgttcatgtaggtctgcgagctggtcatggagttgtactgcagggcgctcacgtcgtagcggtgcatgggctgcatctgcgctgcgccgtgcgcattgaggcccgggtgctgcgggtagcccagctggtcttgcatcatgctgtagctgccgttgctccagccgttcatgtgcgcgtaactgtccatgcgctggttcacgcccgcgcccaggccggcgcccaccccgacccggctcgccatgctattgccgccgggggccagcagcccgccgggcagcgtgtacttatccttcttcatgagcgtcttggttttccgccggggccggtatttataatccgggtgctccttcatgtgcagcgctcgcagccgcttagcctcgtcgatgaacggccgcttctccgtctccgacaaaagtttccactcggcgcccaggcgcttgctgatctccgagttgtgcatcttggggttctcctgggccatcttgcgccgctgcccgcgggaccacaccatgaaggcattcatgggccgcttgacgcggtccgggctgtttttctggttnnnnnnnnnnnnnnnnnnnnnnnnnnnnnnnnnnnnnnnncccgaagtttgctgcgggcccggcggcttcagctccgtctccatcatgttgtacatgcgggcgctgtgcgcgggcccggcccgccggcggccgccgaccctcggcccggccggaactttggggggcccgg

SEQ ID NO: 130275 - DNA, 2119 bp, Homo Sapiens
  misc_feature (561)..(581): n is a, c, g, or t
  misc_feature (2004)..(2038): n is a, c, g, or t
aaaaataagtggtttattaaatcttcactaagacagacatgaggtgtttgccaagaaagaaattacattaattataacatcttataccagggatattaaacactaaagatctggtgattctacgtcgcattttcggcagttttagtaccacgcagaaaagttgctgtggtgcctactatgctcaaaacaccacatcacatagatgcactcaaaatacttactgggtttttaatggcaaagccaccactaatgttaatgttgtcaaataagtcaaatgtaaaatttctgaacaattagagtggttaattacttgtttatttttaagtttataaagagttgacattacatttaaacaacaatttaattaggacaattttgaatgttgacatatcatcaaaaacatatgccatttctaaaaagtctagattcagagcaggatgccattttaggtgaactatgtcttcactaatgaaataggacgcagagagaaatactatgtttattaagaactttttgcttagagaagacaataaaacatatttaagaaaaatatttactccnnnnnnnnnnnnnnnnnnnnncaatgccttctgtagtcttatttcactacagattgaactagggagataattttcttcttcacagacaaagatctttaagtttcttttctctgattatttgatcaaggaacaaactatattacaaacatggcacaaaatccaggctttcatttctagccaaccctcaaacaccaccaactacaaagaaaatttaaaagtctaatttgtaaccttcagataagtataaattagttttttctaggctttcattatttggcttcttatacaatctatcttgtaaagtacattcctctaaatttacattatctaaaattaaggctaagcattatttaaatcaattaatcatacaatattttatgacaatatgcacatatttataaaataacttttccaaaagcagtaatacctcaaattaaaaaagaaatcttttattgctttgaactatctgctaaaataaaaacacacagaaagggaagaggtttaacaggtaggaagaacatagggaccccttagaagttttaaggtagtccagttcacttgttccagacaggagaattcacagtgtctcttcaaggtttaaaattctaaggcattcaatttgccatagtgccctgcaaaaaatcgtcatatatgaaattcgcagacccttgttgcaagtggtctcttttcctaaagaaatctgtcaatgctcgaagcttcacacagcaagcaacataatcatcaaagaaaattctgccattcttgctataacggtttaacaatagtagttaatgtttgaggactcaacctataacccataagaccaatggcttgacgcaactcatgatgttctactgtgccacttccatcttgatcaacagtcatgaagttttccttccaggcattaagagctgcccatagctctttgaatgcattaaatcccatttttcctgtgtgatctctatccaacatggcaatcataattctgcaggtttccaaactgaagggagagtaagttccattaattccagactgtgtcaaacatctctgaagttcttcagcatccacttcaccatcctgtccagcaacagcactgaagtaagtatacacggagtcaccagctgaggaataagtgtctgaatatgctggcccagagtatccatcgaggagtatagctgggcctgtttctggcactggctgtcccatctgcattcctggcacctgaatgctaaaatttccaaaccctcctccgtatcccgggtaggccatgacgagcgggacgagcggagcgagcgtcaccctcgagtcgcgtccgcagtgctgggagaaaaagcacaggcgcaggtgcaaggaggcgcagctgcaggtgaggctgaaaggcgcactccccgcccccggccgtaatggccgaattcccgggcatatgtccggtaccgtcgactgnnnnnnnnnnnnnnnnnnnnnnnnnnnnnnnnnnncgccgcttcctcgctcaaaaacttcctctgcgctcggtcgttcggctaaacgaggtagcgccctatagtgatcgtatacac

SEQ ID NO: 130276 - DNA, 1056 bp, Homo Sapiens
  misc_feature (261)..(261): n is a, c, g, or t
  misc_feature (997)..(1015): n is a, c, g, or t
ccgcgtcggtcatatcatgcagcagtccgatgaagcgcatgcgcaccataattgatgtcatcatagccccagctacatttgctccgctgatgtttgaatgtggcgtaacattcaccaggacagtatactgatacgattatagactcattagggaattgcctcgagccaagatcggcacgaggggggcccaatgatgcacagggcagtggctgagggcgccggatctgtgtcagggaggtgccaccatgccggagtctcacncaggaccccttgctctgctcctcagccttgcagtcacggcagcactatggtggactgcccatggccgtgtgactttgggggcaagtgggagggcgccctgaataatgattgcaaggacaacaggcagaggctaccctagagcaggacacagggtgtggtactgacaaccctagtgtcacctcaaatccatgtccccacactctgggcatgggtgggacttgtgaccctaccctgtcaggcggaccagtggcccaggagccatgaggacagttgtgtgccactggaagagaaactttttgaaaaaccctaaatcaggtagagaaagcaaaaaatctctggccgtaaaccgtgctctctaatttatcggcagcttctgtggatgacctctgatgagcccgggctgcgtccacgccctgggcaggtaggcgggagcttccctgcgtgggcctcatttcttgctgcagagaatcttttgcactaagtcatgctgtttcctcaaagaagctttgttttttgttaacgtattactcagagtcacccaagcctcttggctgagggtgaaggtgggacgggaggcgggagggggctggtggtgccgctcgtgcggtgtcaacgctgcagggagttgtggcaccttggtgccctctgagcacctggccgcctgctgtccccggtgcctgtgaaattcgtcatgccatgacccacctgcattaaacctatttttttaatgtgttgnnnnnnnnnnnnnnnnnnncctgagcaggcggccgcaagcttattccctttcagtgaggg

SEQ ID NO: 130277 - DNA, 627 bp, Homo Sapiens
  misc_feature (501)..(501): n is a, c, g, or t
ctgagctgctgtatggctatgattttgttaaaggccgacacagaggtgaagtcaactgctagaaatcacggcttttaagaggtggagtcacatttgaactctggcctctgatgccagatctgcaggtcacatgttcaccatggtccaggtgaccctgactgcggtccccacctcttctgtgaggcacagggcaggattccacctgaggcgcgaggagcctgggacgactcctttggtctcttctggggttcgcaaaaacctgggggtcccgggtgtgaagaagggtgtctgcgctctcagcggtcaggctccaggcgctgcgacaggacgccgaggacgcgctggaacttctcaaagcgttcagcgcgcggagctcccgcgccccggctaccccagagcagcctccgcacgaagccggtggtcagggcctccctcagctccgggttaggccggaatcctcgcaggcgctgggctgccaccttgcggaatttgggtgcgtcncggaccatgtgacgcgccccgtgcagggtgcgcaacagccgctcacagctctcgtccagcggcccgcgacttcctcgcctccagtaggcgaacatgggtgcacgtgcggcagcgcactcgcggggt

SEQ ID NO: 130278 - DNA, 1158 bp, Homo Sapiens
  misc_feature (92)..(92): n is a, c, g, or t
  misc_feature (112)..(114): n is a, c, g, or t
  misc_feature (117)..(118): n is a, c, g, or t
  misc_feature (134)..(134): n is a, c, g, or t
gtgggggaatacagggggcaccagggggcggccccggggaaacccccgccccaagacttgggaccccaagggaggggggatggtacccgaantggaagggggggcagggggnnnggnnccccacctcccccttncccatcgtccttgggctgctgagctaggctcaggctggaggctcgggtcttgacgtcagtgtcccctgctgggggccccccaccaggtttgcgccggggtcatcatcgcagggtccgggggcagtcctagtagcggccgaccttggcgtccccaatggcgccccagacgtcaaagacgaactcgtcagggaaggcaaagtcacccagccgttcgtccagggcctcggccagctcatccgggttccttttgtcctttcccagctccaccatggtggccgccagctccgtgtccctgatacccatgtaactctccagcaggtcatccaccttctcaatggccttctcttcaaaggcagagggcagatcctccactgtggcggggccccgggatcggagccgcagggtccctcggccagtgcccagttgtgggccagagccagggcggccacccgctgaacgctggctgatcatgtcgaaggccttgcgaggctccgtgagcttcagcgtgaaggtacggcctcggggcagctccttgagcagccgggccacctcgtagtgccggcagcccagcaggctctgcccgttaatggcctcgatcatgtcgcccacgctgatgaggtggatgtggtcgatcacgctgccctccttgatgcgcttgatgaaggcgtagccagccccgttgtccgtgatggtgagcccgagtgcatcctccgacttgaacacctccacctccttgcgctgccccttcacgtgggcgaagatgaagtcctccagcccgatctggccccccaggagcttgtccatgtccactttgtgggtgttcagggtgcagaacatcacctcggcagttggcaggcggaaggcctcggcgatcttgccatacagctccttgacgttggtgaagccctcgatgcggccagtgggactgccatgggccagctgggtgtggaacacgaggcgggccgcagggccgacgcgtggtcgacgatatcccgggaatccggaccggtaccagcctgctttt

SEQ ID NO: 130279 - DNA, 1210 bp, Homo Sapiens
  misc_feature (1113)..(1126): n is a, c, g, or t
ttttctccaacagcagatagattctttatgttcaagacagcaaattcagatacaaaaacccaccgccatcgtccctccctccctcctgctctgggccagggatgggcctggaaggagagatgggaggtggggaggaggttgcggggttcacagcagactcgtgtcaaatgcggaggtaacaggctccacagggagggggctcctctcaggaggggtgagggcattattgcatttgctggggggaaggacaaccctctcccctgtattccctgcgtcaggaaactaggaaggtcatgacccccaaacagaacccaaggccccagggagacagagggaccagtttggcagctgatggtggaaagtggtggaggcgggggtggccgcccaatttggctgatccctcccctccctgtgcctgacccagctgaggtaggtggggaacagggcacaggggggccggggaccccggccagactgggaaccagggaggggatggtaccgattggagcggggcagggggcctggccccacctcccctcaccatcgtccttgggctgctgagctaggctcaggctggaggctcgggtcctgacgtcagtgtccctgctgggggccccaccaggttgcgcccgggtcatcatcgcagggtccgggggcagtcctagtagcggccgaccttggcgtccccaatggcgccccagacgtcaaagacgaactcgtcagggaaggcaaagtcacccagccgttcgtccagggcctcggccagctcatccgggttccttttgtcctttcccagctccaccatggtggccgccagctccgtgtccctgatacccatgtaactctccagcaggtcatccaccttctcaatggccttctcttcaaaggcagagggcagatcctccactgtggcggggccccgggatcggagccgcagggtccctcggccactgcccagttgtgggccagagccagggcggccacccgctgaacgctggctgatcatgtcgaaggccttgcgaggctccgtgacgttggtgaagccctcgatgcggtcagtgggactgccatgggccagctgggtgtggaacacgaggcggggccgcagggctnnnnnnnnnnnnnncaagcccatttgggggccccccgaccacctccgcaaagagcctgccctcgtgccgattgaaccagcctcgtacctagcctaatt

SEQ ID NO: 130280 - DNA, 1103 bp, Homo Sapiens
  misc_feature (43)..(61): n is a, c, g, or t
  misc_feature (792)..(792): n is a, c, g, or t
  misc_feature (801)..(801): n is a, c, g, or t
  misc_feature (823)..(823): n is a, c, g, or t
  misc_feature (853)..(853): n is a, c, g, or t
  misc_feature (858)..(858): n is a, c, g, or t
  misc_feature (863)..(863): n is a, c, g, or t
  misc_feature (894)..(895): n is a, c, g, or t
  misc_feature (917)..(918): n is a, c, g, or t
  misc_feature (922)..(922): n is a, c, g, or t
  misc_feature (982)..(984): n is a, c, g, or t
  misc_feature (991)..(991): n is a, c, g, or t
  misc_feature (994)..(994): n is a, c, g, or t
  misc_feature (997)..(998): n is a, c, g, or t
  misc_feature (1007)..(1007): n is a, c, g, or t
  misc_feature (1010)..(1010): n is a, c, g, or t
  misc_feature (1017)..(1017): n is a, c, g, or t
  misc_feature (1043)..(1043): n is a, c, g, or t
  misc_feature (1046)..(1046): n is a, c, g, or t
  misc_feature (1074)..(1074): n is a, c, g, or t
taacctcactaaagggaataagcttgcggccgcctgctcaggnnnnnnnnnnnnnnnnnnngctgtatcattctgcttttattagaaggcaatgtaaaagagtattgacctacacagttaggccagaggtactagccaatctccatcctccaagaaaaatgatctccagtggctcagagccacctcagtccctgtccagaggccgttcgcctgactgggactggactgaggtgggcgggggttccaggagggcataagattcctgacgggacaaatatgtgtcccagggctaaacagaactggctggaatgtttttcttacctcccatttctacttcattatgaaaatggtggactgggcagcagtgaatgggtcgatcttgtgtgtcaggttatgtaattacataaacgactgtattagctttctggggctatagtaacaagtcagcatgaactcagcatgaactaagcagcttaaaacaacagacatttattcttccagttctggagtctggaattctgaagtcagggccatgcttccttctaaggcttgtggggaacctgtcccatgcctctctgctggcttctgctggtggccggagatccttggtgtcccttcccttccggctgcatcactccaacttgcctcttgtcccctggtcttcttcccactgcatttgtgtctattaccacaactctctcttctcctaaggatgccagtcattggatttggggcccaccctaatccaatgtgacctcatcttgactatatctgcaaagaccctatttccanacaaggtcncattcacggggatgggggttangacttcaccatatattttggggggacacanttcancacangtagcatccaacagcctgctttatctggtcnntgtctagcacttctggataaannatanaaaatacatgtacagatgctttatcctttttgcactatagagtatatcagggggaggcannngcagccnggnccnnatctccgancangctcgtngcgatttctggctcgagggcaatccntangtggagtcgataaatcgtatctgtcaanctgttcctgggtgattgtatcgctcaatc

SEQ ID NO: 130281 - DNA, 967 bp, Homo Sapiens
  misc_feature (504)..(515): n is a, c, g, or t
ctgcgcagtcccagccgccttccccaggcagtggaaccttcgggctcctgagcttcaggatggttcgtactaagacatggaccctgaagaagcactttgttggctatcctactaatagtgactttgagttgaagacatctgagctcccacccttaaaaaatggagaggtcctgcttgaagctttgttcctcaccgtggatccctacatgagagtggcagccaaaagattgaaggaaggtgatacaatgatggggcagcaagtggccaagtaattatttccatttgtcccagtgcttggaaaatatgtctcctctttacctcctgctgggtcctgtctctgtccattgctcctacaatttcttcagcctatgttgttgactcactgtgtgatcttggaatcaacttgggaaattctgtctccttcctaactagctggaaaggagggaaggatgtgaaattgtcattttttcagcttcactttgccatccttacttttaattactnnnnnnnnnnnngtatttgtccaggtcatgatttattgcgggatctggccagtagcctgcaatgcaacggggttctctctttgttcccaggtggatcggcaggttgagaaataatagacacacacaagatagtgaaagctgggtccaggggggtcaccgccttctggtcccgtggtgccaacaatgcactggatataccagcatttattattaagtttagtgagggcgggggtaggttagtgagggatttagggtcatttgattatgaggtgagatggtcacatggggatgaagtaattctttaacataacatttgtatgtagaagtacagtacatttgtatgtagaagtacggtatacaaagataagaatttacaatatagtgtgtgcatcagtaatttctaacagagtcttataacagaaacacagtctttccataacctatgattagcaagatattaatca

SEQ ID NO: 130282 - DNA, 1273 bp, Homo Sapiens
  misc_feature (1247)..(1247): n is a, c, g, or t
  misc_feature (1255)..(1255): n is a, c, g, or t
cttgtggtgtttgtataccacttaaatgtattttattaagtagctcaaactcattatgagtactatttcttaagacatttaaggtagtatacatttttgctaaatggtgaaaaacaaattaactaatcatctaaatggcctccagattccatgtgtcctctttttcatgctttcactattgtcttccccaaattatctcctttcagcattcccataaatgcagctggcatgttttcaaatccttcaatgatatattccttgtactggattttaccctctaagacccatttcagcaagtccttcagagctttttggcgggcatctccttgccagcggtagacgacaaaagcttccatgcgaagctcctgatagataacaatctctgggggtgggcctgggggaagtgggccggttctgttatatgtagagatggctccacatatggcaatccttccaaatttcttcatctggccgataacagtgtttgaaaactctccacctacattatcaaaataacaatcataaccatcaggagacgctttcttcaaggtttcttccaaagactctaccgtcttgtagttaaagacgacatcaaatccaagcttttgaaggtaggcaaccttttcatcagaccctactgctccaacaactttgcagcccttgagctttgcaatctgccccacgactgagcccacagctccagctgctgcattaaccatcactgtttctccacccttcacaccacagatttcaagtaggccaaagtaggcagtcaggcctggcatgccaactgtccccagagccaaagacagtggtattgtgtctggccactctgtcagcagcttttccagatctttcccatcagaaatggagtgcgttgtccagcctggagaagccagtacaatagttccttttggtagggctacatttttactttccacaactttggccacttgctgccccatcattgtatcaccttccttcaatcttttggctgccactctcatgtagggatccacggtgaggaacaaagcttcaagcaggacctctccattttttaagggtgggagctcagctgtcttcaactcaaagtcactattagtaggatagccaacaaagtgcttcttcagggtccatgtcttagtacgaaccatcctgaagctcaggagcccgaaggttccactgcctggggaaggcctcgtgctggaattcgccacccaggcctcgctacctaggaccgttatggnccaaaaangggggggtgtttgggttg

SEQ ID NO: 130283 - DNA, 914 bp, Homo Sapiens
  misc_feature (50)..(50): n is a, c, g, or t
  misc_feature (141)..(141): n is a, c, g, or t
  misc_feature (152)..(152): n is a, c, g, or t
cagtgtatcttggattgataccttatcagtcttggacggaagcatctacntgaatgagattcttgcagttgtgagccagagggcgtatcaagtgcatgcaaaggagtacgacttgctcttcagtgcaaggtgtaaggactngctctctattntgaagcagtattgtcacgtctctccccagtggctcctaaggggcaggcgtgtgagtgacgccatccgaagacagcacttgacctcgggtggaagccaggctctttgcttggcttctctttcctctgttcttgatgagaaccacccttgcttgaggaattctgaagcgctggtgacccctggggtatccgggaggatggccgcaccccttcctgctgatcacccaaacgtggtctcccgtccagccctggctgcagcctcccagttcccaaactgcactttacatatcaatccatgctgcctgatccctgtgggacctttgacagcagggatgggggtctaacagctgtagggtgctgccactccagcaggcgtcggttcaaggcctgagcagcacagggacatggacccagccacgctgcagcagctcacacctctctgcggttccctctcacttttagatcggaagccagtttctacacacttgcctctcgctacagcgtcctcctcaccggccgaagaggagaaactcattgaaatcctggaacagctggctcagacatttaaataggccaacccagacacagtgcggtaccagaattgccttagaagataccagaaggtgcggtctagggaccagtgaataagaagaccccacttcaacttcccctcgaagacgttgtgcctcacagcgaggcctaccaagggatgggaacttttatttcaaaataaatactaccgaggctgtgatcaggctcaccttg

SEQ ID NO: 130284 - DNA, 1822 bp, Homo Sapiens
  misc_feature (1346)..(1346): n is a, c, g, or t
  misc_feature (1484)..(1535): n is a, c, g, or t
ttttttaaatatcataagcctcgtcgttttattccacatggttttctaggtaaccaaattctaggaggtgcgttgcagggccattttcgcatcccggccatgcccagcaggacggtgttctttaaacggcgctgatgcccgatttcgaccccgaggagactgcggacctcgactgcggcccccaccagggccggtccgccctcactccaccctttgaggctggggcggagtcgaccggccggccccgagaccccttgccttaccggtggagcaaggaaccggaagccgcggctcttacataaccgggatgatgtcagggcgggcgactcccggggggcgggaccagggcggaggccgcgccgggagcgcggtggggctaggcgtggggcgctcccggcatgtccctgtaccgcagcgtcgtgtggttcgccaaggggctgcgcgagtacaccaagagtggctatgaatctgcatgtaaagactttgtccctcatgacttggaggtccagattcctggaagagtctttttggtcactggaggaaacagcggcattggcaaagcaactgcccttgaaatcgccaagcgaggtggcacagttcacctggtttgtcgagatcaagccccagcagaagatgccaggggtgagatcatccgggagagcggtaaccagaacatttttctgcacattgtggacttgtctgatcccaagcaaatctggaaatttgttgaaaatttcaagcaggaacataaactccatgttctgatcaataatgcaggttgcatgttcaataaaagagagctcacagaagatggacttgaaaaaaactttgctgcctatactctgggtgtgtacattctctcgaccggcctgatccctgtgctggagaaagaacacgacccccgagtgataaccgtctcctcaggaggaatgttggttcagaaactgaacaccaatgatctccagtccgaaagaacaccatttgatggaactatggtctatgcacaaaacaagaggcagcaagtggttctgacggagcggtgggcccaagggcacccggcatccatttttcttccatgcatcctggctggccgacaccccagacaggaatgagcaggagctgaggaaggtagtgggagaggcccagactgcctcaccactccccaggtttttggaaataaatgattgcatagaaggtaaatgggccagccacaaggacacagctcgaatgatctgggagcgtgtttggagcagcggtggaggggagcagaatctcttccggattggcctcaccaactccatgacctcaggcagctcacctgggctctctgcagctctttcctcctntacaaacaagggaactgaaagcagcagcagccacagcacacaccccagggtgcacccgcggcgccaagaactggtcttagcgctgtttgcggattaacgcatttgtcctcaagcctctgtggagtggccactactgtnnnnnnnnnnnnnnnnnnnnnnnnnnnnnnnnnnnnnnnnnnnnnnnnnnnnacctcccagccgggcctggccatggggttttgggaatcaggctctcacacactgctggcatggcctttctgaaaatcactatttatcagaagccttggaattcatcctaagaaataaagatagggaaaacaaggttgcttatcacagtgctggtggtaggagatgaagttaataaattatagaacacctgtgcaaaatctgttcagggctgaagactctgctgccaatcatgcctatggaaaaaccctgtgtgcactatatcattaaatgaaggtaccaagttcctg

SEQ ID NO: 130285 - DNA, 521 bp, Homo Sapiens
  misc_feature (338)..(338): n is a, c, g, or t
  misc_feature (499)..(499): n is a, c, g, or t
  misc_feature (509)..(509): n is a, c, g, or t
agcaaatctggaaatttgttgaaaatttcaagcatgaacataaactccatgttctgatcaataatgcaggttgcatggtcaataaaagagagctcacagaagatggacttgaaaaaaactttgctgccaatactctgggtgtgtacattctcacgaccggcctgatccctgtgctggagaaagaacacgtacccccgagtgataaccgttctcctcaggaggaatgttggttcagaaactgaacaccaatgatctccagtccgaaagaacaccatttgatggaactatggtctatgcacaaaacaagaggcagcaagtggttctgacggagcggtggnccaagggcacccggccatccatttttcttccatgcatcctggctgggccgacaccccaggtgtgaggcagcgatgccgggttccacgccaggttcggggaaccctgcgctccgagcccagggcgcggacaccatgctgtggctggccctctcctctgccgnaccgcactanctgagcggtcgc

SEQ ID NO: 130286 - DNA, 528 bp, Homo Sapiens
gttttctttttcccttcctgtattcctgtagtgtggacatcttttcctgtcggtacatgaggctctaaggcatctttcttccagtcctgggaaaaggaacatttggcttgaaggatcctcggaaggagggactgcccctcaggtgtgtacattctcacgaccggcctgatccctgtgctggagaaagaacacgacccccgagtgataaccgtctcctcaggaggaatgttggttcagaaactgaacaccaatgatctccagtccgaaagaacaccatttgatggaactatggtctatgcacaaaacaagaggcagcaagtggttctgacggagcggtgggcccaagggcacccggccatccatttttcttccatgcatcctggctgggccgacaccccaggtgtgaggcaggcgatgccggggttccacgccaggttcggggaccgcctgcgctccgaggcccagggcgcggacaccatgctgtggctggccctctcctctgccgcagccgcacagcccagcggccgc

SEQ ID NO: 130287 - DNA, 757 bp, Homo Sapiens
  misc_feature (591)..(591): n is a, c, g, or t
gtaatgcaaccgagtcgatgcaagttttatttaggagatgggttacaatcaccttggggaggctctagttaccttgatttggtctggtacaaaccctagcaccatcatccacagatccccagaggaagtcattcctggatgacttcctcatcgattttaaataatttccatttcagaggaaggcctttatctgacctgatcccctaaatattgggggaaacctacatagggacaaagacagcaggtgtctgcaatgttgagaatcagtgtgttctgtcactgtctctatcagggctggtggcacatgcaaatctctttcccactctccagttgaacactaacgccatggtgcccacaccttccttattagtccatgtacatggggtttgtcaagacagtggttcatggctctgaccctgagcatgtcagatttcaggggctttatgcaaaatatccataccagttggggtcatttcccatcagtattgctcacaatggagcctacaaacccctagttcccatccaacacatctccaaggcagactctcagaccagctcccagaaatgaggtgagtttagatcaggcagcanagaggtggcctgggaaggagtccttggagctcatgcacctgtgtctgggcaccaacaggaagatggtggcttttgctctttgggagatatctttggagtcagtctctgacacatgtccaacaggacaggcatccttggggtttccatggcagtctactgacagtca

SEQ ID NO: 130288 - DNA, 944 bp, Homo Sapiens
gcggccgcctggccgtctggtccgtctgctccggaggccgtgacggccagactcgttggtgtcctgtggttcgtctcagtcactacaggaccctggggggctgttgccacctccgccgggggcgaggagtcgcttaagtgcgaggacctcaaagtgggacaatatatttgtaaagatccaaaaataaatgacgctacgcaagaaccagttaactgtacaaactacacagctcatgtttcctgttttccagcacccaacataacttgtaaggattccagtggcaatgaaacacattttactgggaacgaagttggttttttcaagcccatatcttgccgaaatgtaaatggctattcctacaaagtggcagtcgcattgtctctttttcttggatggttgggagcagatcgattttaccttggataccctgctttgggtttgttaaagttttgcactgtagggttttgtggaattgggagcctaattgatttcattcttatttcaatgcagattgttggaccttcagatggaagtagttacattatagattactatggaaccagacttacaagactgagtattactaatgaaacatttagaaaaacgcaattatatccataaatattttttaaaagaaacagatttgagcctccttgattttaatagagaacttctagtgtatggatttaaagatttctctttttcattcatataccattttatgagttctgtataattttttgtggtttttgttttgttgagttaaagtatattattgtgagatttatttaataggacttcctttgaaagctgtataatagtgtttctcgggcttctgtctctatgagagatagcttattactctgatactctttaatcttttacaaaggcaagttgccacttgtcatttttgtttctgaaaaataaaagtataacttattcac

SEQ ID NO: 130289 - DNA, 859 bp, Homo Sapiens
  misc_feature (124)..(124): n is a, c, g, or t
  misc_feature (126)..(126): n is a, c, g, or t
  misc_feature (144)..(145): n is a, c, g, or t
  misc_feature (149)..(150): n is a, c, g, or t
  misc_feature (152)..(152): n is a, c, g, or t
  misc_feature (159)..(231): n is a, c, g, or t
  misc_feature (234)..(237): n is a, c, g, or t
  misc_feature (241)..(246): n is a, c, g, or t
  misc_feature (248)..(253): n is a, c, g, or t
  misc_feature (255)..(270): n is a, c, g, or t
  misc_feature (272)..(279): n is a, c, g, or t
  misc_feature (281)..(291): n is a, c, g, or t
  misc_feature (293)..(312): n is a, c, g, or t
tcctcccgcgcgggtggggtggtggtgggccccgcccgcggcggtttttctgtggccggggggttgtctccttttgcggcgtggggccttttgggcccactgttttctcttccgccccttgtgngnctcgcccggcgcttcccnncccnntntccgggnnnnnnnnnnnnnnnnnnnnnnnnnnnnnnnnnnnnnnnnnnnnnnnnnnnnnnnnnnnnnnnnnnnnnnnnnccnnnncccnnnnnncnnnnnncnnnnnnnnnnnnnnnncnnnnnnnncnnnnnnnnnnncnnnnnnnnnnnnnnnnnnnngtgaataagttatacttttatttttcagaaacaaaaatgacaagtggcaacttgcctttgtaaaagattaaagagtatcagagtaataagctatctctcatagagacagaagcccgagaaacactattatacagctttcaaaggaagtcctattaaataaatctcacaataatatactttaactcaacaaaacaaaaaccacaaaaaattatacagaactcataaaatggtatatgaatgaaaaagagaaatctttaaatccatacactagaagttctctattaaaatcaaggaggctcaaatcctaaaacagaaagaagaaatacgttaaaacacaatattttttaagagtccaatgaggttattgcagatgtacattttaacatttcatttgctcaatgtattttttttctcattcttggagcacttctgtataatgtagagagattacatgaatgataatgcagatactggccttctcaatgggcctttcaggttttaagtttcaaatctgaatctggaatcccacctaaatgtttacataata

SEQ ID NO: 130290 - DNA, 479 bp, Homo Sapiens
acaatctgcattgaaataagaatgaaatcaattaggctcccaattccacaaaaccctaccagtgcaaaactttaacaaacccaaagcagggtatccaaggtaaaatcgatctgctcccaaccatccaagaaaaagagacaatgcgactgccactttgtaggaatagccatttacatttcggcaagatatgggcttgaaaaaaccaacttcgttcccagtaaaatgtgtttcattgccactggaatccttacaagttatgttgggtgctggaaaacaggaaactgcgaccccaactctacctcgcctccatgggggggtgttctccacagaggatattgtcccactttgaggtcctcgcacttaagcgactcctcgcccccggcggaggtggcaacagccccccagggtcctgtagtgactgagacgaaccacaggacaccaacgagtctggccgtcacggcctccggagcagacggacc

SEQ ID NO: 130291 - DNA, 970 bp, Homo Sapiens
  misc_feature (582)..(591): n is a, c, g, or t
  misc_feature (593)..(876): n is a, c, g, or t
cagacttccttctcatccaggaaattccaaaatgtctttacatacatattcttatatggtgtaataaaagattctgaagtccattactggctagaataataactagaaattgcttaatattactatacattgcatttgaacttaatctccacagtaacaattaggtagtattacttggatttcatggatgaagaaaaccaagatacaaaaagttcacacagccagtaagcagatgagcctgacttcatagtcatacatagcctgaattgagtcccagcaggagcacatgggcatggacatctaccagatttgggaactggcgtagccaagcaagaaataggagacggaatcaggagttaggattccatgcttaggaccatcccagatggatggctgcctccctctgggagctgcactcttctgaggttgcaggcatccagggccagggtgcttctgtgaggtgtgccagcacgtgccactctgctggatacaagctatcatgttctgagggctgcttccctcagcataagaaggggcttctattgggatgtgtaggcttcattgtagggtccacttgagtcnnnnnnnnnnannnnnnnnnnnnnnnnnnnnnnnnnnnnnnnnnnnnnnnnnnnnnnnnnnnnnnnnnnnnnnnnnnnnnnnnnnnnnnnnnnnnnnnnnnnnnnnnnnnnnnnnnnnnnnnnnnnnnnnnnnnnnnnnnnnnnnnnnnnnnnnnnnnnnnnnnnnnnnnnnnnnnnnnnnnnnnnnnnnnnnnnnnnnnnnnnnnnnnnnnnnnnnnnnnnnnnnnnnnnnnnnnnnnnnnnnnnnnnnnnnnnnnnnnnnnnnnnnnnnnnnnnnnnnnnnnnnnnnnnnnnntatagccaagaatagttggctatactttcatctttgcctagttctaagtaatcctcgtgccgagatcgccacccaggcctcgctacctaggacc

SEQ ID NO: 130292 - DNA, 935 bp, Homo Sapiens
  misc_feature (190)..(190): n is a, c, g, or t
  misc_feature (320)..(329): n is a, c, g, or t
gtgatgaatgttgagagtggcgtggtgatgtggtctgttgttgtgcaaggacatagagcaaagtagatgctggcaaggttaggaccagttggatgactgtcaggtcagagctgagggcgtgctggggagtcctggagcgccctggacaccatggcattctggaaggtgtgctttgcagtctcaggccaancccacagcagctaaatggcttgtcctgttccggcatcagtgccaggaaagcaaagccaggagtgaatatttagctctaacttggactttgatctctgccagcttcatttctggttttccctgggcttcannnnnnnnnnctactataagagacactttgtgtaaagataagagggtgtcctcaatgtctgttaaacactggggagcaactgactcaccagatcacagaaaccctagggcagggaaggagggtcaggcagcccacagccacccagtctcaccaactccacatttcggagcaggaggccagtcaccctgagtcagccacggggagacgctgcagctgtaagctgtgcaggcccggaagttcaagcctcagccgcaaacaggggaagccacacacagaaacacaacagcagcccccgcaggtggaggcgtgtgcccctgctcagaggacaacaaccttcccctgcccgcaccagccaacaccgtgccacctctgctgagaacaggactggggcttccagggcaacaggaagggtttggggtggtgatgggaagaacttcccagtcctgaaagtgtggttcctttccccgaagaagccactggagcacctaaggtcactggtactttgaatcccatccagggggcttgaggcagagtcatgatgaagaactgggggacgccagccccagacagccttaaagggagcttttcagggacctctggccagtgggggatgagc

SEQ ID NO: 130293 - DNA, 739 bp, Homo Sapiens
  misc_feature (704)..(704): n is a, c, g, or t
ctttccatgctttattggaagctatgccctctgttttcaggccctagtcaggcatccaccctcccctggcaccatcaggcacttcctgcctctggccctcctgggggggtcctgggtctggtgctccttggggttcaacagccctgggaggtgggggtgaagagcaggggctccagctttccccagtgttggcctcgagggtgctgtggtctggagaaagtaacccccaaccattgccaaaccttgggcatcaagagacggggcctttgctgaggttcacggcctggtgcaccaggtgggggctccgaggaccagctgcccagccccctcaggccacgtcatgagtgaggagcctgccggacccttctgcctgggccctgcgactgctcaggggctggtgtgccttggtggcacgggtggggctagctctggtttctgaagaccggccatttgcatcacttcatggtaacagtgaggaccaggggtcctgcatttgacctcgctggtcccatcgcaagtgcctgggcttcaaggtgtgaactgtgaggagttccagaggggacatggggcctgccctagtgtaaccctagtgcttccatgacggccccaacagccggccccctcctctgccccagggtggtggggggtccacatgaggcaagccggccagactccccacaggccatgcgtgctcaacaccccanattatctacatgattctcagtgttacatgcacccc

SEQ ID NO: 130294 - DNA, 670 bp, Homo Sapiens
tttgttggtttcttttcagtgttttatttttcaaaatatacaatttaagtttttatttcacaaccgtagttttgtatatttattccaaaatctttaaatagctccgcagcaaacagtacaaatcacaaggtccgtcaaactgcttctctttagcctttacacttggcgacttttttaagtttcaagtagtaatggtttgtgggtaagaaaggaaccaaaaacaggaggaaacaacattttttacataagctcaacatgtaggattagaaagggccgtctgaccagctccttggtctgggaccagactaagaacatgtatctggtttataaataagaccgtcctgggagcagtgagggttttggttacgaggaggaaggggcaggaacctcatctgcggaggctgggaggcagggggaggtgaggcactgagaggtggctccttctgggagcgcccgagtaggggcctgagcggggtggaggccaagaatggccagggacgggggtggggctgccactggtggagaagcctcctcagcctcccttggggagaagggctgtgattctggaggcaggggagggacggcaagaaaagctgccaggtcctaaagcaagcagctgggactcctgccagccaccctgggcccaacgacgcaagcagctggcagggcc

SEQ ID NO: 130295 - DNA, 689 bp, Homo Sapiens
  misc_feature (670)..(670): n is a, c, g, or t
gcaattggcacaaaagtccagtcatttaataacaaatgctccccctaccctcaccccatcacagcaccctgagaatcacgggtccaactgtgtgggagggggctgtggaaagccaggatgaatgggggcagtaggtagggggctgggtgggcctctgcacctcatgtcactggctcctgggagcagagaatcaggctgggcacagaggcctcttctctgaccaggcaccagcagggcagctccatccaagggaagcgagggctgcccactggcccagccagagagcatgaggggtcagggctggctggagaaaggaggaggagaagtgactctggtccatcacacttaggtcctctggcctgcctctgccacatccagctgctaggggctggcctcagccctgtgaggggccgcaggcactcactccggccttgccttcttggccttcttctcagacctcaccgcctcatcgtgggctttccgcttctccgccagcttgttggcctctcggatttttcgcctcttgccaaacatgatcttctggtacaggtacttctcccgcttcttcatcatcataatggccaggcgcttggcctcactctcctcctcctgggccagccgctgcttatcctccagcttcaaggtgcctgccatcaccctgggcttcttnccctccatcctctgctctt

SEQ ID NO: 130296 - DNA, 1189 bp, Homo Sapiens
  misc_feature (47)..(47): n is a, c, g, or t
  misc_feature (544)..(722): n is a, c, g, or t
  misc_feature (806)..(806): n is a, c, g, or t
  misc_feature (835)..(835): n is a, c, g, or t
  misc_feature (852)..(852): n is a, c, g, or t
  misc_feature (910)..(910): n is a, c, g, or t
  misc_feature (919)..(919): n is a, c, g, or t
  misc_feature (922)..(922): n is a, c, g, or t
  misc_feature (929)..(929): n is a, c, g, or t
  misc_feature (948)..(948): n is a, c, g, or t
  misc_feature (955)..(955): n is a, c, g, or t
  misc_feature (1019)..(1019): n is a, c, g, or t
  misc_feature (1043)..(1043): n is a, c, g, or t
  misc_feature (1077)..(1077): n is a, c, g, or t
  misc_feature (1094)..(1094): n is a, c, g, or t
  misc_feature (1097)..(1097): n is a, c, g, or t
  misc_feature (1151)..(1151): n is a, c, g, or t
  misc_feature (1154)..(1154): n is a, c, g, or t
acttttcctaattttataaggtttcaacaataaatacacatttcttntggtaatcagaaaactgacttacaaaagaatgaaaacattttccctgaaaggagggtatcaattatttgcttcatttttagcagtggcctttaatgcaaaaagaaatataaaccccctcgaggaatcagtagtcacatcgtctcaaataaagcataaactgtagatttatccaacagtaaagtccatgatgaaacaaagtgatacagtgatgagtgccccaattcttctgtaagtgggtgatggtgtggcctacaataaatgttttcctgcttattattgcagggtggagagagagttagaatgaaggcgaagtttcctacgcacataaagctcagtgagaaagcaattccaagagtaatggaaggaaaacgactctcgggaattcagtttgaacactggcgactgagcccataaacatctttctggaatgaggtttgcagaagaaagcagcggtctaacctgtggtagcctgtgactctgacattaacaccagagnnnnnnnnnnnnnnnnnnnnnnnnnnnnnnnnnnnnnnnnnnnnnnnnnnnnnnnnnnnnnnnnnnnnnnnnnnnnnnnnnnnnnnnnnnnnnnnnnnnnnnnnnnnnnnnnnnnnnnnnnnnnnnnnnnnnnnnnnnnnnnnnnnnnnnnnnnnnnnnnnnnnnnnnnnnnnnnnnnngggtgctgtgaaaggggcagggaagccccattatataatgtttccagcaaggcagcctcacgttgcttcaccgaagtcactcanagaaagctctgcccctcctgcttttccangagtcgtgtcatttcangacttccgcactggctgtagagagtggagacagcaggctcccgagccgactccacggntttcatgtntcntcgatangatgtctgtgactaccaangcgatanccatatagtgatgggttattttacttgaaaatacactagtgatattgagacacgtatcttttanggcatctggctgatcatcatatanagctactgatgacatcttcgtgccgatttctggnctcgaggccaaattccntanatgagtcggataaaatcgtatcatgtatagctgttcctgtgtgattgttatcgntcnattccaacacatacgagcggagataatgtaagctg

SEQ ID NO: 130297 - DNA, 1107 bp, Homo Sapiens
  misc_feature (74)..(99): n is a, c, g, or t
  misc_feature (721)..(754): n is a, c, g, or t
  misc_feature (901)..(901): n is a, c, g, or t
  misc_feature (905)..(906): n is a, c, g, or t
  misc_feature (964)..(964): n is a, c, g, or t
  misc_feature (1046)..(1046): n is a, c, g, or t
  misc_feature (1057)..(1058): n is a, c, g, or t
ggtaacgacggccagtgccatgctcgaaattaaccctcactaaagggaaaaagcttgcggccgcctgctcaggnnnnnnnnnnnnnnnnnnnnnnnnnnctattaatcttttattattaagacggctgaaaaaaatgattacatattattagtgaagctcagtggaagagaagtgggtggaaaagctctaacccgagaggccgctttcacaggatgggaggatgggttacattttgcaaggtgtaccaaagggttaaagtcattttcattaaaatttaaatttcagcatgcgctcactctcccttccccgtcctttgaacgtttgactggcaaccatttcatatttcaatctcggcagaacaaattgaattagatgttgaaaccaagctcggctctgttcaccaaagcctgcgtgctctgctcacactaatcctttcctagacgctgcggagcacagacgggcgctgcgagagacggccctgcacaaaagacaaaaaagaccaaggcggcaggaaaaggagaggaggaaaaacaagcgggcagaggctgctggaaattgtcttccacctgatgcatggggcttaaagcctaggagacagagcctgcgtccacgcagcagggaaggccagtgtggaggcacacagagcgacccgagtttctgtcttgtgtctggggcacccagcacagtgtctcgcacacagcagatgcccagcaggtgtcnnnnnnnnnnnnnnnnnnnnnnnnnnnnnnnnnngggagaggactcactctatcagcccatgcctctagcctgtgcctgttccctccctctgcagagtgggcccggctattctcctcaccctcacaacttcctgagaagtgatagcatgctgtgttcaagtggctggtggctctccagtcnccgnntgccagtgcaacagcggaggatgcagctcaagttctggggacgaacagcagactcggngctggctgggatccatggacccagatacccagtcgctgctcttcttaacgtgtagtcgtggatgactaagttgaccaggccngatctgtttannaaacatcgcgcgtgcatgatccacactgaaccccatgaggtagaagcgg

SEQ ID NO: 130298 - DNA, 895 bp, Homo Sapiens
  misc_feature (74)..(92): n is a, c, g, or t
ggtaacgacggccagtgccatgctcgaaattaaccctcactaaagggaaaaagcttgcggccgcctgctcaggnnnnnnnnnnnnnnnnnnncatggtacaaatgataaattatatttatacagtaaataagtatcaacagtcaacacaagttcaaaaccagccaccggcctctgggactgagaaacagctgggtgacttcctccaccacggtgcccatcaggagggagcacgatggcacaggtgcaacatgcgtggcagtggccggtggcttcatgatcagtgcagtgggcaacagggacatgcactcgggatggcctgtgccagaagatggggcagggggctgtcttcttgggtcccggtggcccagtggctgtcatgttggggcctcaaagtcacatcatgaaagactcgttacaaaagaatcactgaccccaagtagtcgagtctagtctactgacctgtaaggctggcccaggccctgcaccgtctgaaggaaagcacctttctgggcaagcatcctgcctcccatcccattgcacctccccacccttcccccggcagacgagaccagccaccggcttacccaaatggcagcgggagcctaagacccagccgcaggcctgcagttctggcagaaggtggctggtcaggaactctagacacggctcctgggactggagagggcggcctcaggaacagcatgagtgggtgcagtccccactcagagcctgcatgtcccagcagcccagagaccatttaagatctctcctgtgccggtgcgaagggtaatcttctggaaccagagaggggctggcaggtggtcagctgcccttagagctagaggtgagacatcccatggtggaaaaagggccagaacatcaccaagcaagctg

SEQ ID NO: 130299 - DNA, 1671 bp, Homo Sapiens
  misc_feature (1448)..(1460): n is a, c, g, or t
ttttttttgagtttcaaaacgagaacatttattatttgttttttcctcattaaagtttcacaaataaagcacagcaagacttgtctgcagacacacaggaggcacacggacagcccgtcaaccagagatggagacgaaggccagcgtggctctcacagggcagcgcttctcagaacccctggcccccctcgtgccaaggctggcctgtgtcaggcctcgcccacgccgccttatgacaaatagaggccggtgccaaggaggtggctacagagcaggggcaaggaagttatcctcatgttctgataatgaccctgcaaatcccaccccaccctcaggcacctccgtctaaggtgtccggttactccaggtaaggaggttcccaggagggccgtgttttccctagggctgatgaaacttgctccgacaagccaggccactgggaggcacctcaggatggaaaagatgctggaggctttgctggctttcaggatgccgggagccccacgggggcaaaaggggaggaaggaaagagattctaaagacagattgctgctggtctgtcccgacccagggtcacagtgtcagcaaagagaacagcatgattctgacagggttggattttgtttcaccctcggaatgagcagacttcaaacacttgcattttcacggaaatcaacaagagagacagctagcaggacacgaggctcctgccagttctgtgtggaaaggcaccagatggtttgttatgaaacacattttggtcagaaaatagctggggttttttggttcctgggaggacaacaaagctagaagaaaaggaggtgtgagttgcgtgaggaggaggcagagaagaaagcagctttggcatcagacctgggttttactttttcactttacccttcccacgcttgaggcctcagtttcctcatctgtaaagtgggtcatagaatatttccaaaataaaatctaggtgtcaggttttcacacatcatccccaggaagtatgggggggcggggcgcagacactcaaacggacacacagaaaccagaggaagagcacagccttgcgtggaggggagaaggctggcaggggcccgacggagggcggtcacagagatgatccccgtgtcagtccctgggagcagggagcagccagttacactggttccaagcacaggtggagaccatccacggggaccttgggccccttctcctggaggaagggcagaaggaaagctggactcaatgcagcaccatggaggagccctcagggtcacacctgctgttaatgctttaaagtgccaagctgtatcgtctttggtcaggagctgccccttagtctctaagagcctggggtccagggctcaaacccccgcctgctgggccctgaggaagcagagcaggaggacacattccccttctgcggctgtgggtgctctcctgtgctnnnnnnnnnnnnnaaaatcactgaaatccaacagctttcaggaagcaggatgcccccagggaaatttgggtccttagaaagagagaagggactagaaatgctttggtcacagtcctgatacccacagccagggcagagcttgctccaggagagcaagcgggagccgattacagcactgcacatgtcacgcagcaggagacgtgcctgacgcagactggcttctg

SEQ ID NO: 130300 - DNA, 651 bp, Homo Sapiens
  misc_feature (445)..(457): n is a, c, g, or t
  misc_feature (496)..(496): n is a, c, g, or t
  misc_feature (593)..(593): n is a, c, g, or t
atttgcagtagtttattcatattttgtcacaaatggccggggagggggtgccggactcctccaggcgacatagaaaataggtccaagagacaaggtgggctgaggttggggcagatggagacagggctggagaaagagcctgggggagaggggagggcagactaggggtggggctgcccccctgctgagcctgctcattcccggtgcgggtacccccccacctgcagggggagcctcagggtgggggtggagggggatggcccagaatttccagggtcaagctctgccccttggcagggcccaagtttcccccgaaatggacaaggccggaggtcctgccccttccaggaatgactgccatgcccacaggctggcagaggagcccctgcccctgtttagagctctgcccagccgctctagtccaagggggagggctctgaaggcnnnnnnnnnnnnnttccccgcagcagcagtttgggggttggagaggctgggnggcaccagtgccccctccctccccagggctgaggcctctgcggccaaggggcagggctgggggtgcacaggcgtccggtccgttctgggctcgctcnctggccggcttccccttagaaactcaccaacgtataaaccatactgtacaggtaatag

SEQ ID NO: 130301 - DNA, 991 bp, Homo Sapiens
  misc_feature (728)..(728): n is a, c, g, or t
  misc_feature (769)..(769): n is a, c, g, or t
  misc_feature (778)..(778): n is a, c, g, or t
  misc_feature (797)..(797): n is a, c, g, or t
  misc_feature (836)..(836): n is a, c, g, or t
  misc_feature (861)..(861): n is a, c, g, or t
  misc_feature (885)..(885): n is a, c, g, or t
  misc_feature (888)..(888): n is a, c, g, or t
  misc_feature (890)..(890): n is a, c, g, or t
tttgaatgtgtgactttttgtttttaatagaaaaaataaacaaaatcacaatggtgaagcccagagggatgggggccggggcgtcacagggcaggctcctgctccatgggctcctctgccggcctggggctgtgttcccgggctgccgcagcctgggcctgctcggcccccaccgacagcaaggccatggcgctcacagtctcggcctcctcggtctcacctgcttgggcctctcgcagggaccggcccagaccagcggcgaacttctgcacacagctccagtgtttgctctggatctcgatgactttctctagcgtggccactgcgttgatgttgggcttttgctgcaagactgcctcatccaagggctgcagctctacactgagcagagccgagacacaagcctcagaggcatcacagatggcggtcaagtcatggcctccctccagggccagcaccacccggccccctgccagggtcatcagctgcctggtcaagtggccaaaacatctggcggtgacagagtagccacccagaggagacagatgtccttcaacagcatcaaacccggcggagactaggaccacatcaggtgagaactcgtgggcaatgggcatcaccactgtcctgaaggctgtaaggtactccacgtctccaatgggggggtcccacctcctgtccatggcacgttcacttgtacccacgcctggtcctccacaacgtctcangagcccagagctggaaagagttccgttgtcatagcattcanaagatgtanagcaagagggtcattgtanacgctgtgggtgcatttgcatgtgatgtccatcacgatnagacttgccacgtcactctgcttangagttgcggtatggtaagagttanaananacccatggttggatctccgctgggtctggggccgatatgcatcatctgagtctctgacactttaggcatccacagagcatgcatgccagactgtgagctcc

SEQ ID NO: 130302 - DNA, 848 bp, Homo Sapiens
ttttaagttctcagcacccattgtaatttatttgtgaatgaatgggaaaagggtatcagtccaaggggagatcaggtggttcctcctcatcagagtcaaactcaacattttcatcttttacccatcgacctcgtccatctgggatccatccagagcttcgaagggtgagataatggtccagggctcgtcttcttgtggggctcatgggtgcaggggctgagacagttgctgactcctcggcctgtgggccagccgcaggttcaggttccctactgatcttcccactttggagtttgacctctgagggtggcataggggaaagggagacagagggaccaggggcttctggtctgtacttccggcggcagcaactgttatagtggggagctctgtgcagagcactctgggtgataagtcgtgtctgagttagcagaggagcctcagctttggtttcttcccttctcaattcattctgatgttttggattctgctttctttcctttcccggctgcttcttgccatagaaaagctgcaagctggacagatgtttcttgcctgcacggtgggcagtcagcatggccagggtgtccagtaccggtcgatgggggcagatggcacaagcaaagcgtccatcccgaagcatcagcgcctcatcctctggaatgtaactggctaggaggtccccgactcttctttttttgagcacattgagttgactccaatcgtctccttccctcttgaaagacatcacgactgtgagtcccagaagtgataaattctctgttccggtttcgccactcctccaggccaccgtagcaagagcgggacagcgccttctcttttttccc

SEQ ID NO: 130303 - DNA, 1183 bp, Homo Sapiens
tttgagacggagtctcgctctgtcacccaggctgtacccaggctttcttgtgcgagcaccacaccaagggcaggttgggcttgaaggagcccttgaggaaacacgggttctccgaggggtacaccagcagggccttcagcttaaagtcgccggctgcgttgccaccgagcaatagggtcaggaggtctccggcggctttgacccaggggccgactcatcttccacaggaaaatgaacgtcctctcggcaggcgcttacagaggaacctgggcttattcatggtgaacaccagccagagcttattcatggtgaacaccagccagagtgtgtagccgccctccgggatcaccctgcgcattaacgctgggttcttgcacgctgcgttcttgggccgctggccccgatgctgctcaagctgtggcgcgccttaaagccagcgaatcaccctcgaccggccccgaagctctcgggctaggcgccctcgccctgctcctgcttgcggttctcgaacgggctgtgggctttctcccgaatgagcaccacactgaggggcatgttgcgctggctctggtcctccatccgcatgctcagcagctgctccatgttctccatcaccaggctgcggccacgcgtcaacttggtggccgcctgcagtgtggcctcctgggaactcgcccagatcttttccttgttgtcacgaatggtggccaaggtggagttggacagccccagcgccttcccgattctactgagcttctctccggcttcaaagcgccacagcgcctcgagcttcacctgtaggttgatggccttgcgatcctaccagatgcctcagtaatcgcgagcgttcagcggcctcttcaggcccgacacggtggagcgggagactgtccgcgccgcttcctccagacaccgcaagggggtgcttgtgttcctgctactgagcccgctgatctcagcacttgttgccactaaggccccagccatgactcgcgcttcgggtcgcagtgcgagccgtctgctttagctgggctggcggggcttcggcccttccccatcgccccgcctcacagtgcagttttccggaggacgccgagcccagggtccatctcggccgcgaagggggaagatcccgggaattccggaccggtaccagcgtgtttttggggtccgctgagatagg

SEQ ID NO: 130304 - DNA, 1099 bp, Homo Sapiens
  misc_feature (703)..(703): n is a, c, g, or t
  misc_feature (936)..(944): n is a, c, g, or t
cagtctcacaggagttttaatcttcaaatggtcattttatcttacatatacagagtgtcttacagcatacagcaatttccactttatctgctagtgttaggaccagcactaataagaatgaagagtatgttgtttatcagccacaaaaatctgtgtctatcaccatggtttgactcttaatactctaatgtcacaaacaactggcttgaagaagtgttttttggtaggtcctatatctaactgttcaatccactgacaaaaaaagggaactcttccccactctaaccggttttcctaaatgtacgaggggttgacattagctgtctcacattaactttcaaaagaccatcagatgataccgtttcatcaaaagccaccttacttaagtatgaacaatgaccaaagaatgaccaatcgaaattctgggcactatactaagaggaaactcttccagaacacatacttaagaattgaattttctctctgaatttggccacagtttggctgcgtttcattcacaacactttaaggaaaaaaatgatggtttatggctagcagataatataaccaacctttataccacttactaaatagcaacggtttaggctcacaaatatgttaaagctttctctttccccgcaatggtagccaagcacgcataaaccgaatcgaacatgttcctgcagtctcacgacctcacacntggttacaggcaagcaagggctcctcaggatttgctttactcacggtttaggtccgaaattttctctctgaagatcaaatgtcttgctatgtctttgtgcttctttttcccatctctattacgtcttgttcaccctgttgctctcctaacacttccattttctccttttatgttcctgctatgctctccacatggcagtaacctgaagtataactgatcacacctcttgtgannnnnnnnnattctaggacttcccagatctggactccgaagaagacgcccaggtgcaagcccgaaggttacctatttagaattttcccagcccagtgtgtacgccaaatcattcctcgcccttcattttgtgttgcttaacggcgctgtcgtgcctaaacgtag

SEQ ID NO: 130305 - DNA, 687 bp, Homo Sapiens
  misc_feature (325)..(344): n is a, c, g, or t
  misc_feature (491)..(594): n is a, c, g, or t
agaaagtaccaggttttattatctttttatcaaaaaaaatcagtaacagacaacagtgtgagaggtgcctacagaggaggtgctcactccaacacagcccaaggggaagggcactgggggcagaagaggacccagccagctgggaccctgggttgcagtggtgacgggagctaatggccactggtgcagcaagggagggtggttcccctcaccgcagccactggggtcaggaggagacacgacctgcccaggctaagccaccaggcctcccctctcaggagagggagggtcccagacaacaggccccagctggggcctcatcagnnnnnnnnnnnnnnnnnnnntcctacccagggagacaagggtcgtcccagcacagctgaggctgtgactcgttaagccagtttagttctctagaatagtgctgtccaacagatggacatgctctcgctgtcagtacagtagccatgaactacatacagtgacgcctnnnnnnnnnnnnnnnnnnnnnnnnnnnnnnnnnnnnnnnnnnnnnnnnnnnnnnnnnnnnnnnnnnnnnnnnnnnnnnnnnnnnnnnnnnnnnnnnnnnnnnnnagccctagagcctgaagaaagcaaaccaaagaacaccagctgggtcccaaacagaaggcagaaagggtagaaccatccacctcaactattcca

SEQ ID NO: 130306 - DNA, 1382 bp, Homo Sapiens
  misc_feature (204)..(229): n is a, c, g, or t
  misc_feature (274)..(292): n is a, c, g, or t
  misc_feature (368)..(376): n is a, c, g, or t
  misc_feature (973)..(973): n is a, c, g, or t
  misc_feature (986)..(986): n is a, c, g, or t
  misc_feature (1046)..(1061): n is a, c, g, or t
  misc_feature (1116)..(1116): n is a, c, g, or t
aggatggtgaaaagagctgagagtttatgctgaaatggatttatagaatatttgtaaatctatttttagtgtttgttcgtttttttaactgttcattcctttgtgcagagtgtatatctctgcctgggcaagagtgtggaggtgccgaggtgtcttcattctctcgcacatttccacagcacctgctaagtttgtatttaatgnnnnnnnnnnnnnnnnnnnnnnnnnncttgaaaatgagagaagagccggagagatgatttttattaattcnnnnnnnnnnnnnnnnnnnactatttatagctttagatagggcctcccttcccctcttctttctttgttctctttcattaaaccccttccccagnnnnnnnnnatactttaaaccccgctcctcatggccttggccctttctgaagctgcttcctcttataaaatagcttttgccgaaacataggttgtttttagcagatcccaaaatataatgaaggggatggtgggatatttgtgtctgtgttcttataatatattattattcttccttggttctagaaaaatagataaatatatttttttcaggaaatagtgtggtgtttccagtttgatgttgctgggtggttgagtgagtgaattttcatgtggctgggtgggtttttgcctttttctcttgccctgttcctggtgccttctgatggggctggaatagttgaggtggatggttctaccctttctgccttctgtttgggacccagctggtgttctttggtttgctttcttcaggctctagggctgtgctatcccatacagtaaccacatgcggctgtttaaagttaagccaattaaaatcacataagattaaaaattccttcctcagttgcactaaccacgtttctagaggcgtcactgtgtgtggttcatggctactgtactgacagcgagagcatgtccatctggttggacagcactattctangagaactaaactnggcttaacggagtcacagtctcagctgtgctgggacgacccttgtctctctgggtaggannnnnnnnnnnnnnnnagggctgatgaaggcccagctggggcctgttgtctgggaccctccctctcctganaggcgaggtctgttgtcttattctgtgcaggtcgtgtcttcctctgaccccagtgggtgtggtgaggggatccaccctcccttggtgcactagtggtcattatgtctcgtcaccattgcatatcaaggttctaattggtgggttctcttctggcgccattgtctttcccttgtgttgtgttgaagaaagcactcctctgtgggacctccaacaggtgtcggtattgatttttttggtaaaaataaaatacgtgtgtttctaaatgt

SEQ ID NO: 130307 - DNA, 663 bp, Homo Sapiens
  misc_feature (334)..(351): n is a, c, g, or t
  misc_feature (495)..(598): n is a, c, g, or t
tttttagaaagtaccaggttttattatctttttatcaaaaaaaatcagtaacagacaacagtgtgagaggtgcctacagaggaggtgctcactccaacacagcccaaggggaagggcactgggggcagaagaggacccagccagctgggaccctgggttgcagtggtgacgggagctaatggccactggtgcagcaagggagggtggttcccctcaccgcagccactggggtcaggaggagacacgacctgcccaggctaagccaccaggcctcccctctcaggagagggagggtcccagacaacaggccccagctggggcctcatcagccctnnnnnnnnnnnnnnnnnntacccagggagacaagggtcgtcccagcacagctgaggctgtgactcgttaagccagtttagttctctagaatagtgctgtccaacagatggacatgctctcgctgtcagtacagtagccatgaactacatacagtgacgcctnnnnnnnnnnnnnnnnnnnnnnnnnnnnnnnnnnnnnnnnnnnnnnnnnnnnnnnnnnnnnnnnnnnnnnnnnnnnnnnnnnnnnnnnnnnnnnnnnnnnnnnnagccctagagccctgagaaagcaaaccaaagaacaccagctgggtccccaacagaggcagaaagg

SEQ ID NO: 130308 - DNA, 540 bp, Homo Sapiens
  misc_feature (466)..(466): n is a, c, g, or t
agaaagtaccaggttttattatctttttatcaaaaaaaatcagtaactagacaacaggtgtgagaggtgcctacagaggaggtgctcactccaacacagcccaaggggaagggcactgggggcagaagaggacccagccagctggggccctgggttgcagtggtgacgggagctaatggccactggtgcagcaagggagggtggttcccctcaccgcagccactggggtcaggaggagacacgacctgcccaggctaagctaccaggcctcccctctcatgagagggagggtcccagacaacaggccccagctggggcctcatcagcccttccccattcctccccccctacctagggagacaagggtcgtcccaggagagctgatgctgtgactcgttaagcgagtttagttctctataatagtgctgtgcaacatatggacatgctctcgctgtcagtacagtangcatgaactacatacagtgacgcatctagaaacgtggttagtgcactgaggaaggagttttatcttatgtgatt

SEQ ID NO: 130309 - DNA, 611 bp, Homo Sapiens
  misc_feature (481)..(481): n is a, c, g, or t
ccctatgtctcgatcgttatacactagccatgaccacacacagtgacgcctctagaaacgtggttagtgccactgaggaaggaatttttaatcttatgtgattttaattggcttaactttaaacagccgcatgtggttactgtattggatagcacagccctagagcctgtagtaagccaacccaaggacacccgctgggtccccaaccgaaggccgaaagggtagaaccatccccctccactattcccgccccatcagaaggcacccggaaccgggccagagaaaaaggccaaaacccaccccgccacatgaaaattcactcactcaaccacccagccacatccaactggaaacaccacactatttcctgaaaaaaatatatttatctatttttctagaacccaggaagaataataatatattataagaacaccgacaccaatatccccccatccccttcattatattttgggatctgctnaaaaaaaactatgtttcggccaaagctattttataagaggaagccagcttcagaaagggcccaggccctgaggagcggggtttaaagtataaaaaacaaactgggaacggggtttaacgatcgagacata

SEQ ID NO: 130310 - DNA, 2271 bp, Homo Sapiens
  misc_feature (982)..(1033): n is a, c, g, or t
  misc_feature (1475)..(1493): n is a, c, g, or t
gctatcgcgccgcgattagggggcgaaacgccgcgcggcgcggctccacccactcgggagggattataggtgagagagaacggctccggggtggtcgccgccccggcgggagttcttggtgattggggggaggagtcccacaccgcgctttgtccaatgaccccggatcctcccttggggaacgccgcttatggccccatggttccgctttcgcttaatgggggcccgcggcggcccaaaccgaaatgggtttaggaaagatttcttggaaggcccgaggccgccccgccattttttatgtctaccgggggccgggttttttggtaggattaacatgatttatttcattatcagtcttacaggttgctgaggttgggcaaagccaggatagtaacttaaatccaaagcacttttgttgagtgacaacccgattagcaaggccctgttactgaacagagggcagtggagggcaccccaggaaccacagcacacagactagtgttagaaaccccttcccagaagcaaccggtgggacttggcccttaccagccaggggtctactccattggctcttggtgcccaccagcccctgttagaggaggcccagaggcctccagaggcaccatggaggcaagatgggctgggtagagagcaggactggagcttcctcaccagggttctgcctctggccccgatctccccatccacacagcggagccaggccactggaaaggacagccagtccagccccttcctggagtgaggcccccagccagcggggatgtggcggctgcttaactgttctgctttcttccctagttatcaaactgttacctagttatggtgtgaaggggagggggcagggacttaggaccaaaggtgggaggtaagctcctttttctaccctggtaaatagccccagccttcttggggctacactgattaagaaatgggatcactcaggaggattgcttgagcccannnnnnnnnnnnnnnnnnnnnnnnnnnnnnnnnnnnnnnnnnnnnnnnnnnnaaatagcaggaccctgtctctaaaaacaaagaaaaaagacaaggagatggaatcaaagcccagaggtcctccccttctcagagccaccactagttctctgtgaccatggaaaactacccccagccccactgccttttgcctccggtcagtgggttttgcggggctctgaggtgtctccccactcacccagctctgggcagagcagctgggctgggctggggctgagctaaccagaacctggaagtagggctcggggttctggctgtggccccatccctggcttggcccagcctcgtcagctttggtccaggttcctgaatggtgcctccctgcccaccttgtgttgggagcgtgagcattagaggggaagagggcggacaggaagggagggtcagttattttacaagtttttaaaaagttacaggtaggttaactttgagtnnnnnnnnnnnnnnnnnnntgtcacacaccaaggatcaaacagagggcacgtttccctctccccttcccttctaggggcataagtggtggtgagaacactcatatgatggtgcaggactgcaaggcgccccccttccggctaccttgcgtgggcacaggtttgcctttcccgtagtatcccgtgaagatggccctgacctccatgttcttggccagggtcagcatccagcgcccattgcccaaggaatagagcttgccccggcttagctcgcccacctcctcgcctcggctgccccccttctcctgccgcagaatctctaagaggtcaaggcccgtctgcacggcctctacgtcagctgcacagccgagggtgatgtgggcgcggctcccccgcggcaggttgtcagtgggtgacagcttgtccacatcactcggccacaactgcagttgctgctcgcttaactccacccgggccccagtcgtcttgggtgtcacaaagagggcagagatggtcagcgtgaaggccttggagtaagatttctttaacacatcttgttgagcgtactcctctgccccgggagccttcccgtagtcacaaaacttggttgtgcaatgcagcacgcctgggggtctctttccaaagtaggtgaccaagtccatcttctcctgggctcatccccagggacgacatgatgaggaggggcgccaccgtcgccgcctctgccggcaccagcgctccgggccgcccgcctgcgcggaggacacgggcctcgtgccgattaacccaggctctacta

SEQ ID NO: 130311 - DNA, 1229 bp, Homo Sapiens
  misc_feature (54)..(54): n is a, c, g, or t
catccagcgccccattgccccaaggaatagagcttgccccgggcttagctcgcnccacctcctcgccttcggctgcccccctctcctgccgcagaatctctaagaggtcaaggcccgtctgcacggcctctacgtcagctgcacagccgagggtgatgtgggcgcggctcccccgcggcaggttgtcagtgggtgacagcttgtccacatcactcggccacaactgcagttgctgctcgcttaactccacccgggccccagtcgtcttgggtgtcacaaagagggcagagatggtcagcgtgaaggccttggagtaagatttctttaacacatcttgttgagcgtactcctctgccccgggagccttcccgtagtcacaaaacttggtgtgtgctatgcagcacgccttggggtctctttcccaaagtaggtgaccaagtccatcttctccctgggctcatccccagggacgaattgtcgcagctccttcttgaaggccttgtggttccccagctcttccaggaagacctggccggctttgcggagggtctcagagctcttcttggtcaggaaccagccgaagtagagcggcaggaagtccttctccagcccaggcttcagcttcttcaggtcatcagccgacagctgccactggttcttctccttgagctgggcacagtccagccgccacgccgtcttgggctccaccagcaccacctggtactggtactggtcggccatttcaaagagctgctccagccgttcccgttcgtggttggtgtcatcaagcacaagaattctgatgtcccggcggcggcagtaggcagccaggtcctcatcgagccgcttgtactcctcggagaaggctcctcgagcgccgggggtgatcttgtaagcgtcagccgacaccatcttggtgccatcacggtacttgtccacgatgacccgtgccagcgtggacttgccgcttcctggcaggccgcgcaagatgaagagcgtcttgcactctagcagcgtggccactgtgtcctcatcctgaaggaagggaaactgcagctcaggcttgtccttggcccctgaggatgacatcttgcggaagaagatcttgggcaggaatgtgtggctttttcgggagaagcctctgttcatgatgaggaggggcgccaccgtcgccgcctctgccggcaccagcgctccggggccgcccgcctgcgcggaggacacgggag

SEQ ID NO: 130312 - DNA, 709 bp, Homo Sapiens
  misc_feature (502)..(502): n is a, c, g, or t
  misc_feature (663)..(663): n is a, c, g, or t
tttctttattctttttggtctttaaagtgacaaaaaagaggaaaaggaacacgctcttacaaaacagagcaagtttcttttccttgtactgttgaagcccggtttcccaggggccgcccttggcctcctccacacagcactggtcactcgtagcagcatctgcaggccaggtgccaggtgcccagcgggccccacgctctgggatgaacttggagtgggagacggtgggtgggtcccccagctctcaagtgcacagagaccccgcacccaagggctggggaagaatcccacacgtgcaattgggtttttctgaagcctgcgggagaccaagctgagtctgcgagacagctgcctccaggacactgcgaggcagggaacagctgcccacaccagccgctgggcgaggccggggcgccaggcctggttcctccatgggaccccagcatgcgggcagcaggtgaggccggggcggcaggcccagttcctccagtggaaccccagncgcgcgaggtcagcagcagccagcagccagcaagtcatgagtcccgattgcctcgtgagccagtgcagccatgcgctgagtggtgggaagaattacactcagcgggaggagccgctgggctcagggccatcccctccctggacacactgccggtccccggngggcctcacaccaggccgaccaccgtgcccagtgggctctgcacgc

SEQ ID NO: 130313 - DNA, 906 bp, Homo Sapiens
  misc_feature (134)..(159): n is a, c, g, or t
  misc_feature (161)..(162): n is a, c, g, or t
  misc_feature (166)..(242): n is a, c, g, or t
  misc_feature (663)..(663): n is a, c, g, or t
  misc_feature (878)..(878): n is a, c, g, or t
gggggaatccaaaccctttttcttggccagggtttccttggaaacagttatgcccagtttccctttccttctggggccgcgcgcccaaagaaaggtttagaaaaattttttaaggccgagggcggcccccaaannnnnnnnnnnnnnnnnnnnnnnnnntnntccnnnnnnnnnnnnnnnnnnnnnnnnnnnnnnnnnnnnnnnnnnnnnnnnnnnnnnnnnnnnnnnnnnnnnnnnnnnnnacccgcacagaactagtttattcagtagtatggggcatgaaaaaacaacaacaacaaaacgctaccatatttacagcaacaaccaaactgtacaatctgatggttagtatcaagttagcatccagcatctttgtattttttttaaatcaagtcatcagtagtaaaaaccagttaaatttttaaccctttgcaggaattgctgaggggagaagacagggggagaatccacggcagaaaagccagaggctggcctcacaaatgagaaacaggagcctttctttcctgcccacagcctctttttctagccacctgctccagaaggaaagtcagtgacaagtctggaatacatgcttggagtaaatggtgactcagatgaaaagcagtcggcaaaactgaggagaggggaggagaggtggggaangatgatggcctggggcaaggggaagggcgtcaagcccccaagccagggctgctgggaacacccagcctgtgatggccatatcagacccccgggactggacacgaacccatcccaacacaaaaagcaaataaataaaacaaatatattaactctctcttcacagggagctggggtggagtcggggagaaagaggaacaggacctggtcctttgaanaagagagccaattccaagaaggggttaa

SEQ ID NO: 130314 - DNA, 658 bp, Homo Sapiens
cccagtgtaagaaaacttgtttttatttttaaatactttggaaagctctttcagagcaatataaatgagtgcctgggaggaggaggttttgtgccagagccttgccccctcactcactcttgggggtcctgatgaactcttggaccctgtggaagataagagttagagacctcggcctcctggtcagtggagcccttggcctcatgcctggtgggctaagcgggcccagctggggtttgaggtaggggaggccttggcttggccccagcagctccagggccctgagttcctgccagaggctggagagcaggcagctgctgcttttcctggtccttggtaggggagggtcctcaggcttgcgtgccaaagcctgaaggattctgcttctgccagcgccagagatcctcacacatcctgtccagccctaaggctgctgtccaccccagctcctcttgggccaggctggggttggcgtaacaggctgccacatcaccttcccgccgtgccaccaccttgtacgggatccggcagccacactgttctttcagcttccttaaggctgcaatgtggcccttggccagattcacgacatggatgtaatcccggacacctgtgccatcctctgtgtcatagtcattggcaaagacattcagggcct

SEQ ID NO: 130315 - DNA, 1402 bp, Homo Sapiens
tttccagtgtaagaaaacttgtttttatttttaaatactttggaaagctctttcagagcaatataaatgagtgcctgggaggaggaggttttgtgccagagccttgccccctcactcactcttgggggtcctgatgaactcttggaccctgtggaagataagagttagagacctcggcctcctggtcagtggagcccttggcctcatgcctggtgggctaagcgggcccagctggggtttgaggtaggggaggccttggcttggccccagcagctccagggccctgagttcctgccagaggctggagagcaggcagctgctgcttttcctggtccttggtaggggagggtcctcaggcttgcgtgccaaagcctgaaggattctgcttctgccagcgccagagatcctcacacatcctgtccagccctaaggctgctgtccaccccagctcctcttgggccaggctggggttggcgtaacaggctgccacatcaccttcccgccgtgccaccaccttgtacgggatcttcttcccagaggccttctccatagcctggaccatctgcagcactgaatagcctgtgcccgtgcccaggttgtagatccggcagccacactgttctttcagcttccttaaggctgcaatgtggcccttggccagatccacgacatggatgtaatcccggacacctgtgccatcctctgtgtcatagtcattgccaaagacattcagggcctcccgtcgcccgatcgccacctgggagacataaggcatgaggttgttgggtatgccctggggatcctcaccaatgcagccagaggcatgggcacctgtggggttgaaatagcgcagcagcactgcgttccaagtcttgtctgcctggcacaggtcccggatcatttcctcgatgaagaacttggacttgccgtaagggttggtacaaccacccgtggggtgggcctcatcaaggggcaggtgctgggggttcccgtacacagtggctgagctgctgaacaccaggttcttcaccccgtgggccttcatgatctccagaagctggatggtcccggtcaggttaactctgtaataatccagaggcttctgcaccgactcgcccacggccttgagccccgcaaagtggatgaccgccataaagctgtactttttgaagagacgctgtagggctccctggtccaaaatgtccatctcctcaaactccacagagcggcctgtcagctcctggacccgccgcaggctctcaggcagggagccccctccttggagttggaaaagatggaatctgaggatccacacttctttgtccaaggtgactgaggactggagagtcctgctcgggcggacgcgtgggtcgacgatatcccgggaattccggaccggtcc

SEQ ID NO: 130316 - DNA, 852 bp, Homo Sapiens
ggatgtaatcccggacacctgtgccatcctcttgtgtcatagtcattgccaaagacattcaggcctcccgtcgcccgatcgccacctgggagacataaggcatgaggttgttgggtatgccctggggatcctcaccaatgcagccagaggcatgggcacctgtggggttgaaatagcgcagcagcactgcgttccaagtcttgtctgcctggcacaggtcccggatcatttcctcgatgaagaacttggacttgccgtaagggttggtacaaccacccgtggggtgggcctcatcaaggggcaggtactgggggttcccgtacacagtggctgagctgctgaacaccaggttcttcaccccgtgggccttcatgatctccagaagctggatggtcccggtcaggttaactctgtaataatccagaggcttctgcaccgactcgcccacggccttgagccccgcaaagtggatgaccgccataaagctgtactttttgaagagacgctgtagggctccctggtccaaaatgtccatctcctcaaactccacagagcggcctgtcagctcctggacccgccgcaggctctcaggcagggagccccctccacggaaggcattatggaagttatcgatgaccacaggcaagtagccagcctccagcagctccagcaccgtgtggctgccaatgtagccagccccacctgttaccagcaccttctctgccatggcaccttggagttggaaaagatggaatctgaggatccacacttctttgtccaaggtgactgaggactggagagtcctgctcgggttcccgcgccccacgcttgctgcagaggcaccgcctccta

SEQ ID NO: 130317 - DNA, 1465 bp, Homo Sapiens
  misc_feature (1349)..(1383): n is a, c, g, or t
  misc_feature (1386)..(1424): n is a, c, g, or t
  misc_feature (1428)..(1428): n is a, c, g, or t
aaaacagaagcgcgaccatttctttattaaattatacaaaaagggaggggaggggggcagggaatggggagaatcacgctttgtatttttttctttcaaatatttatctaaccacatgtatatacaactttctaaacttgaagtctgaatttgaaatgacgaatctttaaaccaaaagatacatataccattgacagagacacctatctatacaaacctagcccacgggaggctacatctgtagcaataaggatgggtgcctttccagaacggaactcattaagtacccaatctctttctggttgactcttgtctccatggatacacatagctggccaaccatctctgcgcatccttcgagtcagatcatcacagcgtctctttgtctccacaaatattattgttttgttttccttttcagccattatttcttccattagttggatcaacttgtggtctttttcactttccatgcagacatccactatctggaggatgttgtggttggcactcaactccagattgcctacgttgatctgggtgtaatcacgaaggaaatcctctgcaagctgtcttacttcttttggccaggttgcactccacatcagtgtctgcctatcaggcctgatttggtcaacaattttacggatctggggttcaaaccccatatcaagcattctgtcagcttcgtccaatacaaggtaagtacatcggcgaagatttgtctttcctgactccaggaaatctatcagacgtccaggagtggctatgcagatctcaacacctctttccaagtctcgaatctggggacctttaggagcacctccataaatacaagtactcttcaatctagaacatttgccatagtcatcggccacctgctgtacttgctgggcaagctctctggtaggagccagaactagacagattgggccatctcccctttccaagtatggctggtggttaatatgaacaattgcaggcaggagatacgccaacgtcttcccagagccagtctgagcaatgcccaccatatcccggccactaagagccaacggaaatccctggcactgaattggagttggttctgtaaagtgctgatccatcaacacatccattacatattgtgggaagttagcatgatggaaggcaaacacgggtttaggacaacatctccccccctcactgtaatctccttctttcggcgtagctcatcaacctcatatggtgtcagccttgctacttccggatgttccacataaaaatttttctcaaacttggggagctcactcaaatcccccggccgtaatggccgaattcccgggcatatgtccggtaccgtcgactgnnnnnnnnnnnnnnnnnnnnnnnnnnnnnnnnnnncgnnnnnnnnnnnnnnnnnnnnnnnnnnnnnnnnnnnnnnnctanctaccgacgctagcgccctatagtgatcgtatcatct

SEQ ID NO: 130318 - DNA, 779 bp, Homo Sapiens
  misc_feature (225)..(275): n is a, c, g, or t
cagagttccgttctggaaaggcacccatccttattgctacagatgtagcctcccgtgggctaggtttgtatagataggtgtctctgtcaatggtatatgtatcttttggtttaaagattcgtcatttcaaattcagacttcaagtttagaaagttgtatatacatgtggttagataaatatttgaaagaaaaaaatacaaagcgtgattctccccattccctgcnnnnnnnnnnnnnnnnnnnnnnnnnnnnnnnnnnnnnnnnnnnnnnnnnnncaaagtctcttcctgctcctaacaaacaggctttggtctgcagcaaggcctaggcatgactattcaaacagagggagaggagacagacagctgaatggctcagcttctctctggtggtggtttctggctggatagaataagcctgacgaaacctagctattgtaagctagtttcttcagttattcttttccctatccctgtctaagctagatatatacagagaggtccagttttatgaatgcttattagatggaattttataagtctaatgcagtatcagaatagcaaatatgtgtattgcccagtttaatttactgaggtcaaattatcatgggcacttggctatcccctcctacccatgcacttatctgtaggtgtgttatcaactgatgattttctggagtttttgacccattaccatttaagatatacagagaattttatggtagtttagcccactattctgagctaaacaggtctaactcagaacttctatattttaaa

SEQ ID NO: 130319 - DNA, 1540 bp, Homo Sapiens
  misc_feature (262)..(262): n is a, c, g, or t
  misc_feature (1330)..(1340): n is a, c, g, or t
ccattcgccagccaaaatgtacaaaaaaaattcatttcaaataactcaggagggatgataatggctgactttggtaaattcactcaaaagactgtgggagagccaaactcaactcactgtatagtctgtgcatatgtgggcttgtagcatgtaggtttttccaaaagaaggaaatataaaatgttagattaagaactataaaactacagggtgcttataaaaggtggcttactccttattgttattatactatccaattttnaaaatgcagtttaaaaaataagcactgagtcttgttattacaaggcaggcaaatgtttctccctcattttgaaaagactgaactggcaatgcttttcctgaacatttagaaaagaggcagtaagagtactctggtttgggttcaagtgagaggcttttcatgaatgttcagaaagcctgactaaaagaagccaaaccaaaaccatttaatgtgaacacaaacctcttttcttttagtaagttttacttttaatacagagtgaaagaaaataaaaatttaataggctaaaacaagtcaaacacccattctacacagataaaaaccttcacaaaggtcaactgaagtaatccagagctgaaactgaattgtgcagattttcaatgaagtcacagaagtcatgtaacacaaacaaaagtcgattatatttacacactcagcaagccctctaagaaatgtgccccaagaagcattaacctttgttttgtgccatcctgaagacttgcacattttatttttcagatagcttaacatttttaatcgagtgtgttctctaccatgcggtaatgctttggtactattcatacagggtcttgcctatcctaaagacttgccatttccccaagaggagctttgattctgctttagaagttttacataaattaaaatctttatcaaatattaatatgaagggaggcacaggatgcaacatatatagtcaagttacctctctgtatatttagaaattactttctcctccaaggtatttgcaacagaaagctcagtctgtcctgcttaataatcagtagtacaggtgtgaatcatcagaagcttggcaagaccttaatatttcaaaattattaacaactacctctaggggcaagttcatgttactgagttatgacaaatttattatcatgagggaaaacaagagtagccagccatcttaaaaatgccccaaccactgcttctcaaaacagaaagactaaaaactacatacagtttatcatacaacaaatcccatctctgtcccctgaaattcccctagtttcattcattagaaggggattnnnnnnnnnnngacttaaagagcactttacagcagcattcagctttcctatgaaatactcagcatcttaaatattatatacaactctttttttagtaagctagacactggcttcagagtttgtgggagtgggggaaatcaacccattcaaaactactctagaaattgtcttttggcagaatagcaggtatccaagttaaaaactcgagaca

SEQ ID NO: 130320 - DNA, 1378 bp, Homo Sapiens
  misc_feature (1265)..(1299): n is a, c, g, or t
cagttaaaatgtcttttgggccaaggtcgatgtcgcagtgggtaggaatttattcccttcatggcttgttattaatacgaagcacttaacctgggtatatgtgaaagccaaaagcattattcttactgaggacctgtcaaacaaagccacaaaacagctccttttattttctagtaagactagatttattcaataccctagtaaaagttttgattataagtatccaacagtataaaaagtacaaaacagatctgtagatttctaatatattaatacaaagtgcatgactacatacagtacatcctacaggcaaagagaggtggaaggggaaaaagaagactgtggttgaggtctagtaataaataaataaatacagaagtagagatgatccatattatagtatattctaccaccaatactgcagccaaaatgtacaaaaaaaatcatttcaaataactcaggaggatgataatggctggacttttgtaattcacctcaaagactgtgggagagccaactcaactcactgtatagtctgtgcatatggtggcttgtagcatgtaggttttttccaaaagaaggaaatataaaatgtttagattaagaactataaaactacagggtgcctataaaaggtggcttactccttattgttattatactatccaatttttaaaatgcagtttaaaaaataagcactgagtcttgttattacaaggcaggcaaatgtttctccctcattttgaaaagactgaactggcaatgcttttcctgaacatttagaaaagaggcagtaagagtactctggtttgggttcaagtgagaggcttttcatgaaaatcttaggattgaagagctctaagttcaggatatctcaatgttcagaaagcctgactaaaagaagccaaaccaaaaccatttaatgtgaacacaaacctcttttcttttagtaagttttacttttaatacagagtgaaagaaaataaaaatttaataggctaaaacaagtcaaacacccattctacacagataaaaaccttcacaaaggtcaactgaagtaatccagagctgaaactgaattgtgcagattttcaatgaagtcacagaagtcatgtaacacaaacaaaagtcgattatatttacacactcagcaagcccttctaagaaatgtgccccaagaagcattaacctttgttttgtgccatcctgaagaccccggccgtaatggccgaattcccgggcatatgtccggtaccgtcgactgnnnnnnnnnnnnnnnnnnnnnnnnnnnnnnnnnnncggccgcttcctcgctcactactcgctgcgctcgtcgttcgctgcaaagagctagccgccctatagtgatcgtatcgta

SEQ ID NO: 130321 - DNA, 756 bp, Homo Sapiens
  misc_feature (142)..(159): n is a, c, g, or t
gtgggtgggggatttcccacccccctttttttcctggccccggggttttttctgtgggaaaaaagctatagggcccacttttcccttttcccttaggggggcccggggggtccaaaaggaaatgttttgaaaaatttttttnnnnnnnnnnnnnnnnnnccacaaaaaaaatattgttattgttgatgtttcgtacggggggtgtttatcttcttgcagcatggtcccgttgtgcatattgttgctttgtgttaatgtttcttgagtttgtgttcggttttctttagttttgcttttaatgaaggacaagggattaagacacacagagactggccagacaaatgggaaaccgaccagaccagcccatgaccaaaatatcacaggcagaccacccgcaaatgcagaggcctcagagtccacagtgggcggttggaaccaggccccagggaatctttcagctgcattccggctgtgatcggcgggcaacaggtagaggtgctggagggggatgagtcgtgattttcggtgtctgtcatattcgatcaagtgtgtcatagagcttcctgtttcatctcccagttattcagggagaggctggtggctccaccttcccaggaactgtgctgtgaagatctgaagacaggcacgggctcaggcaccgcttgtctggaatgtcaatttgaaacttaaaaagcagcgaccatccagtcatttatttccctccattcccaatgatgtacacacgactaagaaccc

SEQ ID NO: 130322 - DNA, 1831 bp, Homo Sapiens
  misc_feature (128)..(136): n is a, c, g, or t
  misc_feature (172)..(172): n is a, c, g, or t
  misc_feature (223)..(223): n is a, c, g, or t
  misc_feature (230)..(230): n is a, c, g, or t
  misc_feature (237)..(253): n is a, c, g, or t
  misc_feature (263)..(265): n is a, c, g, or t
  misc_feature (268)..(272): n is a, c, g, or t
  misc_feature (274)..(276): n is a, c, g, or t
  misc_feature (278)..(280): n is a, c, g, or t
  misc_feature (282)..(350): n is a, c, g, or t
gtttaggaattaaacccccgtgtttgtaagaaaacggagttatttttgttacaggagcagacacgtttgcagtggtgttcaaggaagcccgcggggggggcgccccccgacacaccgatgtggggttnnnnnnnnntctacatagggggcgagggcccccccaccaccggangggaacaaaaggggggccaatttatggaaacacgtttgggggcccgggggncaaatanaaaattnnnnnnnnnnnnnnnnngtggttgttnnnttnnnnntnnntnnntnnnnnnnnnnnnnnnnnnnnnnnnnnnnnnnnnnnnnnnnnnnnnnnnnnnnnnnnnnnnnnnnnnnnnttttttatggtattcagaacatcactttataaactgttgccaaattaccacttaaacactaatatccaaatacagaatttagaaaattattttaaattttaactctaccatccccccgagctctcggctatgaatttagtctgggaagagggctccgtaataggccactgaggtcctctgtcccaccacatcatcctccccggaaaactagctgcccgactgctctaccagacttgggctagaatttggcttcacggtggcaatgggaccacctgggccctacagtgtggcaaaatcaacttgcccacaaaccccatcccaggtgctgggatgctaacacactgaagctgaaagaccacacttggttttgccacagatcaagctgcatctgactagacagcctgttctctaccctatttcctgcagaagtctttttctttgtaatgcaacaagtgctacacagctcagatccaacgggacacggggaaagaggctgtagtgcacctagccctgctgagggagacccttgccttgccaaagcactttgctcacaaaggcagtttcaaagagtatagcccgaactcattcctggtaaaacaaaaggaaaacatttttgataaatgtacccaaaagtctcaaaagggctacgctggtcttctgaacggaaaccaaatgaggtctccccaggctcatgtcatgagtctcagggaaggtgtgtcctagaccgtggccttggcctgcccaggccgaggctgccgtcactgcagatcctgcaggttgatagtgcttcctgggaactgggtggcctccggtccagcagggcctccagatgaggggagcacctcctggaggacgtagacgggcaggtccacagtgaggaaggggaggaaggtggctggccgcgggccgagggcaggacaccttcgccggaggggtcatcctgcaccagctggacctggacgccctgcgccccgcactgcaccccagctgctggagctggtcctggccgtcctccgctgggcaccacgaggctcccacacaaccaactgttctggcttgcatggaaatggggaggactcattttgccttcttttatttttctctgagtagactgtgaggctcctgcattgctccccgctcctctctgctttttttccttggctagttgaatggctcggtaatcagttcttgctgagcccccactttccaaatagaagttgccagtgcctgcactgagctctgtgtcctgggcaccgtgctgctctgctggactgggcaacgtggactggggcagcccatggcttccttcctgctgcccaactgctcctgggcgagaaggcgagtccggctccaccttgattggagccagcagttccgggacactggcattttctcggggggtgctcgaagaggtcggtgtggtcctcgtgccgaattcgccacccaggcctcgctaccttagaaccgttatagttactgcc

SEQ ID NO: 130323 - DNA, 749 bp, Homo Sapiens
ttgatagacaataggaatttttaatgcatggacaggcctgcagggactctgggcagacccacaggtagcaggaagaggcagggtcccacaaactcaataatgtccagcaaaaaagagagagaagtccttaaagacccatgcttcctcactgcaaccatcctcagagcttccttcctggtgctgaagaggtcaaaactgtctcctctaggggtcaggtcaaaactgtccctccataggtctcctccaggggtccatggcaggaagaaagcagagtgtggcaggaagaaggaagaagagcaaaggccgcttggtctccacctgaaaacttctgcctcgggattgacagccatccataagaaaaggtttaaaaaggagagacttttgatagagtcaaataatatctttgaaaaaataaaagatagagaaaaatgaataattccattggttacaaaggtctctgtccactatccacaggagaaaccgtttgctttggccttgctggcaagcttcatctgctaggcccatcctcagctgtcccccagcccacccaggccccagggatccaggagaatactgctccccctcccatggagagtctctgtgctcacgggagggcatacccttcctcacccggcccttggactccccgtacgtgttttggggcattgacaccatcttctccttacacgtggattttggtgtccttgaggatgctatacacaccatgcctgcaggccggactcctcgct

SEQ ID NO: 130324 - DNA, 2327 bp, Homo Sapiens
  misc_feature (66)..(120): n is a, c, g, or t
  misc_feature (1199)..(1199): n is a, c, g, or t
tcttaaccatgaaaggaagaaaataaaagagtatacattatcttaacagcagaacagtcatttccnnnnnnnnnnnnnnnnnnnnnnnnnnnnnnnnnnnnnnnnnnnnnnnnnnnnnnncacctagcacagtgtgtatattctattcatcagggagagttgggtgaggacgtggtgatggggccaatgctgcggtggccccttggatggtcctgggtgaattcagggactcggcattcagacccctgtccccacctcctggggcccagtcctcagctccgtacctgcttcactggttttctacagggacagggtggggaagagggggacataggtggggtaagaaacccccatgatccccatcttgtgaagatgagaagtccagggagggagggagtagcttggcagcaagctgtggagggcaggctctggagccaggtgggatggggagccagaagaccttcccactcacagggacaggaacactcaggcctggctcccgctttaggctcgatcctggaactgggttgttaactaaggagatacaagtgaaacccctcttccctaagcagctccttccataactgcctccagcacttcaggaacaggaacaaaaaaggtcaaagttatttacaatagcaaagatgcacatacgatacatacatatttataggaaaccaaagtgacaaagaggggaggggaggcacccacctctgcctggggtcttatggagaaagaggggaggaagaaagtgcatttacacagaagcctcctcctttcacttgcatgtctgagggcagcgcacatacaggcgtgcgcgtgtacacacatatgtggggtgagggcagaccatggtgagtgggggcctttcggatgcagtcagcatgcttaggagacatgaggccttggagggttgggctaagggagggaaaagacactgaaacctgactccgacttgagcagaccaagcaacatgcgggtctccccccgggccttggctggatcctagtttccctaactgcctcctccacagggaggagtgttgggatcccccctaccctgtgccccggtctcaggccagtccctgaaggaggagtggggacgcagaggatttggttggtttgtaccggttatggtcctgggtgacgcggctgcgtctgctgtgctgtcttcacaggggggcgtcagagccatcctcnagggcagggccccagttcatggctgttcctggagtcagaagctaggggctccttagcgggaggtgagagggagccatctgtccatctagctgcattctgtgtggaaactgcccacaggcgtggtgccaccagatgactctcccccaagggacttgagcagctctctgtgggccagctccatatccttgagcctgttgagcttgagagtgagctgctcaatggtatggaagatcctgccccacgtccctgagggccaggcttggaggagagcggctggggcgtcttggatcatcgttgcctccctgcagctgaggctgaggctctgtctgccctgcagggaggctgtcaggctgaggggggctcatgggtgcctctgagtggtcggtgcttgagtccgggggtcctgatggcatgctgacataaaagcagttccccgtagcctttgttccgccttccacttcaggtggcccaggctctgactggccactctctggtagtgcagggacaaccttgctgcctgccacctcagcttttctcacaactttgtaacctcctgctgcctctgtgcttgaagcatcttcagccagattcctgtccagttctggagactcccatatcccagaatttctggtccttgggggtaggtgttccagagaacagagacccatgtcttcctgctctggccgttccccctccagccctgcaagctgggtgttgtccccttcacccccagggggtgcttgccctggggagcctgggtcccaggggtgagaggtgacgctgatgacagaaggtgtgggtgtcaggtcgtcctcgggctcctgggcagcctgagtttccatggtgtgacctggcagcaggctccacaggatcagatgtcgcaggttctccacatcttccagagcggagtcagcgagcccttccatgaacagagggcctgggaaggccaagtggatggggttccttgtcctgatgcccctgttctctccatccagggatgtggaagggcaaggcaggacacccagttcctcttcctctgcactgccctcctgctcagggtcctctagcaggacctggtgccggacgcgtgggtcgacgatatcccgggaattccggaccggtaccagc

SEQ ID NO: 130325 - DNA, 1363 bp, Homo Sapiens
  misc_feature (124)..(124): n is a, c, g, or t
  misc_feature (130)..(130): n is a, c, g, or t
  misc_feature (133)..(137): n is a, c, g, or t
  misc_feature (139)..(140): n is a, c, g, or t
  misc_feature (142)..(148): n is a, c, g, or t
aaaaccagcttaatggggcccatgtttccaccttaccccttacgggggcccgcgcggccgccaaaaacgaaatggtcttgagaaagcttcttcgaggggccgagggcggcccgaacatgttttntttttnttnnnnntnntnnnnnnnttcgtacaccagtctgtaatttttaattagaattagctaaaagacattgtacctttcgcgtgtatgactgagcataacagtgcttaacagtgtctttattaagtgaatgcctgaaagtattcaacattaaattcaatttatttcacattaatgtttgcaaatacatcatcaattcttacatatttcaaatcaacttcaagtacagaaggcttcctctcaaataagtctcctgaggtgacataaagactgaaagaagcctatgacttgagtccaagtctcttaaccaacaatcaccatatcgtcactggtgaactcatacgtggggacttcaaggttgagaggagcaggacccaatctgatcctgccagatgcatcatagtgtgacccatggcaagggcagtaataaccaccaaaatctcctgcatttgcaatgggtacacagccaagatgagtgcaaacacctatcaggataacccattcaggtttctttactcgatctagatcatgctgtgggtccctcaactgtgataattcaactgcagcttcctgctcaatttccttctgggttctatgacgcacaaacaggggtttgcctctccatttgaaagccatgttcttgccttctggaatatcggataacttgatttcgattttcgccagggccaacacatcagcagaagcactcatgctggaaacgaactgggtgacggcattcttggcagcatatgcgacacccacagtagttactccagttaccaaataggagaaacctttcctagcctcgctgctttctcttgaagacttcgtactatctaaaacttcaaggcggcggtattcagagaagtcaggcaccttgatgtctgtgtgggaataacaaacagaagcagggacattgaggcccacggaggcgaccaaaggccggcgcacggcctggccgctcagcgactcccggctgaggaagggccgcttcaggtccaacacaggctgctccggggtggcgggcaccgtggcctgcaccaagggccgcagcgcgcccgccaccccgcgggacgtggccgacaggacgggcgcgaacgggcccgagcgggctgctaccgacaacatggcgacagccgctccaaccgccaagccggtcacagggacgaccttccaaccacggcgccctcgtgccgaattcgccacccagcctcgctaccttaaaccgtagagtactgc

SEQ ID NO: 130326 - DNA, 1526 bp, Homo Sapiens
ctcagaaagacccaaaacctttattgtccctaccagggagccagtgcttccagcccacaccccacaccccaggagcttcagcaaggtctctgcttgggaggatgctgcccagaactgcagccagggccaccggtgccacctgcaggcttcctcccattccagctaggcagtggccaggctgccccctgaccagccccactgggaaggcagcaggatggcagtggccagtggggtcaggctgggccatctccctctcagacctcagcacctgggtcctcggggctgctgctcttgttccggaagtggtctcgactccgcttcctgctgccatggaagccaacagtttccaccggcgggagacctggcacagacccactgtggacagaccctgacagtgcctccacctcctgcaggcctccatgggggctgccccactcctcagcctctgggctcccgggcccggccagatgggccagctccacagggccctcgcccctgtctgtggcaggattcccaaggccgcccctgcctggctctcccaccttccccaggaccctcttcctctcgtgtctggcttcgacccctcggactggtttggtgaagatgaccctcccctccccacagctggagggatcctggttgaaggaggacacgcagtcagtgggggcagccaggctctgggagcccaggaaggccagggcggtggcctgattgctctgctcgctgacctcggtcacatcttccaggctgtacttggtccagcgctcggggtgtgccacgtagtcggggaccggaggcacccttggtgaggcagggctccgatgggccctgcccaggccttccactggagaccggcctgagggcgctaggggccgcttgaagcctccgttgtcactcatgctggtgtgggccacagaggatggagcccgtctggccgccccctccaggcagtcaaagatgtcacggctgcgctgggagaaggtggagctcatgcctctcagatggaatggctgcaccgtggctgggaggaggcctgacgggggtgagggcggctcatcaggacctgaatcctcctccccaggcagccccatcggggacagtgcttccacttcagcaccaccgggcaagctgaggtcagagtccgagtcactgagggagactgtgtcggaaggcagcgtgtcatactccgtcccgtgttcgccctccacgctgggggacggctcacctgttcctgcctcagccatgcgtccccagggccacgccacacctctcttggctgctgggtgccagtggttgacactggagtgtgattggacagccaagcgggccaagtggacggagccctgatgaaggtcctcagcggcacaggcgtggtcgtctcaggcctcggagtgccccggcatggcctctgttcagctgctcaacggctcaaggctgctcggcagtctccatcttggtcggcgcctcgtgccgaattcgccacgccaggcctcgctaccttagaaccgttagtagtactggccggt

SEQ ID NO: 130327 - DNA, 865 bp, Homo Sapiens
caagggttaaaatcggcatttattcagaaggcatgatgccaggaagaaactccccaagtgggagacaatggctggcccccctgcaagggaaacaaggcttcagcccttccctactcccagacctgccgggaaggctgggagcacagttcatggagggtctctggggtgggcctgggtgtctgacctgtccctctgcccacaggtgaatgtgacctgcgtcctgaggatcccgagtatcaggagagctggcagaggaagtcatgcagaggcaaagccaggagccccgacagggagatccccagtgtgtcagagatgcaggtggccgccattgcaaactcccggtgctcatcactggtctccagggcgatgttgtggaaggtgttcacgtaggctgcgcctcccaggagcccctcatacagaatgatcaggaagacgaggtagatgcttggcagaaagccgaaccacacgtctgccagcaggaacaccaggttgaggcactgcagcagggccagggcccaggtgaaacggatgcgacagcagcggagagaagagcgggaggcaaagacgccagcctggtacagcatctggtaccagcggtattgctgagcgtgactcagggaagtgttccagaaaaagaggagttcaaactgcaacaaataccagacaggggagatggacggggctgtgtgggtcccagccccaatcgccacctccacacccctcctagcacccctcacttacaagtcctggttaatgaaatactcggcaaagtaaactacgaccaagggaacaatgtaccacagcagacccttgaacactgtccacctttcccgaagggagaggctggagctggagcctggcttcg

SEQ ID NO: 130328 - DNA, 1850 bp, Homo Sapiens
  misc_feature (844)..(844): n is a, c, g, or t
  misc_feature (852)..(852): n is a, c, g, or t
  misc_feature (888)..(888): n is a, c, g, or t
tttccatggataaaatcggcatttattcagaaggcatgatgccaggaagaaactccccaagtgggagacaatggctggcccccctgcaagggaaacaaggcttcagcccttccctactcccagacctgccgggaaggctgggagcacagttcatggagggtctctggggtggggcctgggtgtctgacctgtcccttctgccccacaggtgaatgtgacctgcgtcctgaggatcccgagtatcaggagagctggcagaggaagtcatgcagaggcaaagccaggagccccgacagggagatccccagtgtgtcagagatgcaggtggccgccattgcaaactcccggtgctcatcactggtctccagggcgatgttgtggaaggtgttcacgtaggctgcgcctcccaggagcccctcatacagaatgatcaggaagacgaggtagatgcttggcagaaagccgaaccacacgtctgccagcaggaacaccaggttgaggcactgcagcagggccagggcccaggtgaaacggatgcgacagcagcggagagaagagcgggaggcaaagacgccagcctggtacagcatctggtaccagcggtattgctgagcgtgactcagggaagtgttccagaaaaagaggagttcaaaaagtccctggttaatgaaatactcggcaaagtaaactacgaccaagggaacaatgtaccacagcagacccttgaacactgtccacctttcccgaagggagaggctggagctggagcctggcttcgactcccggggcctcggttcttatgaggggctgccggggctgcgctctctgcttcttcttccccctnccagggtncctgggcctcaggagatgtgagcaacaagaaatagnctggccagcagcagggcagggatacccagcatggacagcagggtctgctgaggggagaggccggcctgggtgaggcccaggtaggacagggcccccagcaagccccagcttcccccagtccctgaggaccaccaggagattcacggccctggggtagaaggcagtgagggagaggaaggtgacctccccaagggcctgatgagatgctagcgaagaccacaccaccacaggctggtccccacagaatgagaaaaggcaaccaggacgaagcttccagcagcacaaatcccactgacgagaacccgggggctgtagggcagcaggtgaaggccaagaggagccaacaatttgatgacgagtgtggggaggatgtccgccaggagcacagcagccgtagagacagagttgcagtcaaatcgtgatgagctgttgtgggggatcggcgttgggcctgggtccacatggctctggtttcccgatgtcctcttgtggctaaggatgtcgtgggcggcactcagcatcaccacataagagaagttgttgcaaaggcccagcagccagaagcccaccgcgttcttccaatgcgcgccctgatggtccaacagagggagccggggctccgggacggtctcctccccctcggaatccgaaaagcgccgccgcgagcctgcacagcctcccatcgcatcaagttcaggtcccccgagggtccagggtcatagagtgtccaaagggggctcccacgggagggatgagggtctgcgacaggtgacaaggatcaacgcccgattgccggtcccagctccggcttgtctagggcactcgcgccccgcgatccatcaaggaagctgggggctccatctcgagcgccctacgacccaccacgccccacccatcgtactctcccccgccccgtctacagcagggaccctgcctcgtgccgaattcgccacccaggcctc

SEQ ID NO: 130329 - DNA, 957 bp, Homo Sapiens
gaaggagagttctgggattggagcctggtgtcgactcggggcgtcggttcttatgaggggcttgctgtgttgcgctctctgcttcttctttcccctccagggtcctgggcctcaggagatgtgagcaacaagaaatagctggccagcagcagggcagggatacccagcatggacagcagggtctgctgaggggagagccggcctgggtgaggcccaggtaggacagggcccccagcagcccagctcccccagtccctgaggaccaccaggagatcacggccctggggtagaaggcagtgagggagaggaaggtgacctccccaaggcctgatgagatgctagcgaagaccacaccacacaggctggtccccacagaatgagaaaaggcaaccaggacgaagcttccagcagcacaaatcccactgacgagaacccgggggctgtagggcagcaggtgaaggccaagaggagccaacaatttgatgacgagtgtggggaggatgtccgccaggagcacagcagccgtagagacagagttgcagtcaaatcgtgatgagctgttgtgggggatcggcgttgggcctgggtccacatggctctggtttcccgatgtcctcttgtggctaaggatgtcgtgggcggcactcagcatcaccacataagagaagttgttgcaaaggcccagcagccagaagcccaccgcgttcttccaatgcgcgccctgatggtccaacagagggagccggggctccgggacggtctcctccccctcggaatccgaaaagcgccgccgcgagcctgcacagcctcccatcgcatcaagttcaggtcccccgagggtccagggtcatagagtgtccaaagggggctcccacgggagggatgagggtctttaagagcagcagaatgttctgcactatgcagaggccatcccgggaatccggaccggtccagcct

SEQ ID NO: 130330 - DNA, 1046 bp, Homo Sapiens
  misc_feature (892)..(892): n is a, c, g, or t
  misc_feature (896)..(896): n is a, c, g, or t
  misc_feature (908)..(908): n is a, c, g, or t
  misc_feature (943)..(943): n is a, c, g, or t
  misc_feature (958)..(958): n is a, c, g, or t
  misc_feature (967)..(967): n is a, c, g, or t
  misc_feature (1000)..(1000): n is a, c, g, or t
  misc_feature (1002)..(1002): n is a, c, g, or t
tttttgagtaacatctgttttttattgatttaatcaatacattgggaatttagcagcaagttaatggcaagcagttacaaaatctcctatttttctacatttaaaataagctgtcttaaacaatctatagcaacctaaaatctcacgaacacatgtgaatgactgaagcacttctgctgtaatacgtatggcaagtttattagtaattttctaacaaagtcttctagtgcaaagtgcacataattatttggcacctccattactatatttggcctcttgttttcccctataaatagctgtgcctaaacataagaatttgaagtaaaaatgagcaagtgtgcccacagccttaaattgaaggtatctgcccccctaaaaaaccttcgtgtacatcttgagttgatttccactgcagcccactgccaagcctactggtggctgtcctttaatgccatgtgcagcttatgctgctttggagataagcagcttcaattttaagctggtgcaaacacatggcggggctctgtggagctaaaaggctacaagctcagcatagggctgtcttcttcccctcctaccccctcatcaaagtgctaacaagagcagctttgtttttgtactgtccaacactggagggaaccttagagtttctttttggttctggacagggcgccggatttagcagggtacttggttgctgttccttggcttggagtcacaggggttttctccatttctcccttgatttcagctggaaggagtttgctagatgtgaaacttgaactgcacatatcaaagttgtccttactggttgcaggaaattgcttttcataagcagtagactgtttttcctcctcttcatctgaagtgtattggtctcagggacatttcnccanggttggtacttnttcacttttctcagtggacgggctatcctctctcnggtgtgttttcccanactttcggnctcgtgcggattctggctcagggcaattcctanangatcgtataattcggatcagtcaagctgtcctggtgaaatgtac

SEQ ID NO: 130331 - DNA, 518 bp, Homo Sapiens
aaccttcgtgtacatcttgagttgatttccactgcagcccactgccaagcctactggtggctgtcctttaatgccatgtgcagcttatgctgctttggagataagcagcttcaattttaagctggtgcaaacacatggcggggctctgtggagctaaaaggctacaagctcagcatagggctgtcttcttcccctcctaccccctcatcaaagtgctaacaagagcagctttgtttttgtactgtccaacactggagggaaccttagagtttctttttggttctggacagggcgccggatttagcagggtacttggttgctgttccttggcttggagtcacaggggttttctccatttctcccttgatttcagctggaaggagtttgctagatgtgaaacttgaactgcacatatcaaagttgtccttactggttgcaggaaattgcttttcataagcagtagactgcaaataaaaggtcttgattaattttcagacacaaagcaatgcacatcaatt

SEQ ID NO: 130332 - DNA, 668 bp, Homo Sapiens
  misc_feature (27)..(27): n is a, c, g, or t
  misc_feature (87)..(87): n is a, c, g, or t
cgtgaatctttgattctgtgagtcttnatataaataatgttcttggaacagaaacaatgcaagggacatctgcacagaaatattctntgcttctctccagtttcttattcttgccagcagaatcattgctgctgctacagcttttttcccaaaaatgtctaaaagtgccgaaagtgcagagggagggaaaaaatgagccactaaaagaaggatgatcctttcttgtacctacctcctcagtctcagtgggggcctttccaagtgataatgccagtttatggtttgtaaaacttttccttcaaagagattgaactgaatttggtctccctggcatagcacagccaagttacaacttctcttggctgagcatttcactgaagtttaaagcaaaagtacactaaaaaatttcatttcacttgccatatgttcacaaacattcataatagaacaattcaggggcaagaatacattttaaataaattcattcacatgaaatccctaaacctccaaaaaagtattcatgatggtcagggcagagtgggctataatcaggactataaaacatgttcctaactgctgcaaagccaaaaatcatttattgtttcaatgattaactgtggaaataaacacgctgatcattaaacctcacagaatgatgaacattaggg

SEQ ID NO: 130333 - DNA, 2464 bp, Homo Sapiens
cacagacagatgtggggccttttattatttggggttcctctatatggaacacgggacctccccaccccaagcctagtgcctctggcacccccataaccagtacacaagtccctgaagagtcccctttaaaatcactaatataaaaaaggagcgaaggagggaaggccgaccgcccacaggctgggcagctcctggtcggcagcagggccagggaaggacagagggggcgttggcttcggcgcaggaaggcacaggcgttcccagccccggggcctccccgagccgggaggcggctccacacgcctggactgcagactgtgtcgagctagtggttatagtttatagtctgcaggcaaggccaggccggtggtgctgagtgggtggcctctgaagtggggagaggggacacatcaggatgctggggaaacccggggctgtcccgaggcaggaacaagcgaaagctgccttcctggcttggcaatgggtggggcccagggagtccatcccgagcccatggctggcacaggcaggggccacacagttctgcccggagcagatgaacgatggtggctgggaggagaggggacaggaggacgaggctgcctctctgctccaaggaaggcacttgcagctggggtggcctggtgtggtgtggtaggaggcgaggcttggcagacgaggagggaggggagcacggcaagggggaccgagtccctgcctcatgcaaacatggtcagctgcaaccacttaaacaagtcaaaggtcacaactccatccagatctgtgtccagagttttgaaaaatcggaacatggtctctagccgcaccaggcagcaaacgaaattgtcaaagtcgaccgccaggtcgggctccgagtagcgggtgatgatgagctcgtacagcttcttgttgagcttgaagcctgccgactcaatggccatccgcatctcgtaggcactcatgctgcccgacttgtccaggtcaaacttccggaagatggacaggtaattccggatgcggttccacaggatgttgaactccaccaggcccagcttcccattgccatcacgatccatgaggttcaccatgctgcggcacgactctaggctgaagcccttggtccgcaggtctttgtgtttgctgatgatcctattgaggattgtccgcaactccttcacgctgatctccatgtcctcccctgccagctgcctgaagagggccttgaagttctcgtcaatctcctcttctgagagcacttgctcatcggggagattggcctggatctggtcatccagctccacagtcccagcactcttctctgagaagaagcgcagcacgaagtcgccctccttgttgggctcgaaggtggagggcaccaccacatactccccgggtggcaggcggaagcgggtgctgacctctcgcaggttgatgaactgctctgagcgcgcccgagacgcattggccaggaagaagtcacgcttcaagtgtacggccggctggcccaccagctccggagggacctcgtagaccgcgaagccaatagtctccatgtcgcggccgaagcggcgctcgcggcgacggtgcttctgcataagggcgagcacgaagctgcagcctgactcgcggtccccgtagtcgtccgggtcatccgtctcatccagccggatcttgaactgagggttcacccagaaggtggctgggtagtttcggcagccccccgcggtgctcccccgccgccaggtgccttcgtagagtgtggtgttccatttgcggatggtccggctcttgagggcgtcgggtgtgaggttgcagatctccaggcgggtgaactcccgcatgaagtctcggaatgacatccagaactccccgtcctccatcttgacccggagctggtcccgttcatatgggtccacgttgttccactctgaggagctgtcgctccaggctcccgtccactccacctcgccccaggggttccgcatccggatcaggctcaccacctggcctcggtagttcacctgcttggccccggtcacagagtaggcatggcccttcaccaacttcttgaaagtgatggcctccatgtctagaacgctggagatgtctatggagcagcccagcagggagccccgctccagcgccttgaggatgatctggtagaggtcactgggagccttgcgcaactcgtaccactcggtaaccccgcctgtgaagtcctcaaagccctctgaggtgctgccccctgacagggcctcgtagctgccatttaccttggcataggccttctcaagcagggcgctccagaactcgttgccttcggcagagtgcacgaacactagcttcccgtccttgatgggcagcaggtcatccacgaccacgtccacccactccccaaattgccacagcggaaatggaagatgccggcataccatctatcccgggaatccggccggtccagccg

SEQ ID NO: 130334 - DNA, 977 bp, Homo Sapiens
tacaactggccttggtattcacctccttgccccgttccagagtaggctggcccttctccaacttcttgaaagtgatgcctccatgtctagacgctggagatgtttatgggagcagcccagcagggagccccgctccagcgcctttgaggatgatctggtagaggtcactgggagccttgcgcaactcgtaccactcggtaaccccgcctgtgaagtcctcaaagccctctgaggtgctgccccctgacagggcctcgtagctgccatttaccttggcataggccttctcaagcagggcgctccagaactcgttgccttcggcagagtgcacgaacactagcttcccgtccttgatgggcagcaggtcatccacgaccacgtccacccactccccaaattgccacagctggaaatggaagatgccggcatagccattctggaagctctggccgtgcggaaccactcggtgcaggagggtgtcgttgagagtgagggaggcgatggccgccaagagccagcagtcccccagtgctccctggcagatgtctgtgcgggtagctccatccacaatgaactgggggtttgacagcagttccgtgggacgcttccacttgatgccataggtcttggaggaattgggacccaggtccttgtaacccaggctctggggtaccggggggaaggcctcatcacggaagagggtcccactctgcaggcatcgcacccgcagctgctcataatcctggcccaggtacttgatggcattctcatggcggcccaggcccagctcctggcccgctgcttctgcacttgggctgacaccccagtgcagtacaccggcgtgatgatctcctccgacatcctgggggaggggtgtttgggggtcgctgcagtcctgaggctggcttcccggtggccctcgtgccgaattcgccacccaggcctcgctaccttaaaccgttagggttactgacctt

SEQ ID NO: 130335 - DNA, 804 bp, Homo Sapiens
ctacgggggaaagagtatgaagtgacggcgcgccgaattctgcacgaggcgccggtgtactgcactggggtgtcagcccaagtgcagaagcagcgggccagggagctgggcctgggccgccatgagaatgccatcaagtacctgggccaggattatgagcagctgcgggtgcgatgcctgcagagtgggaccctcttccgtgatgaggccttccccccggtaccccagagcctgggttacaaggacctgggtcccaattcctccaagacctatggcatcaagtggaagcgtcccacggaactgctgtcaaacccccagttcattgtggatggagctacccgcacagacatctgccagggagcactgggggactgctggctcttggcggccatcgcctccctcactctcaacgacaccctcctgcaccgagtggttccgcacggccagagcttccagaatggctatgccggcatcttccatttccagctgtggcaatttggggagtgggtggacgtggtcgtggatgacctgctgcccatcaaggacgggaagctagtgttcgtgcactctgccgaaggcaacgagttctggagcgccctgcttgagaaggcctatgccaaggttaatggcagctacgaggccctgtcagggggcagcacctcagagggctttgaggacttcacaggcggggttaccgagtggtacgagttgcgcaggctcccagtgactctacagatatctcaagcgctgagcggggctctgctggctgtcataactctcagcgtctgactggagcatccttca

SEQ ID NO: 130336 - DNA, 972 bp, Homo Sapiens
ggctcaccacttgcccttgggtagtccactgcttgggccccggtcccagagtaggcattggcccttcaccaactttttgaaaagggatggccttcatgtctagaacgctggagatgtctatggagcagcccagcagggagccccgcttccagcgctttgaggatgatctggtagaggtcactgggagccttgcgcaactcgtacccctcggtaaccccgcctgtgaagtcctcaaagccctctgaggtgctgccccctgacagggcctcgtagctgccatttaccttggcataggccttctcaagcagggcgctccagaactcgttgccttcggcagagtgcacgaacactagcttcccgtccttgatgggcagcaggtcatccacgaccacgtccacccactccccaaattgccacagctggaaatggaagatgccggcatagccattctggaagctctggccgtgcggaaccactcggtgcaggagggtgtcgttgagagtgagggaggcgatggccgccaagagccagcagtcccccagtgctccctggcagatgtctgtgcgggtagctccatccacaatgaactgggggtttgacagcagttccgtgggacgcttccacttgatgccataggtcttggaggaattgggacccaggtccttgtaacccaggctctggggtaccggggggaaggcctcatcacggaagagggtcccactctgcaggcatcgcacccgcagctgctcataatcctggcccaggtacttgatggcattctcatggcggcccaggcccagctccctggcccgctgcttctgcacttgggctgacaccccagtgcagtacaccggcgtgatgatctcctccgacatcctcgggctgcggcagctgctctgaggaggggccgggctggcagcgagcagacccctgccggaccctcgtgccgaattcgccacccaggcctcgctc

SEQ ID NO: 130337 - DNA, 1002 bp, Homo Sapiens
  misc_feature (668)..(668): n is a, c, g, or t
  misc_feature (772)..(772): n is a, c, g, or t
  misc_feature (822)..(822): n is a, c, g, or t
  misc_feature (845)..(845): n is a, c, g, or t
ttccgtgcttgtaaaactgttttaaataactcttgctaaagcagatagtaccagagagcagaaactcagcgcccaggtccttaatggttccttctctctaccctccttcccctcccaccccccacgtgtaaacagtccacagtcacaccagcgctttgggaaacagaagcccactctcggtcttcctgggccactgcttctcatcgttggtctttggggatcaaagactcctctgtgtctgagtcaggtcgcccaacacctgctgtgtacctcccaccccccacaagaaacaagtgcccagatccttaaagacacagtttgttggagtagagctaagagaacccctggctcaggaggtggctttccgatgggcccctgagcagacataggagatgggatggcgggtcccaggcctcacggtgaacgtgttgatggggcttccatagcgggtggtggtgtagggagacctgccggcagctggggcgaagccgtagtcggcgctgccgggcgctttgtgcttggcctccgcggcgccccgggcggcgccctccagggacagcctcggcgcgtgcaggcctccgggggggcgcgcgacccgccgagttcacgcgccgcatctcggggcctccgggctgcgggccgaagcagttgggagagctcaggctgcnggccggtgccaccgtggggtagccctgggcctcggtgcggctcccgacgtaaggcgctcttatgagcgagcggccctccgagaagcgtccaggcccagcccggngtacgcgcgccgcgggaaacgcgaaagccgaagcgggggcgccggggcancgtcgggactgctcagtcgatanttgtcgggaagggagtctggggcaataggggggcgggcggggtcaggcatgtgatcggggggtggagactcagtgatctctctctctccctcggcgatttgctgaggcatctaagagggtaatcgacagcaacgtccggggatgtacgccatccaaa

SEQ ID NO: 130338 - DNA, 863 bp, Homo Sapiens
  misc_feature (770)..(770): n is a, c, g, or t
ccggatcgaaccattttattacctccccctcccagaaccagaagcgcaggctagccggctggaagggtcgtaccactgacgctgcgaggggagtgtggtcagagccactgagcagcgggtggggggaccaaaccaagtggaagctcttggggaggtgccaagtgcccagcggccacacgcgccggatccaggttgggcggtaactagtgagccccgcgctgtcagaggtaggctcagtgtctccgccttccggctgccatctcctgagcgagctgcgctgccccccggacccctagggcccgcgagagccgttcctcgctgggcactagccagggccccggggaacccgggatctggtcgttgggatcctcagcgcggcgctcaggaggagaaaccgtggggccatcggcggccgcctctggactaggctccgggctgccccgggtcttcttgagcgtcgtccgggatggagggtgctgaactagggaagtgctgctgctgcgagaccccgttacctccggccctccaggatctgggctgcgatctggccatgacgggacaactccttttcggggctctcccacccctcgaggcttgccagggtgggtctccagaggccgacgaataaccaggtggagctgggggcctccagctcggatccgctccacggcctgggcatgggtgaggccctgcgttgactctccgttgatgtggagcacgaggtccccgacctgcaaacgaccacagcgctgtgctgggccatcctgcancagcccgcgcacggacagcggagtgtccccagctacataccggcccgcgacctaggtgaggccaaagcctgcgtaaccgcgaaccaggcggac

SEQ ID NO: 130339 - DNA, 1161 bp, Homo Sapiens
acttcaaaaggcttctttactgcaacatcaatagaacatttataaaattcatttctcaatttactcaaacacacatacaaaaattcacaagttcatatttagaaaactgcctttttaaatccgtcttagaataaatacaacatcaacttaaccatatactggccactagtgtagcacatcagaaaaaataattattaactctttccataataaatgtcaatatagtaaaaaatgtcaagcacacattagtgaaatggatcaagatcattttttattgcacatctgcttacatgtctgctgcttttgggcagagttaaacctgacatattgagtcagtttccgtcattttacatcaactaaattatagcagtgaattgcttatgtgtctcccaggcttaccttccagaaactagaacattaacctttccaatttatctaggtactgaagcacaaatttaacatttgtttttgcaaaatttaaacactcagaaacaaaccaaacaacatcctatacagaaaacaatttttatgtctagatatacaattgaggttcagagaacttctgattatacagtattgtaaaggtaatgataatccaaccctcttccaaactatttaattcctgtatatgtaattaagcatttattttcagaaattttaacactttcagcaattgattctctcacaattaggcatttttaagatcctccatcccaccaaaaataacccacaatgactccaaatcttgtttttcttttttaaaacgctattctcttgggactaaactgttcagaataatcagtattcttattccctttccactgtactctactgctcaatgcaaaatggagaatatgtggtccaaatagaaatatggcatttgtgcaggtcaagctttgaagagacatggaccacatgattagcctgatttttaaaaagcaacaagaatggtgacacaactattacaccaaacacaaaattctggccattaatgaatcagaagtaataactgatgctcctactttaaattcatcaatgccatatttaagaagtcaagcaacaacacatacttggcaaaatcttctaaattctcaagttatcaaacaaaaaagttatttttaatactttaccccccttatatcttatgattcaatcacttcc

SEQ ID NO: 130340 - DNA, 759 bp, Homo Sapiens
cctggatgaacctaagaacagccctattacctgggtgagcaccagaacagcctgttacttggatgaacctgagcaggcttgtgtaagaagcatgaccgcctaagaccaccacactgtgggaaggccaaggcccgtgtaatgaggtaccatgttcagaggaagaccaaggagcaccaaggaggcagcagactgagtggagaggaatatgcaggggatgctgtgtagtcagaatcaagcttcccagtgtcactcaaagaagcagcaagactctgtcttaacgtggcttgctgttgctattatttccctcgaagccatgagacactggatgagagcagcggctgggcgtgtgagttaacatcgcatgctttcctgactccactgccccactcatgaggtcatagcatagcttcttgaatttgtccttctctgaatggaagccacttggatcctccaggtatttctccaaggggcagggctttcagcacagaatcaacaggggaaaccatctggaaagcccagaggcgtgttcggcagcgtgtgggagcagagctgcagtaaacggtggctccttgttcgcccatctcagctgttcagctgacttcttgccgtctccagctgtcttctctatctcatcctgatgactccttcccacaactctttccctggctgccgcaacggtccagctgcagcctgcattcacagttacttacctgtggggctttcttgtttctgagatggccgaattgtcttctgaaattt

SEQ ID NO: 130341 - DNA, 986 bp, Homo Sapiens
gaatacgcaagtatttattacgcccttgaaccaatggctttgacatgttgtaaacaggaacactgaaagaccctcatcttgacccaggccatagaccaccaggtcatgaggatccctctttttttgaaaacccaggccagacatgcttgatcccttgcacagggaggccctctggtccctctggaatgaagcattcatggaaggcccatctttctgggttttccagtctggttagtgggcagttgttcacccacagaacacaggggtctagtgcacacttgagtcttgggcctgaggactgaccatgccaggggacttccattccagggagaccccttcagggtaaggagagctgagcatttgcttgcatctcgctgtcagctggaatgagcgcagctgggaggttgcaaagagcccatggctgggttttggcactggctttgtaataactactagggcgaacactggcagcatctttgaagggctagaaagaaggtggaatgttaaccatcagctgtgaagggagtacccctgatttgtgctatttcttcttcaactgtctcaggagtgttctgttaatatgactggaatatctgccttgcacggaatgggcatggacgtggctcactggcatcttgggagggatgaggcccgagtgtgctctgctctctgtccccaagtgaaactttaggcctttcctccatggcccccagccctcctgcactctcttctcatcttcaaaggctctgaagcaccaatgtccttgtgtcctcccttctagatgaggtgcaccaggagggtagagcaggctgagcccagtgtataggcgccaagcgccgcataaaaggacatcaccactccccgtggcctctcgaccaggctccctggggaccaatactaggcccgtagagggaggccagggagccaagtagccgacagacaccaagagggagcgaagaaagcggggaacataggaccggacgcca

SEQ ID NO: 130342 - DNA, 981 bp, Homo Sapiens
  misc_feature (319)..(335): n is a, c, g, or t
  misc_feature (709)..(709): n is a, c, g, or t
  misc_feature (773)..(773): n is a, c, g, or t
  misc_feature (775)..(775): n is a, c, g, or t
  misc_feature (782)..(782): n is a, c, g, or t
  misc_feature (801)..(802): n is a, c, g, or t
  misc_feature (848)..(848): n is a, c, g, or t
  misc_feature (874)..(875): n is a, c, g, or t
  misc_feature (960)..(960): n is a, c, g, or t
gctgaatatgtcgtatatacatatatataatattttattttaaaatgtcattgaacatatacatttctttagctttttccaggggacattgcacctaagtttcaaaacacacaaaatagatcccctttactaaacagttttcattttggggttacaaaaaagtcaatgtttcacaatcacaaagcataaaggtacatggttctgaaacaatttccaggcagatttctctcattcactgtactagggtagttttggaaacccagaccatgatccattccttacaaatgatctccaccatgggcctccctgggtctccagnnnnnnnnnnnnnnnnnctgggggcaaaacaggagtaaaataataacctcaggactcaggaaacaaacacaaaatacttgtgggagatcagaaaagtagaggacacaggttctccttcaagtacatcacagtagaaaactacagcacatttacagccttatttggtcactgtctacctggttgctacatgaacaaaacttcacctaagacacagaagaaaaattaaagctatttacacagataacactgtggattcgaaagagcagtcctctgcagaccggcactccatctgacaaaagccacagtgctcacagaagaggcaagtcagtctgctcgcgtagcgtcctttgaaaaatcccagtgtacaaacatgtgccacgtcaccacacanaaccaaagtctgctcagagaggtgggctatggtgtgcaggctgcaacctttctctgcaattgtnangtctcanaatctgagtcctcacatannatctgtgctgtggcagagtcgtttacattttctagatggctcgtgnccgatctggctcgagggcaatcctannggagtcgataattcgtatcatgtcaactgtccctgtgtgaattgtatcgcccacatccaacacatcgagcgggacataagtgaangctgggtgctatggatgacaa

SEQ ID NO: 130343 - DNA, 974 bp, Homo Sapiens
  misc_feature (619)..(619): n is a, c, g, or t
  misc_feature (715)..(715): n is a, c, g, or t
  misc_feature (717)..(717): n is a, c, g, or t
  misc_feature (731)..(731): n is a, c, g, or t
  misc_feature (737)..(737): n is a, c, g, or t
  misc_feature (741)..(742): n is a, c, g, or t
  misc_feature (760)..(760): n is a, c, g, or t
  misc_feature (762)..(762): n is a, c, g, or t
  misc_feature (810)..(810): n is a, c, g, or t
  misc_feature (815)..(815): n is a, c, g, or t
  misc_feature (824)..(824): n is a, c, g, or t
  misc_feature (831)..(831): n is a, c, g, or t
  misc_feature (856)..(856): n is a, c, g, or t
  misc_feature (859)..(859): n is a, c, g, or t
  misc_feature (875)..(875): n is a, c, g, or t
  misc_feature (895)..(895): n is a, c, g, or t
  misc_feature (904)..(904): n is a, c, g, or t
  misc_feature (906)..(906): n is a, c, g, or t
  misc_feature (928)..(928): n is a, c, g, or t
tttttttccattttgcacaaaaatgtatttctgtgacttcccaaagtacagacatttccccaggccccagggggtaaagcaatgaggtgtgaagtctgccagggtctggccggggccgctgagcgtgggaaggaagggagcgccgcatgcagcccatctgccaagctgggggaacacagggctgcgcccacttcccagggccgggagggagaggctccaggagaaaaaggccaggtgtctctcccaaagctgctcacccctgccgtcctgcctggaggcagaaatgctaggaacacctgaaaacaggcccgcgggaggaaaagggaagaaaaagccatcacccaaaggctgcctccagggttagcgctgctccccaggcccctgcgctccacaagtgtccgatgagaagcaatgcagtgtccatcgatggaggagcaagagagccggcgcctctcaggcttccaaggtaaagcctagggcagggcgggaccgccagggaggcccaagcggccactgcagggcagtccgagtgctggtctggaggcggctgtgtggccgttgtgggtcaaaggctggcatgggacctctgcctctgagaggcgtggggtcctctgggcancggggcaagctgggaggaggaggcaggctcagttctgctggtgggagcgctgggcagtttagggctatggagcgaggaagcaagccctggccccananatgctagctccaangctgangganngtctggatgtgttggcanangggcagtggatctgccccgagtctgacatcctgggctgggcttccaangctgngactggtgngaactangaggagctccatacacgtggctcangangctggtggacacaaanggcactggtgcctgctctanaggtctcangngaggctgctgactcaactctcntgcgattctggctcgagcaatccctaagagcgataatcgtatagtc

SEQ ID NO: 130344 - DNA, 656 bp, Homo Sapiens
tatattattatgacaggttcttcttttattaatgtatgctttgacaatggaaaaatggattataaccttctgttgttagccattattttattatttaaaatacataacagtcatttaaaaatttttgtataacaggacatatatgtttagaaaagcaatctcagcaacaggtctcatagagaaatacatctaataatttgcttcaatggaaatcactgctgcttcttcagggcaataacagcataacatctgggagatttcacgggatcaaacaacttcacaagagcagaccatgcaatatcttcctgctctttcaggtaacaaagtcgatccagaagaatcaaagtctctatacagggagccagtacaactttcaacatattaaaagcttccagctcattcattcgaggcttatacttctcgtagtagttcattataattttttctggcagcttggactcatctaatccaagcttctttagagaccgtctgacataatccagaaaagaagaacatttggaataaattttaccaacatgccgatcacatttggtgatgccataacaatctttaataatatcctgaagaacagcacgatagaagagtgattcagtaggcagctgaaaaaaatgtagacatatataagcacaagaaac

SEQ ID NO: 130345 - DNA, 917 bp, Homo Sapiens
acaaaagatctcattattatctgatttcactgtctcacgaaggccctgtgtgctccaaagactgaagctctaaataagaatcttctgggtcctctttattaagagccctctgccttcccaggggagggaagcaaatccttcagggcccccagagttcctgcaccccatatcatgggtgagtcctaccagccacagagccacccgtcaccgtggagaggcttaagctgcactcagagctccccccgggcatgccgaatgtagtgttgatgcagccctgcttcctgagcaaagtcctgaccgcactctgtgcaggcgaaggtgccaggaggggcacggacctcatgcatctggcggtgccgcctcagagaaacagcctgcccaaaggtcttgccacagtcaggacaagggaaggtgggctgggcagtagtggttgcaaccggcagggtgggcttggcggctggaccgtggctgcgctggtgggtgattagggctttggaggaggggaaggagcgggcgcaggtgaagcagatgaagaggaccccctgcagcttctgggccacgaagtccgctgggtgctcccgcttcatgtgacgctcctggaacttggaatctgcgaaggtgatgaggcagcgggtgcacttcggggcccccaggtggcagatgttgcctcctgggctctggggacttctctccttgggtgaatcctgctgcttcatgttctcttcagggttcgggtcctccatggtgctgggacccttcctttatcccagttcttcccgggaaacatcctctgacatcctgtgatttttgttccgcccagagcccccgcctcccacgcgcgcttgcagctgctatcccgctaccctcagcgctgcccctcgtgccgattcgccacccagcctcgctacctagcctat

SEQ ID NO: 130346 - DNA, 674 bp, Homo Sapiens
ggacaagagcactttattttcaataattttgatggactgttttgctcacaaagaaaggttcctaatgagtgccccaacaaaggttaagccattttaacttaacataaatcaagatctgtctgccccgtgccctgatacccagaagcatctgtctactattatgtctgagaactctgtcatgccagcatgcatggccctggaggacggctcttcttggccctgtgttgtgcactgtctgccgagcaggacactgccccctggctgcatctgagcctcccaggtcagcaggaggcaccctggggtctatatggcatgtgatgaataggaaagggcacttattacaaagcactcctggacattcttaattattagcatcttcattcttatcagagacccaaatgtgaattggcttccaggaaaggaggtggtaagagtgactgggaaaggcttgactaactagaaggggagtgaggaagggcagtgagcgggaggtgtgtgttagacacagtcagtaaaccaaaggccaggcccgcaccctgcagaagattgtgctccacgtccccagcagcagaggctgggcaacagctgccaagagtcaatgaccaattagagggacctcgtgaaacagggacctttgctaccagcgagctttcacctttcagcatatatatttg

SEQ ID NO: 130347 - DNA, 1072 bp, Homo Sapiens
  misc_feature (64)..(64): n is a, c, g, or t
  misc_feature (83)..(83): n is a, c, g, or t
  misc_feature (155)..(155): n is a, c, g, or t
  misc_feature (163)..(163): n is a, c, g, or t
  misc_feature (174)..(174): n is a, c, g, or t
  misc_feature (229)..(229): n is a, c, g, or t
  misc_feature (249)..(249): n is a, c, g, or t
  misc_feature (260)..(260): n is a, c, g, or t
  misc_feature (936)..(983): n is a, c, g, or t
  misc_feature (1009)..(1031): n is a, c, g, or t
cctgagccagatcgcagagcgtttgtgtatagtagagagaggtctttcactgctcctccacttntgagagtgcaactgtgtgncagaaaggcatctgagggagagacagatcaggcagtgctcgaagctgtgtctcacctggtgctcatcaaacntgcaaccngtgcctgtctnccgagctgactgatccactcatcattcttcgtcccactactaagactggcatgtntgctggtgtgtctctgcacntcaggaatgtncacaacagggggtagccctcaaaagcactcctttttctatacctcttctcaaggccatgtaagttgcccatctctacctggctgtggacaaaaggttatctgctcttggccatctggtggtggtggcggcccagagtctgaagaaatggcacagggacagtgaatggtagtgttgccaccctgtgctgaggcctgaggcctcttcctcagctttatctccctttccttcactcaagggccatttccccagtccctatctcccccatcccctcccggcttataggccccacaggtgctatttgttgtgctggcccaggcgtggggctaccaagcaaaggcttggcatataccaaaggccagctgcatgcccatcagtctggtctttttcctctgcggtcatgttggctttcatgctggatcaaatgttttactttcccagactggtggcatctgagttccccatcctaccactctcaccccactttcctgccccacctaaaccctcgttttagtaatttgtagtgactgttcccttccctctgttgcagggaaccaggaggaaagggaaagatgttgccatatttcctactctttaggcatggactctcctttccctttgttagtgtcctgggttcccatggactcagggatttgttggctaaggtttctctgtgcnnnnnnnnnnnnnnnnnnnnnnnnnnnnnnnnnnnnnnnnnnnnnnnntgtacagaataaaaatgttttattgnnnnnnnnnnnnnnnnnnnnnnncttgagcaggcggccgcaagcttattccctttagttgaggt

SEQ ID NO: 130348 - DNA, 1121 bp, Homo Sapiens
ttttttttaaagtctttagtatatttatttgtataaagagtaaacaaagtgcatatagagtggccacaggtttgacacagagaccttggtgatgtaggctatgaacaaatttaaatggcaacttcattgctgccactgaaccaatcctgaatttgggctcaacaggtgaaaagtaacaatatcaaacgaatactaaacagcataacaaaaagattttcagactcttggtcataaagaccgtaatcgttcacattgaatcaatgactaaacatttttgattacccagctacctccaagcaaactgaaaactgtctagtggatcctgaagtccatagtgcctctagccgggtctttcaagtgttgcaccacagggtgatgattgatggtaaaaacagggatcaacccttgtagatcggtggtaagtaatggaaagccctcttaagaacagtgcagctgctatgtggtattcacgtactggttgcatacagcattcaaagaccagtgctggaattagctttgccccaaagtggtagagttagtaaaaggatatacattgacgtttcttccaaagcatgtgtaatagcatccaggttctgggaatgagttctgattaaaggtatactgcttcacggaaagcactggcacagagcttagttcttaagagaattaattcatcatgcagacaggattaatctattccacagctatcctacaccagtgtagaaccagctttctcaaataatggtgctaagtgatcaacccaacaggaacacgagctagagcaactggagaaaacacaagttaaagtcctactgggtcagagaataacagtcactagcagtacagaaaccatatatactacctaggtatctaaatattctacgaatgcatggtcctaagtacagtatagaatacttgtaaatttagagaggacaaaagtccgatgcaaattgtttcatataatcctatgagtatactgttgcactaaccaaaccatttcagcatcaagaactggcaaccaggtgaagaagcaatcatcttcagaactataacatcgtgcaaactcgtcgacatatcaaaaataccccatataggaaaatgcacaaaatagtaacacactg

SEQ ID NO: 130349 - DNA, 705 bp, Homo Sapiens
  misc_feature (445)..(477): n is a, c, g, or t
  misc_feature (673)..(673): n is a, c, g, or t
caagggcagaatcacatgcatttaataacttatgggagttatggaaacaggtgggcatggccaggggccagaggccaggagtgtggtgagccgttctaggggagagtaatgagatacaggatggtcctactgcccctggcctacctctggagttggagtgagagcagtgggttgcccctttgctcagatgagcagatggagtctatatttgtcttctgacccactcctgcccaaggccctgtgtggaggtgagggaacatcccttctgttcccgcagctgtgaatccagtgtatacatggccatcctttttgcttccctcctacccaacacgctcatgtgcctcagacccaggactcctcctcaggtggaagtggagcttgattaagccagtgaggttgcaggccctctggaggttgggggctgctctccaatggagcggctggnnnnnnnnnnnnnnnnnnnnnnnnnnnnnnnnnacctactgaagctccatccacccgggatgcctcccctcccttgctgcccagcacagctctcaacagcctgtccttggggggctgcctggctggacccaggaagacataggccagtggcctggggattcgtgaaggctgcttctcaggcctgtggtctctccggggccgaatcctgggtctcagcttcagcttgtanatggacgggacctcttgggcttccggagagtc

SEQ ID NO: 130350 - DNA, 764 bp, Homo Sapiens
  misc_feature (731)..(731): n is a, c, g, or t
ctgcctggctggacccaggaagacataggccagtggcctgggggattcgtgaaggctgcttctcaggcctgtggtctctccggggccgaatcctgggtccagagagctggctctgctcccaggtttggcctgtgcccaaggaaatggctgggccatgccccgagctgctggccgctcatgtgggtacagaccgtttctggtgaggcacagccaggtattggggtaggaggcacattttcagacctgtgctgctactcactctgctgaatgtacccccaggcaagtggtaggggtggaactatggggtccatgtggctggggccgtgcactgaaaccaaacttggggttctcaagctgcttcctctaatcaagtctgtgggtggagtggaatggaaaagtgtgatcacccttctccataccccactctgcctgagaacatgctctagattaggctacagtggaggagagggagggtggtggctctggctgccctgatgggaggaggagataggcttgccacctttgccaggaatctcctggaattctcccagggtgagaaggagagctccaaggcctgatggcttggggtgaatgatgacttactgtcattgtcctcaagcctggacaaagtcccatattctgggaggtgtcattgttccaagcctgggcaaggtcccatattctgggagacttagtgtcattgtcccaagcctgggcaagaaaccctattnctgggggtccctcgtgccgcctcgtgccgaatt

SEQ ID NO: 130351 - DNA, 1035 bp, Homo Sapiens
  misc_feature (59)..(78): n is a, c, g, or t
  misc_feature (729)..(729): n is a, c, g, or t
  misc_feature (890)..(890): n is a, c, g, or t
gtgccaagctaaaattaaccctcactacaagggaataagcttgcggccgcctctcaggnnnnnnnnnnnnnnnnnnnnagaaaacaaccaaaactttatggcaatgtgctgtcatctttcctggggttagtgcctgagtaataccccttgaaaacttctcatcccctgaagggtggggtgaccacccctctgggactgaactccttttgggagccagagaagggtctgtggttggctgaggggctgtagcttagacctcagggtctccaggatggaccccaaggccaaagggtctaaaattctgaattctgaatctggtggcctcctcctcacacccttccctggagcagctgcctccggaatggctcaaagtcctcaggcactgtgtcattgcatcgatactggagattggaccaaattatgttttcttgggagaagcagaatacaccaagacgcccccctcgcatggatgtgtcaatgatcaccccagaatccgccacaagctggggtccctcatagagcttcacccgaatgtagccaacttgaggccggtgcaaaagctgccagcgataggaggtcttgtcccgccagcccacatttcgtgggtctgtccacagcagtcgtacctgatcaggggtgtggccagtatgcacagggcatttcggaggtgctcacctgggccagacattgatgtcactgccttaactgcaccccggggctggaatcgcncgacgggttgacctggcattatgttgctcggctggctccaatcagacgcaaaactggcactgtcttgataattaagagaagctgcgtttcacatcatcatgtgttaatggaactggcttcaatcccacattagggcgttatccactccagccaggtattgntatgtctgagattcatgttgttgtacaacctatgtgggaatctaactacctaagttcaaacaagtttatggcggagccgtgctgtctttctttagaaatccgggcccgcccctttcattctgcgtgcattcctttttcgttattt

SEQ ID NO: 130352 - DNA, 965 bp, Homo Sapiens
tttttttggtattataggatttgtttaatgttttaaaattcaaagcactttaaattattttaagacaaaagattaataaaaacaacattacctttcaaatacaactttataacagcacagtggaagaatggtaaacagtccctcttttttttaacaaaaaatcagtacttaaaaccaaaggaaggcttatatgtacagctaattcagaaagggaacaatgacacctaaagacatagataaatgcttcattttaatccaataaatgtcctacctactggatcttaataatgatgttttcaatatgccatttaaaataaactatccttgaaaataaagttttaaatcattcaatataatctatgaaatagcatctagttaactagattaccttaaatataccaaatattataatcagcaaaataaaaaccagtaaatcaatttgtatctgaaagcctgatgttctgatctactggattttaattttttttccctaagattaacaatataaacaaatcttttgggtactcaacatattatgacaagctcaggcatgttcagggtggtatggccatagacagtaccaacatattagaaggaaattacctatttataattattaactttcaaacatatgactcaccaccgaacaccagtacaatattttagcaatcatcttatgtgacgtgacaagtggaaaacaaatttctcaacaatagtgggtcaccatattcctccatctaacagttacttttaaaaaaattaaactttggaggccatgacggcaggagtgagaggccaggagtttgagaccaatttgggcaacatagcaaaactctgtccctacaaaacaataatagtaattataaattagctgggcatggtggtacatgcctatagtcccagcaactcaagaggctaatgcaggaggactcgcttgagctcaagaggttgatgcaataacctat

SEQ ID NO: 130353 - DNA, 691 bp, Homo Sapiens
atcgtgacgcgcgctttattgtttcaactcctgaatccactggccgaccccagagccagaagagtagcaagaattcaatcagcaactcctgatgtggacaaacaactgggcagtgggaataggcagttggggggctgtggctcggcggggccgggggctccacttactttcccgatcgggtttcgtcttcatccccagccagagcccagggctgcccttggtgacgcccaggagaaaaccccagcccgcaccctcaccacagttccatttgtacatccaggaagcccagtttgaaaaacaaaccacgcctgtaaactgagttggatgaaaagagctgccttggggggtgggaggctaaggaactgttcacggtcttctgggtgggccctggattcccgcacttctggagcagtcctcagacagccaagggatccatccacgggccagggcttcccgaggctgtctccacagtcgctgggtctcaggagtcgtcctatcacctgagcgtgctcgctacttctgctaccattatggccacaatgacttcccataaacttaagtcattgagaccatggaattctgttcccatccgattcctgttgatggacattcgctgttttggcgtcatgggaactcctcggatggtgagtcagtttaaggacaaagcgtgagtccatcgtttctgggacag

SEQ ID NO: 130354 - DNA, 1312 bp, Homo Sapiens
ttctttcactggagacaggaggttttattgatgctgatgggggtaggaaaggtccccagaagcatgggggctgagtcagtcagcaaatgcgtaaggcctaggcacagaggagcaggttagggcacattcaccttctcaggattctgtggctccctcattggagaagggagagagcatcttgggggcgcaattccaagagcagcgagggcagaggttagagatggctgagagcccctaacctgaggcggcaccacaataggcagcaacaactgtgtggaaagctggatgaactggtcagtagcggaaaatgggagggggcactgggttggcctcttggggaggggtccaaccttggcttggatgagctcatgagaatacccagtgttcccaagcagaggggggcagagcccaaagcccctttctctgcaggcctccttaaggagaaaaaggcactcagagaaaaaggcattcagggaaccccctggaaaggggtgccagaattagtccttaaggcacagctgaggcggacaaggcaccaaggcacaactggtggggggagggcaggggcagcctccaagccaagtgccagggtcacaagaggatgcaggaccgcccacgcttgatcggcgtggggttgagcacagcccggacagcctcggcgaacacttccttgacaccatcctgttgcagggctgagcattcgaggtagcgcacagcgtggatctgcttggccagtgcctggccctgctgcggtgtgatgggcgcctggccctgctccttgaggcgccgtagggtgtcaggctgggctctcaggtccttcttggtgcccaccagcaggatgggcacatcagggcagtggtggcacacctctggatgccacttgtgccgcacgttctcataggacggcggactggcaatggagaaacagatgacgaaaacgttggtctgagggtaggagagtgtacggaggcggtcatactcctcctggcccgcagtgtcccacaggttcaggttcactgtgcgcccgtcaactgcgctctgcgcgctgtaattgtcgaacacggtggggatgtactctttggggaaagcgttagttgtgtagcagatgagcaggcacgtcttgcccacagccccatcacccaccaccacgcacttgatgctctgcatcgtgggtgcagttgctgtagtggaggcagtgcctcctctctcttctggacccctctggctgcagtgacctggtgccctccccgaggcgggggagctgggggcggcggcagcggctccgggcatcccgggaattccggaccggtcc

SEQ ID NO: 130355 - DNA, 726 bp, Homo Sapiens
tttgtcttccccaaagcactttaatgcattcaccaacccacagtccctgcccgctggctgggcaagagaggccagcccccatctggaggctcctatggcttcccacacctagtgtgtccaggaaggctgagcccgcacacattcccatcaataggtgaggggcgtgagaatgaagaggcggtcttcctctttgcggatccagcgcatcagcttatggatggcactgacggctgacgccttggtccccagggggctgtaacacatgtagagctcaaaggcgcctgtcacccaggccaggaggttctcgttggggcccgtgtagtaaatggtcttgagtgggcgagaggcattgtgggcacgactgtgcaagtactggtagaggcccagcagccgctcctgctcctcttcactggtgtatggggcctcaatctcagggctggtgaagagtcccgagctctttgacttatagaggaagtgacgcaggtcagggatgcccacttgggcaacgctgtagtagggtgtgcgcagtgcctctcgcagggccaggtgggctccgcgcttgcgaaggcgctcctggaagcggcggcggcagtcagagactgcaaagaagtcctcacggtcagtggagacaagcagcaggcagaggtcagtgtcaggcttctaggtaagagatgtgtgcgtggaagaaggcggctgcgttgaatttgggcaggacacgggcgtcag

SEQ ID NO: 130356 - DNA, 1557 bp, Homo Sapiens
  misc_feature (94)..(94): n is a, c, g, or t
  misc_feature (115)..(115): n is a, c, g, or t
  misc_feature (248)..(279): n is a, c, g, or t
ccttaagaagctttaaatttccggtaggatagtttgtcccaattaagttcccacccaccagaagtaagggttcccttcacaaaagatccccagnctagcagttttccccagtcangacgttgttaaaacgacggcccagtgcctagctttatattacgactcactataagggaccacttgtaccagaaaagctgggtacgcgtaagctggggcccctcgagggatactctagagcggccgcccttttnnnnnnnnnnnnnnnnnnnnnnnnnnnnnnnnttttccccaaagcactttaatgcattcaccaacccacagtccctgcccgctggctgggcaagagaggccagcccccatctggaggctcctatggcttcccacacctagtgtgtccaggaaggctgagcccgcacacattcccatcaataggtgaggggcgtgagaatgaagaggcggtcttcctctttgcggatccagcgcatcagcttatggatggcactgacggctgacgccttggtccccagggggctgtaacacatgtagtaaatggtcttgagtgggcgagaggcattgtgggcacgactgtgcaagtactggtagaggcccagcagccgctcctgctcctcttcactggtgtatggggcctcaatctcagggctggtgaagagtcccgagctttttgacttataggaggaagtgacgcaggtcagggatgcccacttgggcaacgctgtagtagggtgtgcgcagtgcctctcgcagggccaggtgggtctccgcgcttgcgaaaggcgctcctggaaggcggcggcggcaagtcagagacttgcaaagaagtcctcacggtcagtggagacaagcagcaggcagaggtcagtgtcaggctctaggtaagagatgtgtgcgtggaagaagccggctgcgttgaatttgggcaggcacacgggcgtccaggcctcgccctcgcgaaaggacgaggaggaactaatgaggttgaagagcaggtgcaggtcgatggggtgcagaaattggtcctttcggcgcacgagtgccacgagctggttgcgggccagcaggatggagaagaccaggctgcgcgcacgcgcctgctgcaggctggcgctcacagtgtcgcgcacggccgccgccaggggcaggcaccgtgccgcccccatcaggaagctggggtctcgtgccatgagctgcagcaggttgtcggtgatgcgctctgagcccgagagtaggcgccgcaaatcatagttctgcttctgctggaagatgtggctcagctgcgcaccggtaagaaggcttaggatctggtagtagatgtagagcagctcctgcgccagctcttgtgccgactgccgcgtacgagccaccgccactagcaccagcgggctccggcgcacgaatactaccttgtagccatctgagagcgggacaggaaagaaggatgtcagcctcagcggcagctccctccgaaaaccgccttccagcgcagctcttcgctttccccatcctttcccctcgtgccgattcacacgcgagcctccctgg

SEQ ID NO: 130357 - DNA, 1124 bp, Homo Sapiens
  misc_feature (896)..(944): n is a, c, g, or t
ttttttttaggaaactaggattgttgccaccaccatttatttatctagttcataactaaggatagaacactatagcagtgctagagatgcaaagacgtccctgcccttaaggggcttacaatcttactggagaatataacaggcacataagaagctggactacaaggaagcatgagctaacaaatgccagacttcggaaggcagcgtagtttgagaacatgggattcagagtcacaaaacccacatcctagtcccaacccagtatatcagttaacctctctgggttttttcccagctacaacattaaatagtaagactgagaggctgtctgcatgtttccatcatcattcagatcaaaagctgagatgagctttagggaggaggctgcacctgagcgggacactgaaggaaggcaaaggaggtgtttcagacaagcaaagcagtactgaggtagctgtaagcttggagtttggatgggagacgacagacaagtgtcacaaggagcaacggcagagaggtgggtgggtggcaggaagcgccacaacactttccacacaggggtgggtggtgcgcctcacatttacagccgatcatttacagcacataattccagagagtagaaaataccagaggataatggcggcattttttcaaacatttcacttgatttccataaagtataaaataatttaacattatacctctacatttcaaaattcacatcaataaaccatcctaattgttaaaatgcaaaccaattcaaagtttacattcttagtaaacataactaaatctcttaattcaaaaggacatttgatacaaattatattactccaataattccaacattcattttccaccatgttccaagcactgtgaaaataaaaatgactatnnnnnnnnnnnnnnnnnnnnnnnnnnnnnnnnnnnnnnnnnnnnnnnnngatcaactctgcctacctagaacggaattactgtgatgcacagcctgatcaaggtacgagccgtggagcacaaagacggattcatccttcctgaagtttccacaggggctcaggagagaggtcttgggcacaagaagaaatgagtttggcagagagaaagtgactatgggaggagagggc

SEQ ID NO: 130358 - DNA, 3510 bp, Homo Sapiens
agcagtagcaaaaccatttattaagtgcagaacaaaggctgggtccttgtgctgctcccagctctttggttacaaataggtttgggcccacagaggacggaccttgcccccttcatgcctcccaggagacacctagcccctgctctgtgcatgcgggtgggctgggcccccaggggtgcaaggatggagtagctgaggaggctccgggagaggagtcgggaggacgcctagtgggacatggcgggggtggggcagggtgcggtcaagtttggaagaactgttggtccatgtgggtgctaagggttccgctggtggtcagtgtccggctcacaaactcctgggtcacatgccgggtgagggagccgcctgcctccaggtgctgggcccccagggtcggcccatccactaggaagggctcggtggcgctggtgtgggtggtggtgatgctgctgtactcgctttgcagcgggtgctggaagagcccggcacggctgcccagctgcgggaagggtcctccatcctgggactctatggtgatgatgccctcgcgctctggcccgaagccctcagtggtcctggcctgcaccttgaacttgtagggcacgttctcgctgaggcccggcacggtcagccggctctcggggctgtctccatccacccggaatgcggtggctggccctcctccttgggccatctcacaggtcaccaggtagccgacgatatccccattgggcctccgtggccgctcccagctcagctgcagcgagtctgggctcagggcagtgaacaccagcgggcctggggcactgggagtgctcaaagtgaaggcggagcctggcaggggacacagtgggctctgcgggtgcacctgggattcaatggtgatgacaccctcacgctctcggccccagccttcctggctctgggcccgcacgcggaacacgtaggagtggttgggcaggaggtcttccaccaccaccgaggtctgggcagggttggggatgttgagccgatgcagctcaccgccgttcagcagctggtactccacactgtagccctgcagcggccgctcgcaccgcggctcctgccagctcactctgagagatgtgggccccagggcagagaacaccaggcgggtgggcgtgtcgggcacaccagcagtcaggcgagagtctgggccccaggagggcgctgctggcctcccagccaggattatagagtctcgtgggcccctggaaggggggaaccctttcatctgagcccgactccgggaccccaggcccaggacagcggaagcctgctccttcccgtgttcccagatgggagggagcccgtgggaggagacggaggtgagggtggagtagtccctcggcagtgtgctcgagtgtgagtgttctgagcgggtcagtgacttgtagtcccgtgtgagggtggaggatgtgcttagcacgcggtggggcacgtgtgggctcaggtgggtgccataggcagcagcactggtcgtggtcatcctgtgcagggagttggtgctgcccgggaaggcaaagtccatccggccattcaccaggtgctcagtgtcatcggagacgctgggcctctggctgcccgatggagagcgtagaacgtcatcgctgtacataaggaagctgtcgtagtcctccccgctctgggcgtccacgatagggatgtcagggatgatggggatggacatgggcctcttgggctgggtggccaggttgatgatggcctcccgctcaggcccccagccggccccgttgcgcgccttcaccgtgtagcggtagggctgggactcccgaaggttctcaataagcagcatccggttcttagggttgtcaaccagcactttcttcatgggcccaataggtcggttgtcatcgttgaccaggccatagcagacctcgtaggctgtgatctcaccgttggtctcagccggctcagcccagctcagctgggtcaccgtggaggagacgacattgaaggccagacgccctggctcgctgggcacttcctggtgggtgcggcaggacaccagggagctgtagggtccctcgccctgagccccgtaggcgcacaccttcatctcatagtcgcaatacgggtacaggttggtgagctccactgagggcaccttgctgtcgagcaggtgggcttcggattcggagtcaccctgaatccagtactttaccctgtaccccattggcttgccagaagggggcagccagttgaaatggatcttcctggacccagcggccttagcattggggttctgcggggcgcccaggtcgccgtgagggggtggctgtgatgacaacatctgactcgtgaagctccggtccagttcatctgggtccctgatgatgatggtggtggagtggggctggcccaggtgggccccaaacttagggttgctgagctggacgtggaaacggcggacctggcggccccgcaggagggagtcaacttcttgcagctccaggagcttcacctgcagctctttccaggcctccccaggctggaacagcagctcaccctccacggggatgtagtcccggttgccctgcgcggtgccatcctgtgtgcggtaggagacctgggacttcccgccgtccaggacacgccggatgacagggatgcgggccacctggtccccgcggctgaccgagaactcaggctgctcaaaggacaccacgtctctggcttgctccttgatgatggtgatgtttaccaggcggcggccgagggtggcagtgcctgcgggcacgtcgatggcctccaccagcagctgcttctcgtcgtcatcctcaggccggataaagaggggcacccgtacgtccaccagctccacgccctcctggaactccaccatgccccgggcgtcctggtctgcagtgagggtgtagtagccgggggccaccttgaggtcgtggaaggccctctgttccacctgcttctctgtaagcttcagcagggccggcttggccgagcggggcgccatcagcactgtgtccacaatggtgtggtcttgctttttcccggcattgggctgctgccggaacttggtctgctggagcttgtgtacaccggagatctgcctgtagacctcgttcaggttctcctccacctcctggcgcagctgggcgcactcccgagtgtcaggcttcagcaggttctcggtgcaaaggcgggccaggcgcaaggacagcccgtagggcaccagctctgtggggttgatgctggcggcatgagtggcaaagccaggccgctgcatgttgttggtgaccttccagcggaccacgtcacggcccttgaggttcccgctgcgcagcatgggcgtgtccaagtggtcagaggccatcaggttctcccgcagcatgtagtggtcttccttaaagcccaccatgtgacctcggttgcagcacgggagaagtgccaggcaggccttgcagcaggccctcgtgcggaattcgccacccaggcctcgctaccttg

SEQ ID NO: 130359 - DNA, 1096 bp, Homo Sapiens
cttttgcaggtttccaggagttttcccttgcagtttttttccaggcttccccaagggtgggaccagcaggtcacccttccacgggggatgtagtccggttggcctgcgcggtggccatcctgtgtgcggtaggagacctgggactttcccgccgttccaggacacgccggatgacagggatgcggcccactggttccccgcggctgaccgagaactcaggctgctcaaaggaccaccacgtcttctgggcttgctccttgatgatggtgatgtttcccaggcggcggcccgagggtggccagtgcctgcggggcacgttcgatggcctttcaccagcaaggttgcttctcgtcgtcatcctcaggccggataaagaggggcacccgtacgtccaccaggttccacgccctcctggaactccaccatgccccgggcgtcctggtctgcagtgagggtgtagtagccgggggccaccttgaggtcgtggaaggccctctgttccacctgcttctctgtaagcttcagcagggccggcttggccgagcggggcgccatcagcactgtgtccacaatggtgtggtcttgctttttcccggcattgggctgctgccggaacttggtctgctggagcttgtgtacaccggagatctgcctgtagacctcgttcaggttctcctccacctcctggcgcagctgggcgcactcccgagtgtcaggcttcagcaggttctcggtgcaaaggcgggccaggcgcaaggacagcccgtagggcaccagctctgtggggttgatgctggcggcatgagtggcaaagccaggccgctgcatgttgttggtgaccttccagcggaccacgtcacggcccttgaggttcccgctgcgcagcatgggcgtgtccaagtggtcagaggccatcaggttctcccgcagcatgtagtggtcttccttaaagcccaccatgtgacctcggttgcagcacgggagaagtgccaggcaggccttgcagcaggcacagtacttccagcatagcagcagtagcagggccaggagcggcaggaggaggaggagcagggggatgagccaccagaaggagccc

SEQ ID NO: 130360 - DNA, 646 bp, Homo Sapiens
aagacatgatcgatcgagccggtaccgaacgggtgatgcggttgagaaccttcgggagtccagccctaccgctacacggtgaaggcgcgcaacggggccggctgggggcctgagcgggaggccatcatcaacctggccacccagcccaagaggcccatgtccatccccatcatccctgacatccctatcgtggacgcccagagcggggaggactacgacagcttccttatgtacagcgatgacgttctacgctctccatcgggcagccagaggcccagcgtctccgatgacactgagcacctggtgaatggccggatggactttgccttcccgggcagcaccaactccctgcacaggatgaccacgaccagtgctgctgcctatggcacccacctgagcccacacgtgccccaccgcgtgctaagcacatcctccaccctcacacgggactacaactcactgacccgctcagaacactcacactcgaccacactgccgagggactactccaccctcacctccgtctcctcccacgactctcgcctgactgctggtgtgcccgacacgcccacccgcctggtgttctctgccctggggcccacatctctcagagtgagctggcaggagccgcggtgcgagcggccgc

SEQ ID NO: 130361 - DNA, 719 bp, Homo Sapiens
ctattggatcttgggagttttctttgtttgctcctgtgtttgcccagctttaataaaaccaggcgcaaacaaaaaccatagcattctgaaacaatagggggcccacattggacccagtatgtcactttaatggacttcaagaaaaaatctgaatgggaaaaatgacactagaatgtatactccacacattttatgccatataatggtgtgttttcttaattttgtttcttgtggcgaaatgtggctttcaaattaaaatgaccttttcttctttgaaactttttgttttgacttgtataattaagggtttggaaagattcataattctgagagaggtttgcaaccaggagatacaaagaagtctcagtagtaatcttgttcatgtgcttttacagccagctacatttaagaatgtattagttacagaaattatatgtctgtgtatgtgtctctactcaataaagtacatgcctccacataatgcggtgctgtccatctcggcaaatactggccaagtccctttatgacaggcacacagaaaccatagcatggtctggctttcagaaaatgcctctcatctttcctggaaccttattttgctaaatgtctgttttcttgtgatttgttgtacctcacagcaccattgtgaccatggtgatgcctcatttgcatgatatgtaccttgtgtttaatgtgaaatacattttcattgaagagtc

SEQ ID NO: 130362 - DNA, 987 bp, Homo Sapiens
  misc_feature (700)..(700): n is a, c, g, or t
  misc_feature (756)..(756): n is a, c, g, or t
  misc_feature (870)..(870): n is a, c, g, or t
  misc_feature (910)..(910): n is a, c, g, or t
attttaaaatagaatttattgaataccatagtatattaaatacataaaaaattgtttttcttgtcagtattggcacataatgataaagtactgctaaattaacacttcaaaaatttcaaattttaaaacattccataaaaatataaagcctagtagtgttataaaagtattaatttacactaacttacatatcaaagtgttaaaaaagaaattccacactcaaaccaattatctgagaagtaaaaattcaatcatgttttaaaaaatgttttcatttgaacaaaatgcaacagaaggtataaaacaggcaaaaattacctaatttacattgacttgtcctactagaaaatgttgcaggttaactttagacattaaaaagattcatattccaaaggaatagaaaagctgtttgcaatactttttatgcctaatcaaagaaccacataatgacattttgtgggttgctccttaattgccagtaatggaggactactataaaaatttagttttaaaaataatttttctcccaatgaacatttttatatgcagaggctgtcctcaatatggaaagattaaacgaggacatttatacttatgatcttcactataatatggcctatatattaccctgtcaattttttttcactctgaaaattcaataatctagcatatgagtattacagtagaggatcaattccanaaggttgagtatttgatcagatctctgacttacagatactttcctcaggaatgtanaagtattgatttagttagaatctaattccttgagaggcactgctattcactaagtggagtgatcatatcaagaacatcaagtcataagctcaatcctggtcaagactccactancataatcatgttctctgcgatctggctccagcaatctaangatcataatcgacagtcatgttcggtgatgttcgccatcaaaaaacacgggaaattaacggggcatatgtacatatc

SEQ ID NO: 130363 - DNA, 1881 bp, Homo Sapiens
ttttttttagtaactatggctatgttgtaacaattttattttgatttttaaaaaaggaatctcttgatttaatcagggctttggggtcatagggggattagtcactgtcacagtcataataatgcatttattcagggaaaactttaattttctttgtcttctccaaaaacagctgctggaacacctcaaattaagggatgttcatctaaaacacctttactgaaacttgattccttgggccagaggaaggtctttactgtagttgatagtacaagtagaccttctcatgtactgtttccaggcatcactgccagactccctgccaccaccagtgtgcttttctcctccaaaggcacctccaatctcagccccacttgttggaatgttgacatttacaatgccacagtctgatcctttaggtccaagccagcgaaagattctgcccagatctttggtaaagatgctacttgaaagtccctgttttacttcattattccatgcaaagacctcttcttcattcttgaatttaaagacatagagaatcggagcaaaagtctctgtgtgtgcaatggacgcatcgtggccaagacctgtcacaattgtcggttctacataatttccagggcgatccataaccttgccccccatagaccactgtgccaccttctttctttgcttcttccactgctccaagaaacatgctcactgcctgcttggtgtggagtggcccatagagaacattagggtcccatgggttcccaactcggatctgtgcataggcctttttaagtctgtttacaacctcatcatggatgctttcatgtataaacagtcgcctcgcagtggtacacctctggccagctgttcccacagcagcgaagagagctgatggaacaactaagctgaggtctgcatcttcaaaggcaataatggcattgtttcctccaagttccaacagacttctcccaaacctctcctgcaccatcaggcccacctgttttcccacctgagtgctcccagtgaaggacagcaggttcactcgttcatctttggccattgctgtgccaatatctgctccaccacaagtcaaggaacaaattgcaccaggcagcttgttgtcctccagaaccttggctattatctttgtgacagccacactaatgagggaagtggttggagctcctttccagaggcagacatttccacagatcatggcgatggcgttgttccaaccatacactgccacagggaaattgaatgccgtgatgattccaaccaggcctacgggattccactgctcaatcagtgcatggccagatctttcagaaggcaagataggtcctccaatcatccttgataaaccaacagcatagtcacagatatccacatactcctgaacttcacccacaccttccactaagattttccccatctccaaagacaccaagcttcctagtacttggatcttctcccgcaaggcatcgccaatctgtcttactatttctcctcgttttggagcaggaatatctgcccagattttccatgcttctcttgctttctttacagtttcttcatagtctgccacactggcctgtcggactcttgctattggctcgttgttagcagggcaataggtcgtaataacctctccccggcctccccagcttccattatacacgccctcgttttcctcgcggagccccagctctttcagccacgcatactggggctgattgatgaggagagtggacatgaaggcggcaggcctgctccaaggtccagagagcttgctggtctttgcagcgtgcaccgggacgcgtgggtcgacgatatcccggaatccgagcgtacagcctgctttttacgccgggtcatagtaca

SEQ ID NO: 130364 - DNA, 880 bp, Homo Sapiens
  misc_feature (81)..(81): n is a, c, g, or t
  misc_feature (84)..(84): n is a, c, g, or t
  misc_feature (98)..(98): n is a, c, g, or t
  misc_feature (859)..(859): n is a, c, g, or t
ttttccccactgagtgctccccagtgaaggacagcaggttcactcgttcatcttgggccattgctgtgccaatatctgctnccncccaagtcaaggancaaattgcaccaggcagcttgtgttcctccagaactttggctattatctttgtgacagccacactaatgagggaagtgttggagctcctttccagaggcagacatttccacagatcatggcgatggcgttgttccaaccatacactgccacagggaaattgaatgccgtgatgattccaaccaggcctacgggattccactgctcaatcagtgcatggccagatctttcagaaggcaagataggtcctccaatcatccttgataaaccaacagcatagtcacagatatccacatactcctgaacttcacccacaccttccactaagattttccccatctccaaagacaccaagcttcctagtacttggatcttctcccgcaaggcatcgccaatctgtcttactatttctcctcgttttggagcaggaatatctgcccagattttccatgcttctcttgctttctttacagtttcttcatagtctgccacactggcctgtcggactcttgctattggctcgttgttagcagggcaataggtcgtaataacctctccccggcctccccagcttccattatacacgccctcgttttcctcgcggagccccagctctttcagccacgcatactggggctgattgatgaggagagtggacatgaaggcggcaggcctgctccaaggtccagagagcttgctggtctttgcagcgtgcacacacagcgcgcgaggaaggcgcctcgtgccgaattcacacacccangcctcgctacctagcactata

SEQ ID NO: 130365 - DNA, 1584 bp, Homo Sapiens
  misc_feature (707)..(721): n is a, c, g, or t
  misc_feature (908)..(930): n is a, c, g, or t
  misc_feature (960)..(1492): n is a, c, g, or t
  misc_feature (1506)..(1506): n is a, c, g, or t
  misc_feature (1508)..(1508): n is a, c, g, or t
cagtagtgattctgccaaagttggtgttgtaacatgagtatgtaaaatgtcaaaaaaattagcagaggtctaggtctgcatatcagcagacagttttgtccgtgtattttgtagccttgaagttctcagtgacaagttttttctgatgcgaagttctaattccagtgttttagtcctttgcatctttaatgttaagacttgcctctttaaaattgcttttgttttctgcagtactatctgtggttaacaaaatagattatttctctgctttaatatttgatatcttacatctaaaataaattctctccacatataaaacccatagcctttggagatatggaaaatggtatctttcagatttctagaagttcaagtgtcatacaacaaaacaggaaccccctttactcttatggacctcatttcaatatactgtttacagtttgatggaattgtataatttaatatttctcttgtactgtagtttatatttatttacagatttttttgtactgtgtgatttgaactttttgttccttgctatgatcaatgtttatgtagtagagcacttatgatcacaaattaagttttttggtttgattgcactacattaaattttttaatgcagttctgatttttgactggactaaaactgtgtcttaatgtatgtgatgagtacttaaaattttaatccatgtggtccccccccnnnnnnnnnnnnnnngcattgtatgtcaaaagcgcttgttctttcgtgcatgtgtaagatttaatggttccattgtattatttgaccatgacattttggagaaacattcccagctgtaatgttgtgtatggtagttctcactggatgctagagttttcaaaaccactattcttctaataaattttgttgtgaaaaactgttnnnnnnnnnnnnnnnnnnnnnnngcctacagccgccctcgtgccgaattcttnnnnnnnnnnnnnnnnnnnnnnnnnnnnnnnnnnnnnnnnnnnnnnnnnnnnnnnnnnnnnnnnnnnnnnnnnnnnnnnnnnnnnnnnnnnnnnnnnnnnnnnnnnnnnnnnnnnnnnnnnnnnnnnnnnnnnnnnnnnnnnnnnnnnnnnnnnnnnnnnnnnnnnnnnnnnnnnnnnnnnnnnnnnnnnnnnnnnnnnnnnnnnnnnnnnnnnnnnnnnnnnnnnnnnnnnnnnnnnnnnnnnnnnnnnnnnnnnnnnnnnnnnnnnnnnnnnnnnnnnnnnnnnnnnnnnnnnnnnnnnnnnnnnnnnnnnnnnnnnnnnnnnnnnnnnnnnnnnnnnnnnnnnnnnnnnnnnnnnnnnnnnnnnnnnnnnnnnnnnnnnnnnnnnnnnnnnnnnnnnnnnnnnnnnnnnnnnnnnnnnnnnnnnnnnnnnnnnnnnnnnnnnnnnnnnnnnnnnnnnnnnnnnnnnnnnnnnnnnnnnnnnnnnnnnnnnnnnnnnnnnnnnnnnnnnnnnnnnnnnnnnnnnnnnnnnnaagcgttcccctgnanctcctcgtgcgtctctgttcgaccctgcgctacgatactgtcgctttctcctcgggaggtgggcttccatactaag

SEQ ID NO: 130366 - DNA, 699 bp, Homo Sapiens
  misc_feature (143)..(198): n is a, c, g, or t
ccagaatgcctttattttcagtatcatagaatttaaatacagagtcaaaagatgatttataaaatataaaacattttctgcttggccgtatttgaagacaagctgaatacatatctatgttctgaataagtccactatggatnnnnnnnnnnnnnnnnnnnnnnnnnnnnnnnnnnnnnnnnnnnnnnnnnnnnnnnnttctgcatgtatatatacataattctttctatagttacaggaaatacttcttctataattctgattttgactctcatcctccaccatttactcatccactcattacctaaatcttggctttctttcctatattgtaaataatccatccaaacttctagccagtactgtcaggagggttcttgctcgagtgagctgttaatactattttccactgacaacttctgcacatcgaggacacagtgtatctgaagactccgctgtatacttccaacaacgggggcatttttctttcgtagtcggcatgacaattactttataggaagactcttcacgaatatcaccaccttctaagttgatgaggaatttccctttaagctcgattacatctgcagtcatctctcgtggttcctgagccagtaaagttgactcagaagccatcattaattcattcaactgagaggtgctgggagtctcttcagactgcagcatctctattatctc

SEQ ID NO: 130367 - DNA, 1305 bp, Homo Sapiens
tccacagcttcttccgacccgggctttttccagattagaactagtactaatccacccagtacggaaaacactcttgggctctttaatataaggtatgtgctggaacacctcttcagccaggtgaggaagaatgggagcaaaagaacgaactattacatccccaaatttcaactaatgcagtctgacaagagcgtcgtttggggtcattttccttttcacaatagagcctatctttgattatactgaaataaaagttagagagctctctggtataaaacgtccgtaacagccgaacaacttttccaaaatcatattgtttgtataattcggtaatcttgtttgccaaatcctgcagtaagtgtagcatgtactggtctatgacatacatatcgtttacagggatggaatctgtttctgggttgaaatcagccacatttcccaaaagaaagcgaagtgtattcctaagcttgctaatatcatctctggcagcattgagcacggatgggccaattgcaacttcggtgaagacattggaatcagctacccaccagcgaaggacatcagcaccatacggaggctctttgctttgatcttgtcctccattaacgacaacatcaggatgaatgacattcccaagagacttggacatcttttctcccttttctccaagggtaaatccatgaacaatcactgtcttataaggtgctctcttccttgctgccacacttgttaataaggatgactgaaaccaacccccgagctggtcttttccttccaagtacaaatctgctctttggtcaggacctggaagaacataagaccatgaagttccgctatcaaaccagatgtccaaaatatcctgacctggcacatattccaaggcatcagggccaccaacctcagataagacttcttttggaagaagttgttcagggggaagagtccaccagatatcactgccgtgttgttccactagtttaacaatatgctcagtggtttggctgttgatcaagtattcatccttggtcttatgatgaaacacaggaattggaacaccccaaactctttgccttgatatacaccaatatggccgcctgtccatcatttcaaccatgccattcagtgctgatccaggaataaatttcaccttttttaacaattccttggctgcagtcttaatatccgtgatgtttataaaccactgcttgctggcacgaataaccacaggtttcttggtcctccagtcatacggatagctatgcaccaatttctcctctttcaacaaattctttgcagtctgaagca

SEQ ID NO: 130368 - DNA, 1583 bp, Homo Sapiens
  misc_feature (1030)..(1030): n is a, c, g, or t
  misc_feature (1249)..(1249): n is a, c, g, or t
  misc_feature (1317)..(1317): n is a, c, g, or t
  misc_feature (1476)..(1510): n is a, c, g, or t
tttttatttttccagaatgcctttattttcagtatcatagaatttaaatacagagtcaaaagatgatttataaaatataaaacattttctgcttggccgtatttgaagacaagctgaatacatatctatgttctgaataagtccactatggatatatataggaagagatatacatatatccatccacagatacacacacacatatatatttctgcatgtatatatacataattctttctatagttacaggaaatacttcttctataattctgattttgactcccatcctccaccatttactcatccactcattacctaaatcttggctttctttcctatattgtaaataatccatccaaacttctagccagtactgtcaggagggttcttgctcgagtgagctgttaatactattttccactgacaacttctgcacatcgaggacacagtgtatctgaagactccgctgtatacttccaacaacgggggcatttttctttcgtagtcggcatgacaattactttataggaagactcttcacgaatatcaccaccttgtaagttgatgaggaatttccctttaagctcgattacatctgcagtcatctctcgtggttcctgagccagtaaagttgactcaagaagccatcattaattcattcaactgagaggtgctggaagtctcttcagactgcagcatctctattatctcaaaaagcagtccaggttctatcacagtgataaccttgtactcagctgcatttttgccagggatgcttccaagaaatgagtctcgcattgcacacgcactctccacagcttcttccaacccgggctttttccagatagaactagtactaatccacccagtacggaaaacactcttgggctctttaatataaggtatgtgctggaacacctcttcagccaggtgaggaagaatgggacacaaagaacgaactattacatccaaaatttcaactaatgcagtctgacaagagctctcttgggtccattttccttgttcacantagagcctatctttgatcatactgaaataaaagttagagagctctctggtataaaacgtccgtaacagccgaacgacttttccaaatcatattgtttgtataattcggtaatcttgtttgccaatcctgcagtaagtgtagcatgtactggtctatgacatacatatcgtttacagggatggaatctgtttctgggttgaaatcagccacatttcccanaagaaagcgaagtgtattcctaagcttgctaatatcatctctggcagcattgagcacggatgggccanttgcaacttcggtgaagacattggaatcagctacccaccagcgaaggacatcagcaccatacggaggctctttgctttgatcttgtcctccattaacgacacatcaggcccggccgtaatggccgaattcccgggcatatgtccggtaccgtcgactgnnnnnnnnnnnnnnnnnnnnnnnnnnnnnnnnnnncggccgcttcctcgctcactactcgctgcgctcgtcgttcgctcaacgagctagcccctatatgatctatcat

SEQ ID NO: 130369 - DNA, 415 bp, Homo Sapiens
  misc_feature (140)..(198): n is a, c, g, or t
ccagaatgcctttattttcagtatcatagaatttaaatacagagtcaaaagatgatttataaaatataaaacattttctgcttggccgtatttgaagacaagctgaatacatatctatgttctgaataagtccactatgnnnnnnnnnnnnnnnnnnnnnnnnnnnnnnnnnnnnnnnnnnnnnnnnnnnnnnnnnnnttctgcatgtatatatacataattctttctatagttacaggaaatacttcttctataattctgattttgactcccatcctccaccatttactcatccactcattacctaaatcttggctttctttcctatattgtaaataatccatccaaacttctagccagtactgtcaggagggttcttgctcgagtgagctgttaatactattttccactgaca

SEQ ID NO: 130370 - DNA, 1630 bp, Homo Sapiens
  misc_feature (243)..(301): n is a, c, g, or t
  misc_feature (371)..(387): n is a, c, g, or t
  misc_feature (718)..(758): n is a, c, g, or t
gtcttttaaaaattttattacacaaatatcacccattcccacgtgtcagaggaaagatgtccttgctctctctaaaaccaatagtggagaacttttggaaaacaaaacaaagtccaactagcttcctccttctctggcccaaaataacctcaatgtcaactgagatagcataagacttatccccttaatgcttacatttaatttaaactttttagcacaacattggagattgactctaaatcnnnnnnnnnnnnnnnnnnnnnnnnnnnnnnnnnnnnnnnnnnnnnnnnnnnnnnnnnnncctttaaacataagtgactttaggagttttatttatggagcagttatttttttaatcaccaagtgatttnnnnnnnnnnnnnnnnnaattttcttcctttcctttgtggtttttcgccccggtgcttggaaagatggaggcaggggttctggtcctgcagtctgagggcaggctctcctggcaaggccgtgtctaagagcagattgtaggacatgcgatggactccccaggttcctctgtcccccaacagagacacttctttcctccacatggaccaaccctcacctctaaaaaccatttcccctcacagtcccaaagaaaaggaaaacccagcaagggcatggtccatctgctgccttttctgggctcccttttctgctgaccaatttacgtgcacggtaaaaatgcatgtttttnnnnnnnnnnnnnnnnnnnnnnnnnnnnnnnnnnnnnnnnnaaaccattggcttggaaatttctgtggatgaaatgtcccaaagtcagaggcactctcccggcacaatccctgctctgaaggggtctctccacctccccttttataaaaagacaacaaaataaaacaaagtaatcttttcagtattttccacaggagcaaccaaagaaaaaggcaggaagcttccaattataggtcattaacgataataaggtttttgctcaatacccagggttctttacagagaagttcccctaactgaggcactctggaataagtcactggcatttcctcaaagtttcaaccccagattattggggcctggagaccaatggaagtgggcagagggtcatgggagcagactgctgtttgtaaggtgcagtcaaaagattcagcagattggaagaaacaaacaaaatgccaccccctaccaggatccagtttcttctaaggccagttaatgccagggtcaaaactggcctaggtggcaaagaggggaccactctgcctctattgctttggaagtggcaagggtgcagttggcgtctctcttctcagtggctcacactttagacccctggtgcctgggctccattccctaactctgtagggcttcaggaagaggaaagcctgagactgggctacaggaagagggccagaaagggacagggatggacgaccaaaaggcggggcggggtggggggaagaggttgtgctatcagtatccttacagagggggagcagagtgcaaatttgcatcaatcatttataagctcttgccataggctgctgctactgagcatctcctcacacacttaaaaatattgacccaaaagaaattccgacctttctttctttctttttttcctcgtgcc

SEQ ID NO: 130371 - DNA, 1385 bp, Homo Sapiens
  misc_feature (149)..(150): n is a, c, g, or t
  misc_feature (152)..(167): n is a, c, g, or t
  misc_feature (169)..(217): n is a, c, g, or t
  misc_feature (219)..(224): n is a, c, g, or t
  misc_feature (226)..(226): n is a, c, g, or t
  misc_feature (228)..(249): n is a, c, g, or t
  misc_feature (251)..(297): n is a, c, g, or t
  misc_feature (870)..(880): n is a, c, g, or t
  misc_feature (980)..(1085): n is a, c, g, or t
  misc_feature (1095)..(1095): n is a, c, g, or t
  misc_feature (1110)..(1336): n is a, c, g, or t
gattcaacccctcttgttttttgcgcgggttttttctgtggaaaacgataatatgggcccgtgtttctttcggcgggggggccgcggcggccccacaaaaatgttttgaaaaaaatttttttagggggaaaagagccgcccccaaaggnngnnnnnnnnnnnnnnnngnnnnnnnnnnnnnnnnnnnnnnnnnnnnnnnnnnnnnnnnnnnnnnnnngnnnnnngngnnnnnnnnnnnnnnnnnnnnnngnnnnnnnnnnnnnnnnnnnnnnnnnnnnnnnnnnnnnnnnnnnnnnnggcactaatgctgcttttaatggcggcgcaatagagaagtacaaggttttactagcttgagctactagaaggtgtaaaagatgcccgctgacactaccaagtagcctcttaatagaaatgtagaaaatatacaggacagggtggagatgagctcttgaatttagtagggtgaaagagttaactgccaacccggcactatcattgtacttgtttggagaaaatctgttttgttctggtgatgatggttttatcttcccttttagttgggtgggaagtaacagaaaatttgtttccccaaaagtttgacattttcttgttaatacacgtttcatttcagtacgatgccaactgttaagcctgcaggaatcctcctgggtatttctgaattgtgctgtgtgcatgtgtgtttgaaagctcaaacagcttgtcttcttacagcatcgagttgtttgctttattgttagacacaatattagcagtgtatcctttccgtattccctaccatcgaacccattaagatctaaaatccttgtcaagtatctggctttaaaagttgggagatggtagtttaannnnnnnnnnngctcttgcaaaaaccatccagtccctaagcatgggctatgttgcagcctcttccagaacagtttccactgcagtgatcttcctcgtgccgaatcttgggnnnnnnnnnnnnnnnnnnnnnnnnnnnnnnnnnnnnnnnnnnnnnnnnnnnnnnnnnnnnnnnnnnnnnnnnnnnnnnnnnnnnnnnnnnnnnnnnnnnnnnnnnncggagcatanagtggtaagcctggnnnnnnnnnnnnnnnnnnnnnnnnnnnnnnnnnnnnnnnnnnnnnnnnnnnnnnnnnnnnnnnnnnnnnnnnnnnnnnnnnnnnnnnnnnnnnnnnnnnnnnnnnnnnnnnnnnnnnnnnnnnnnnnnnnnnnnnnnnnnnnnnnnnnnnnnnnnnnnnnnnnnnnnnnnnnnnnnnnnnnnnnnnnnnnnnnnnnnnnnnnnnnnnnnnnnnnnnnnnnnnnnnnncagatcaggggataagcaggaagacatgtgagcaaaagcagcaaaggca

SEQ ID NO: 130372 - DNA, 664 bp, Homo Sapiens
  misc_feature (583)..(583): n is a, c, g, or t
  misc_feature (639)..(639): n is a, c, g, or t
agaagaaataatgtggtagtatttatttagggagagacagatgtgttgccatgttacttagtcatactagagagccagccaagtttgaataatgaaggtgcagacgtgttgtcttcttcactgacaagctgtctgaacaaggagccaggaactgtcggttcaccagctgtggagcttgccggggggacaaccccggaggattcctgcaggcttaacagttggcatcgtactgagcttttgtttcgatgtttcttggttgatttagcctttcgagtgcttgtcatgctcaagtgggagaagtccaaacctgatctgactggatccaagtggcaggatgttatggggttcttgggagttgaacgtacttgctccggggggcgagctgattctctgtaccagtcaccaatccaaacagaacagaagttcgctgcaccaggcgatgaaggttgctgttgaggtgtggcgtgaaaacgtccaggtcaaatggatcaatgagggcttccaggtggtcagtcactttctcaattctggagtctggcttgctccggccactcttcacctcgtcacccttggctgtcagaanaatgttgaggtaacgcagatcataaagcagctgcagcgcccggttctgggtgacantaaatgcaccttctttcttaatctg

SEQ ID NO: 130373 - DNA, 726 bp, Homo Sapiens
  misc_feature (642)..(655): n is a, c, g, or t
cagtaactaggggccacattccatcagtgaaactggaaagattggtgtggctgagaatcagatgagcagaggcacctttagaagaaataatgtggtagtatttatttagggagagacagatgtgttgccatgttacttagtcatactagagagcccagccaagtttgaataatgaaggtgcagacgtgttgtcttcttcactgacaagctgtctgaacaaggagccaggaactgtcgggtcaccagctgtggagcgtgccggggggacaacctgccattggatgtagagaaaagtgccttagagttggcctgagccctcctgcccactcgccctccgcgcgacgccactcggagtccacacggcacacacaagcggagctgacgaagcacgatggctctagtcagaggactttgctgtcggtccagatttgaagacggacacggaacagcatgagcctttgtgaccaaactagaatttggaaagtgaggactgtcttgggaaaagggtaagacacaggcacttctctccacagcctgctaacctaatgtgggcagaactgaaagatcactgcagtggaaactgttctggaagaggctgcaacatagcccatgcttagggactggatggtttttgcaagagcnnnnnnnnnnnnnnaaactaccatctcccaacttttaaagccagatacttgacaaggattttagatcttaatgggttcgatggta

SEQ ID NO: 130374 - DNA, 1268 bp, Homo Sapiens
ttttttttagaagaaataatgtggtagtatttatttagggagagacagatgtgttgccatgttacttagtcatactagagagccagccaagtttgaataatgaaggtgcagacgtgttgtcttcttcactgacaagctgtctgaacaaggagccaggaactgtcgggtcaccagctgtggagcgtgccggggggacaacctgagcttttgtttcgatgtttctggttgatttagcctttcgagtgcttgtcatgctcagtgggagaagtccaaacctgatctgactggatgccagtggcaggatgttatggggttcttgggagttgaacgtactgctccggggggcgagctgattctctgtaccagtcaccaatccaaacagaacagaagttcgctgcaccaggcgatgaaggttgctgttgaggtgtggcgtgaaaacgtccaggtcaaatggatcaatgagggcttccaggtggtcagtcactttctcaattctggagtctggcttgctccggccactcttcacctcgtcacccttggctgtcagaacaatgttgaggtaacgcagatcataaagcagctgcagcgcccggttctgggtgactggaaatgcaccttctttcttaatctgtttttcttcggagagtttctcataggcagctactacttgaaccatacagcttttcagcatctcctgtaatgtcacctttggcaaggcatggcctccaacccgattatttcctggcataaactaaacaggaaggactgtacataccaggacggctgtgcagggagtcggatcttggatgtgacactgctgccagactctgcctcctcctgaatttctagctcatcccagctggtggctgtggccagaactgagccagcatcatctagaagtaatgactgggtgaatccatgaatcaaaactttcacaagtgcactgctccagacctggtagcccatcacgctctgctggaggagtacttctttaacctcttgccacttggcctgtgtaggaatgatttcctgagttttcacctttccctgttttctcagagccctaaactcccttgctggtttctctgagctctctgattttcccaggatgcactgcttcagatgggggcacagctctcccagggactggcagagtctggccatgaaaagaactgagtgcagcttggcactgttgagggcatcctgttgcccttgcacaccttcttcaatgctctgtagctctgcccggagctgaggaccaatcgttg

SEQ ID NO: 130375 - DNA, 427 bp, Homo Sapiens
  misc_feature (62)..(62): n is a, c, g, or t
ccgggcgctgcagctgctttatgatctgcgttacctcaacattgttctgacagccaagggtntcgaggtgaagagtggccggagcaagccagactccagaattgagaaagtgactgaccacctggaagccctcattgatccatttgacctggacgttttcacgccacacctcaacagcaactttcatcgcctggtgcagcgaacttctgttctgtttggattggtgactggtacagagaatcagctcgccccccggagcagtacgttcaactcccaagaaccccataacatcctgccactggcatccagtcagatcaggtaaaggctgccaagaggcttctgcggggcacttcgggaggccaaggtggacggatcacgtcaggagatcgagaccatcctggctaacatggtgaaaccctgtctctac

SEQ ID NO: 130376 - DNA, 829 bp, Homo Sapiens
cttacatcttcctcagtgccttcacaatgtaaatagaaatgaaacccacaaataatagcaagacaacttttctttactcctgttctctgtgcttttatcaaaaatgtaatattttaaacaaatccatggctatttctgtgcagctgtgaccagtagggaaaactccagctgctgatgactgtgctttgtcatatatttggagtaatcccattattattaaaataatttgaaaattatttttgccccaagacacaaaagctgaaatactcttttcacaaagtattattggtaggttagtagtgatttataaatatataattaggatttatttttctcagtgtttcttcattgcttggcccctttctaaccttcattgactgaaagcagatgtttatatcaccatctctgattttgcagaattgatctgtccttacactgcatttagcattgattgtgtatggaacataaattgcttttctgatgcatatgtattccatagctctttgaatttgtgactgtgtactataacctatttaattgaaaagaatgtgctaaaatttagtcattgtccattctgctaacaaaagcagttaaaacatgctagagaaatatatcagaattttaagaaagaggccggatttggtggctcatgcctgtaatcccagtgcttttgagaggctgaggcaagaggatcacctgaggtcaggagttcaagatccggctgaccaacatggtgaaaccctgtctctactaaaagtaaaaaaagttagtcgggcatggaagcgcatgccggctactcaggaggctgaggcacgagaattgtttgaac

SEQ ID NO: 130377 - DNA, 816 bp, Homo Sapiens
tttggtacaaatttgttaatttattacaaaattttcactcacagaaaaacacaagaaaacttttatacttttatatttgggaaaaggaactggtatctcagatacaaaataatttacacataagccatacaattttattttatatagaaataggtcattattacaacagctgtacaattcactacgcttcatcttataattacataaaatcttttctttagaaacatctcaacataacaaaacatacaaaaaaagcaaagtgcattttgaaaaggaaaatccaattctcagtattctcatgaagatatgtagaaagatgcagcattctcactcaaagggccagcatgtggcagggtctccttggggactgcagtcccccaggcctgtctggcttgtaaaacctctcccctcacagacttggagttctcagcagaattctggaatgttggctggcatgattgtgctttgctttgagtccacctttgtagttgcaatcaatgaagtaaacaggaaatagtccagtgttttatttaggggctaaaaaatcaccaccagcatggcctggggtgaaaagcctcatcccattagggtttaggccagaaagtgtgaatctgtagcttggttaataacaaccagcttctctgattggtgggctgctgttgttactgtggtctctgaatgaagccatgagaccttattattttttttaaaaaaacagaaagtacctaagttatttcctctgtgtaggtgtgcaaattaaaacaaaaacaaccatttaaaaataaagagatctctgacccagtccttctccaatac

SEQ ID NO: 130378 - DNA, 809 bp, Homo Sapiens
acttattcactcaacaatcatttattgtttgtgtgcaaggcactgtgttaggtgccaagagcagaaggaagaagatacaaatatgaatgggcatattctgccctccaggaacatacaatctaagagtgattaattgcatacaaataattgtaataccagataggaatgtggtaagtgccatgggagatactactataggaagctttcttagctcttaacttcaaagaccaggtcaggttttgtcctactgtagtctgtggcaggcatgaaaaggcagctgaggggacctgctaggctttgatgaactgagctgcatcttggatttcgcttcctcttctttctcagccgaggttacggtgattagcaagggcagttgctaccactataaagatacatgaagaagcagagcaagtggaaaccaagcttgatcatggcttctttcatgtgtgacttcagctgccctcgattgtgtatttctgttggatcaaacactcccatgttaccactcggcaccataatgtatcgatatatattccaagtggcaacaggtaagttgagaaggaagatgaaccagtgcaatgacatgagcagtaatacagtgacaatggtatggccaatcaattctggaattacccacttgtttaattttgagcaacatgatctagcattaatgtaatcacattctaaatcagacaatggtaattatgaagtagaccgagaggaagatgagcgcgcaacaatcgaggagagagaagacgaacaccaccgcctccatcctcctcctccgtcgccgccgctccttccgtccc

SEQ ID NO: 130379 - DNA, 1041 bp, Homo Sapiens
  misc_feature (443)..(512): n is a, c, g, or t
  misc_feature (773)..(773): n is a, c, g, or t
  misc_feature (784)..(784): n is a, c, g, or t
  misc_feature (848)..(848): n is a, c, g, or t
  misc_feature (956)..(956): n is a, c, g, or t
  misc_feature (996)..(996): n is a, c, g, or t
catgttttttaaatactttatatggtaaaaatacagcaaaaatagttttttgttccaagaggaaaatatatactgctatggtcacggttctaaggatgatttaagaagtctctggctcctcaactgtgcactgtagtgtaggctgacttcaaccacggcttctccagcttcagtcatttatcaaagctaagatcatactgtggaaagaagaaatgaatgtcactaatgttttctcaggaatgttcctacagagcctggtttgtccagacttgcgtccctaaggttcacaaaggaacaatcatttgagtaaaagacaatcattcatacccaaaggaaagaatatattaggatctttcatgtccaaactttttcactaaaaaagagtgactgggggtggggagttgggggaagtacaacttaaaacctatgttaggctatagttnnnnnnnnnnnnnnnnnnnnnnnnnnnnnnnnnnnnnnnnnnnnnnnnnnnnnnnnnnnnnnnnnnnnnncacctatgtccagaaaaaaacctttaaattctctagtcagatacatactgttctatgcctggaacctcttctccccatcccaccactccatcaaagcagtaacttcttactcaggttttgtgattggctctagggcacctcgttggggaagttggcctctcagccccgggcagttgcacagcctccttccacagctcttcttcctgctgctgtggcttacatgttgtctctacactggactatgagaactcttgagatganagcagggccangcattacactttcatgttctactagcaaccgggcctgcaattacaagttcaagcttttacgtanggggtctgtgctgctctctgtgtcactgcatgttgtcacatgtctgaacacagcatcaccaataatgtacgcactaaatgaacagttacatacaaacatctttccttngatactggatcagctgtctgctgaatgatgctaaaacaanatatctaatcactatgatatatgtcactcggcgatctggcccagg

SEQ ID NO: 130380 - DNA, 961 bp, Homo Sapiens
ttccccttaaaatttaccaataggagtgccaaccacaaaggaatttctttggccagcagcagtggtgtgacgaagacttcagtagaccctaagggcaccttgctccgctcatctttcagttgccctttaaagtgtgtcctttatttctttgcatgcaaacttgggatggcagtcctgttctgtacagaccaataaccaccgtcaacatacagaggatgaaaaacaccttcaagtgttggcgttcaggctaaagttgagaactagaaatctacagaaactcattcatgttttttaaatactttatatggtaaaaatacagcaaaaatagttttttgttccaagaggaaaatatatactgctatggtcacggttctaaggatgatttaagaagtctctggctcctcaactgtgcactgtagtgtaggctgacttcaaccacggcttctccagcttcagtcatttatcaaagctaagatcatactataaagatacatgaagaagcagagcaagtggaaaccaagcttgatcatggcttctttcatgtgtgacttcagctgccctcgattgtgtatttctgttggatcaaacactcccatgttaccactcggcaccataatgtatcgatatatattccaagtggcaacaggtaagttgagaaggaagatgaaccagtgcaatgacatgagcagtaatacagtgacaatggtatggccaatcaattctggaattacccacttgtttaattttgagcaacatgatctagcattaatgtaatcacattctaaatcagacaatgtaattatgaagtagaccgagaggaagatgagcgcgcaacaatcgaggagagagaagacgaacaccaccgcctccatcctcctcctccgtcgccgccgctccttccgtcaaacccccccggccgtaatggccgaattcccgggcatatgtccggtaccgtcgactg

SEQ ID NO: 130381 - DNA, 742 bp, Homo Sapiens
  misc_feature (447)..(477): n is a, c, g, or t
ttttaaattttagaatattttaatgtccatttcttcagtgaatgcattttgaaattattagaattaacaatttaaaaagagcagataaaaggatatatggaaaatgcaaacagtcggttcttgctaattcaatttcagattctaggcatgatgtgattttccaaacaaccaattaaaaaaaactccttacctcgaaaatctagaaattcaaatgcagacgtgtctttggaaactacaaatgattacagcccatgtgacaggaagcacgcggccttcggctctccggatcgtgtgcaaatgtgcagggggagcccccgcgggtgacgtcagtgtggatgaagtcacgggtgtggcagagcctgtggggctctcaagctattcgagggttttgtaactgatgctctacatttgtttgcattggataaaattgtgtgtgcttgtttaccnnnnnnnnnnnnnnnnnnnnnnnnnnnnnnnattcgatctgagctgggactgagaagaaaatagcaattgcaactcaaagcaactatttacacacattcaatgctgaagtattgcttcctgccctaagttcctaagaggtattgccaccctgaagcacgacccatgccgtcagcagccctcgtgccagctgcttagaaactcgtgtctccagcacgatgtgctcgctgccaacagacaagagatgcacggcgtttccgctgcagagattctgtggttctgcactgaggtatgcatc

SEQ ID NO: 130382 - DNA, 1368 bp, Homo Sapiens
ttttttccgtatgttcaaaatagtttttaatcataagctttatatacaaattgctgtacagtcatcttaataaagtgaaatagtgagtgaaaagtacaaaacacaaagcccccacgttccccttggtgaagtatcaaaggatcactcacagcccagaagccccaaattagtgacaaggtaagtggacaagtctgtgaaacaggctaaggcaagtgctgtaaactggctattagaggcgaacaggctccactgcagaccagaagcctgagttcctactgcccaaactggttctgtggaagaattaaatgaaatgaatattgatgggccagaaccttctagtagacctgcgaactcataaaaatggtatatattatgctaaaaatagtttagcagtagtgtagctcagtctctcccacccccaattaagtattgacaatacacaaattctaaaacatgaagctgtttaaagcattaataaactgtgaacatattgcactagataagtgaacactcctgtttctccaaatacatgagtgagttgcatttcccagcacaagcaggattaatccctgtggtacgcaaggagcaggctctgctgttccaagcgactcagtcctggtgaccacacgtactccaagctcagccccacgtagagttactggtcccgagattcatagaggagcttggcagccttgtgcatggccactagccacgccaccgcctgcctcctggcccacagtcacgtcctccaccactgtcagcttcagctgggtcacaccctccgtccccggcactgtatactgcaggaacatgcctgtggcccgtgcgttgcctcctccaggagggacgccttctgtgaggatctgcacgggtggaaatgtgtacaatttcgatttcatagtggctgtcgtccatccagaaacaagtatctctggttattggaaagacgacaagtcatagtttcaggtttctctgagtttccaaacgtgacgaggaaggtggctccgctcaggagcactttgagctgcttgtcgtagaactccgcctccttgagggacaccagggcgcactccgcgcactgccgcacggggtccacaaagcacatgcgccgcagcggcaccttctggctgcagcacctgtcgcagaagcacttcccgcagcggcgacagtggtgctttctggtgagaaagtcaaacttggcgtcacactgcatacatctccgacactccttgtccgggacccactgcggctcctccaggccgaacgggcttccgaaggcgcggtgttcgggcaccatgcgcaggccgctcggggagcgcaccagcttcttggcgtcgcggcgcgcgacacctcggagacatgacgccg

SEQ ID NO: 130383 - DNA, 979 bp, Homo Sapiens
  misc_feature (688)..(688): n is a, c, g, or t
  misc_feature (700)..(700): n is a, c, g, or t
  misc_feature (711)..(711): n is a, c, g, or t
  misc_feature (717)..(717): n is a, c, g, or t
  misc_feature (747)..(747): n is a, c, g, or t
  misc_feature (767)..(767): n is a, c, g, or t
  misc_feature (776)..(776): n is a, c, g, or t
  misc_feature (797)..(797): n is a, c, g, or t
  misc_feature (802)..(802): n is a, c, g, or t
  misc_feature (820)..(820): n is a, c, g, or t
  misc_feature (823)..(823): n is a, c, g, or t
  misc_feature (830)..(830): n is a, c, g, or t
  misc_feature (843)..(843): n is a, c, g, or t
  misc_feature (864)..(864): n is a, c, g, or t
  misc_feature (886)..(886): n is a, c, g, or t
  misc_feature (890)..(890): n is a, c, g, or t
  misc_feature (952)..(952): n is a, c, g, or t
gcaggagaagcctgtttattaggcaggagaagcagcagggcagccaggctcccctcccagccaccagctggccaaatgtcctcccttaactcaggggtacccaaggctccatggccatgtgaccagaggcgtgtaccctcaagaggcggcccctcagccctgggcagcccagccactgggtctcgcccttcaggggcctgcgccccactctgcctggccctgcctagaacagctgggatccagtccaggccagactcaagtggggcaagaccaggcagccggggcctggatgttctctacacaggaacgcacagatgatgacagaacaggctacatgggaagggcgggggaagccaccagatgggcagcactgcagatgtggccatcagctgaggaggggggcagacctgtcgttggtcactgtcggcttcagctggacgtgggcaaagggattcctgctcatggaccgcgctccatagtcatccaggccctgggagaaggcgggcacggccacactgtagggcctctgcttgaagccgctggccgtctgggcggggaaggcccgggaggcggcgccgtaatcggggggtgggatggccaggtcgtccttgtccaggaggttgcccgtgctgctgctcttcccttgctgcaggctcatgtgcagcctgtcactgccatcgctgtccangaccgggtgtangagaagggaanacaccncgcatcttggtcctctcactctctccgtantgccagcatcgcgggctcangcacagcanggtatgaggtccctccttganctcangaggtgctgttgtcccancanctggganaagatggcttcancgcatacggcattgcgctcangcggctgcatggagtcgagcangganatcctgtctcggtggtggcatactgtttttggggtccgctctgccacgggattggttgatangatcctgactgctctaactgggagaaa

SEQ ID NO: 130384 - DNA, 663 bp, Homo Sapiens
  misc_feature (570)..(570): n is a, c, g, or t
tttgcaggagaagcctgtttattaggcaggagaagcagcagggcagccaggctcccctcccagccaccagctggccaaatgtcctcccttaactcaggggtacccaaggctccatggccatgtgaccagaggcgtgtaccctcaagaggcggcccctcagccctgggcagcccagccactgggtctcgcccttcaggggcctgcgccccactctgcccggccctgcctagaacagctgggatccagtccaggccagactcaagtggggcaagaccaggcagccggggcctggatgttctctacacaggaacgcacagatgatgacagaacaggctacatgggaagggcgggggaagccaccagatgggcagcactgcagatgtggccatcagctgaggaggggggcagacctgtcgttggtcactgtcggcttcagctggacgtgggcaaagggattctaactctagtcaggcggctcagaatctggccacttccacatcggcgctgctcatggaccgcgctccatagtcatccaggccctgggagaaggcgggcacggccacactgtanggcctctgcttgaagccgctggccgtctgggcggggaaggcccgggaggcggcgccgtaatcggggggtgggatggccaggtcgtccttgtcc

SEQ ID NO: 130385 - DNA, 653 bp, Homo Sapiens
aagagtttttctttttcttcaaactttagacctggctcacggcgagccttagaaaagcagtgagtgccacagacactgcagggtgaggccgagggtgccccgcacggcccagcaggtcctgcctggcagtttctgctcaaaaggctgggacacacaggatggggcgcgtaaacacaggggagggggggcggatggagcagcaccatggaccctgggggatcacagagtctggggtcaccaaccaaaaggcatggggcaggtggaaaagaaaaacaacccaagaacaaaccagcgagagctgaggaggaaaatggacgagaccagggggaaggcgcggaagctcttcagagcagcggctgcccggggtcagcgtcctcacactgtggacaccagcgtgccgtgccactgctcatggaccgcgctccatagtcatccaggccctgggagaaggcgggcacggcatcactgtatggcctctgcttgaagccgctggccgtctgggcggggaaggccggcgagcggccgcgtaatcggggggtgggatggcaggtcgtcttgtccaggaggttgccactgctgctgctcttccctctgctgaggctcatgtgcagcctgtcacttgcatcgctgttcaagacccgggtgtaggagaa

SEQ ID NO: 130386 - DNA, 467 bp, Homo Sapiens
  misc_feature (18)..(18): n is a, c, g, or t
  misc_feature (27)..(27): n is a, c, g, or t
  misc_feature (39)..(39): n is a, c, g, or t
  misc_feature (51)..(51): n is a, c, g, or t
  misc_feature (71)..(71): n is a, c, g, or t
  misc_feature (102)..(102): n is a, c, g, or t
  misc_feature (120)..(120): n is a, c, g, or t
  misc_feature (450)..(450): n is a, c, g, or t
aaggcccaaggtcccaanaactggccnaaaccaaaaaangttggcttttancccaacttttcaaccccaantcctggtaaggtgtggctggaaacgtaattncaggcctggaaaacaaanacccctgttcaactttggaagtgaaattttgaactcctaatattcaagaaccttcctttaaacacaatggtttcctttttgagggcttccagatctccagtaaggtccatggtgattggtcccggggcactctcacaaaccagggtgagccgggtgacaacgacattgggggctttcggatctgtcaccacaggaccatctcccagcagcgttttcttgtacttaattagactctcatcatctttgtccatttcctgcagctctttcagggacttctgtggtggaggcttataattgagcttgctgtccagctcatcatcgtcatcctcnctcacatgtggctctgg

SEQ ID NO: 130387 - DNA, 452 bp, Homo Sapiens
  misc_feature (31)..(31): n is a, c, g, or t
  misc_feature (388)..(388): n is a, c, g, or t
aaccacgttgaatgaacaggtgggaaaaaangccatcaaataaggaaaatgtggcaaatgttgaaagagggaaccccagctgtggaacagggaggagggaacagggtgctgaaacacgccctgaagagaattccttcccaggtggcaaagggtggggaaaggggtggatgcaattcattctgtccactccttcttaatcgaacaggttccactcccagctgaggtggtcttgcttgtcatcgtcggtgaagaaggacttgttgtggtacgtgccttcgggccagcatgcccttgggagcctcctcaactggagtgaggaactcatactcctcaggccgaggtccatagctgccaaccataaatgttgctttatccactttcaccccangtcctgtaggtgtgctgaacgtatttcaggcctgacacaatatccctgttcactttgaagtgaa

SEQ ID NO: 130388 - DNA, 1030 bp, Homo Sapiens
  misc_feature (910)..(944): n is a, c, g, or t
  misc_feature (947)..(988): n is a, c, g, or t
aaaaaaagaaatgcccattccaatttaaagggaaaattggttgggcaaggtttttgaaagaaggggaccccccagcctgttggaccagggggaggaggggaccaggggtgcttgaaccccgcctgaggagaatttcttcccaggtggccaagggtggggaaaagggggtggatgcattcattctgtccactctttcttaaatcgacaggttccactcccagctgaggtggtcttgcttgtcatcgtcggtgaagaaggacttgttgtggtacgtgcctcgggccagcatgcccttgggagcctcctcaactggagtgaggaactcatactcctcaggccgaggtccatagctgccaaccataaatgttgctttatccactttcaccccagtcctgtaggtgtgctgaacgtatttcaggcctgacacaatatccctgttcactttgaagtgaattttgactctatattcagaaccttcctttaacacaatggtttcctttttgagggcttccagatctccagtaaggtccatggtgattggtcccggggcactctcacaaaccagggtgagccgggtgacaacgacattgggggctttcggatctgtcaccacaggaccatctcccagcagcgttttcttgtacttaattagactctcatcatctttgtccatttcctgcagctctttcagggacttctgtggtggaggcttataattgagcttgctgtccagctcatcatcgtcatcctcctccacatgtggctctggggctttttcagtcattctgatctatttattcagtgcttcacgtctctgtccggggtgcctctgtctctcaactctgacttctgagtactccccggccgtaatggccgaattcccgggcatatgtccggtaccgtcgactgnnnnnnnnnnnnnnnnnnnnnnnnnnnnnnnnnnncgnnnnnnnnnnnnnnnnnnnnnnnnnnnnnnnnnnnnnnnnnncctgacgagctaggcgccctatatgagtctatacgattcttt

SEQ ID NO: 130389 - DNA, 901 bp, Homo Sapiens
ttttaaaggcccttcctgttttctaggggaacccaacgttggagtggaccagggggtggggaaaaaggatggcattccattaagggaaaatggtggccagttgttgaaggaggggaccccagcttgtggaccagggagggagggaccaggggtgctgaaccacgcctgagagaattttttccaggtggccaggggtggggaaagggggtggatgcattcattctgtccactctttcttaatcgacaggttccactcccagctgaggtggtcttgcttgtcatcgtcggtgaagaaggacttgttgtggtacgtgcctcgggccagcatgcccttgggagcctcctcaactggagtgaggaactcatactcctcaggccgaggtccatagctgccaaccataaatgttgctttatccactttcaccccagtcctgtaggtgtgctgaacgtatttcaggcctgacacaatatccctgttcactttgaagtgaattttgactctatattcagaaccttcctttaacacaatggtttcctttttgagggcttccagatctccagtaaggtccatggtgattggtcccggggcactctcacaaaccagggtgagccgggtgacaacgacattgggggctttcggatctgtcaccacaggaccatctcccagcagcgttttcttgtacttaattagactctcatcatctttgtccatttcctgcagctctttcagggacttctgtggtggaggcttataattgagcttgctgtccagctcatcatcgtcatcctcctccacatgtggctctggggctttttcagtcattctgatctatttattcagtgcttcacgtctctgtccggggtgcctctgtctctcaactctgacttctgagtactcccc

SEQ ID NO: 130390 - DNA, 1360 bp, Homo Sapiens
  misc_feature (44)..(72): n is a, c, g, or t
  misc_feature (1274)..(1282): n is a, c, g, or t
ccctcaactaaagggaataatgcttgcggccgcatacgcggtcnnnnnnnnnnnnnnnnnnnnnnnnnnnnncacagttattgttttattcttgttctcttgtgtcgtttacagtgtctctcacaaaagaagaactccctctggcaggggatgtgactagggactcattgggccagcaacaaccacaaaagaatctaggcattagaatgaactactggaacctgagtcaaagacctgttagtgataatttgcccattttctggcctctagttgcttgaataggggtaagacagggaaatattaaatgattgtgtactgagatggagacgtggaagatctggccctgatggaggatcagagggagcaggttgggtgaaagcccggttttaagcctcttgttctagggaccacgttgagtgacagggtgggaaaagatgcatcaataaggaaatgtggcagtgttgaagagggacccagctgtggacagggaggagggacagggtgctgaacacgcctgagagaattcttccaggtggcaagggtggggaaaggggtggatgcattcattctgtccactccttcttaatcgacaggttccactcccagctgaggtggtcttgcttgtcatcgtcggtgaagaaggacttgttgtggtacgtgcctcgggccagcatgcccttgggagcctcctcaactggagtgaggaactcatactcctcaggccgaggtccatagctgccaaccataaatgttgctttatccactttcaccccagtcctgtaggtgtgctgaacgtatttcaggcctgacacaatatccctgttcactttgaagtgaattttgactctatattcagaaccttcctttaacacaatggtttcctttttgagggcttccagatctccagtaaggtccatggtgattggtcccggggcactctcacaaaccagggtgagccgggtgacaacgacattgggggctttcggatctgtcaccacaggaccatctcccagcagcgttttcttgtacttaattagactctcatcatctttgtccatttcctgcagctctttcagggacttctgtggtggaggcttataattgagcttgctgtccagctcatcatcgtcatcctcctccacatgtggctctggggctttttcagtcattctgatctatttattcagtgcttcacgtctctgtccggggtgcctctgtctctcaactctgacttctgagtactggcagttagaacaggaaggaagtcaatgagnnnnnnnnntgttttagacctacttgaagaggaaaccctgggctgtctcaaatcctgttcctttgcactgcctatctcttgatcccc

SEQ ID NO: 130391 - DNA, 838 bp, Homo Sapiens
ttttttggtctgagaatgatggacatttagacactggcgccaggtttgcgcctgaccggcgccacgcaggggtgggcggagcaaagacacacaggtgggctacaggtgtcacacggcaccagccagggcccggggtggctggggtgaggatgggtgtttggccagtgaccaggagtcaggtcaagtccaggtggtcagtgccaggggctccaggaggggagggcagtgccataaccctcctggtgtccagcgtcaccaggcggtcgtcacagaaagcaacctcggcccggggcccgggtctgcagcaggtgggcagggtcagcttttcttccatggcgggtggcattgtctgggccggatactggctctcgacccctgggcatgcaaaggctaggggtggtgctgtcagtcacaccgttgccaccaaggtcccctgggtcggctgaggcttgggatccaggcagcggtggaaggtcgggctgctcaaggccggtatgtaagcttctgccctgggacccagtggtgatggccgccatctgccccattcccacagggacctagtcagaggtcgcacacacaaaaggggtacctggccctggagaaccaccagctgcccggggtctgagaacactcaccctggccgctgggccaggcctgccaggctcccggctggtccaacaccctaaacggtacagagcgctgcaggccctcacctcatgcttctgcagcgcttgagggtgaaggtgtctccaaggggacgctggccagatgcatggagaggccggccaatcttagggccacagaccccccctggacagcagagggtgttggcggccgc

SEQ ID NO: 130392 - DNA, 1686 bp, Homo Sapiens
  misc_feature (54)..(62): n is a, c, g, or t
  misc_feature (161)..(171): n is a, c, g, or t
  misc_feature (197)..(348): n is a, c, g, or t
  misc_feature (356)..(365): n is a, c, g, or t
  misc_feature (391)..(404): n is a, c, g, or t
  misc_feature (413)..(558): n is a, c, g, or t
  misc_feature (1618)..(1618): n is a, c, g, or t
cgcccccgctttttccccccggggggaaatatttttttcccccaggcggcacannnnnnnnntccccccgggggaatacaggtttccccaacccctttgggaggggttccccttgggcggaaaattttaagaatatccccccctctccctaaaaagggccnnnnnnnnnnnaaattaaaattaaaaccccctggggnnnnnnnnnnnnnnnnnnnnnnnnnnnnnnnnnnnnnnnnnnnnnnnnnnnnnnnnnnnnnnnnnnnnnnnnnnnnnnnnnnnnnnnnnnnnnnnnnnnnnnnnnnnnnnnnnnnnnnnnnnnnnnnnnnnnnnnnnnnnnnnnnnnnnnnntttggggnnnnnnnnnnaaaaaaagtttttaaaaaattttttnnnnnnnnnnnnnnccccaaaannnnnnnnnnnnnnnnnnnnnnnnnnnnnnnnnnnnnnnnnnnnnnnnnnnnnnnnnnnnnnnnnnnnnnnnnnnnnnnnnnnnnnnnnnnnnnnnnnnnnnnnnnnnnnnnnnnnnnnnnnnnnnnnnnnnnnnnnnnnnnnnnnaaacgtttattacttcaagagtgaattatttttcaaagatgataaaactcatttctattccagtagaaaagggtcacaggtttgccccagggtccaggagcgcccggaaggcagggcccccaggcctcttcacctcagcctgggcacctataatctgagggaccctgtgagggggtgggggcagctcgggggcacagcctgcggccacttcggccagagagtggccggctcagtccataggatgatgtcagtttaggctggaggaaaagggcgccagacaacccgatgcagtgcctgtgaagacttcggggggatcaaagtccggccggggtgggcggagaccctcgggcagctgcacagggcatcttgtgctcactccattgttttccgaggcctgtgtaaaggcgctttgcctggcctggcaggtagaccaaggccaaagctcgtggccagggcctgggcactgagtccccactgaatttggcacaggaaggcggcactcccagcctggcccgtcctgcatggggagccaccacaccgggactgcagtgtttcaccttggaggggaggaagcctgggcccaacggctgaacgggacaggccaggctcacccgaggaaggggacgcaggacccacagccccctgtggtcaggcctgtgggccacgtggagagaaggttccagaacagtgcttgttgacgagcctctccctacaagtcccttcagcagcagctccatccctgagtgtctgcacaagcctgcacgcatgtgtgtatgtgtgccagggcgtgtgtgcaggtgtgcaacaggcacatggcagctgggaggctcaggctgtggggctggggggctgtccgctgggagagtccgggagaagcggggtgtaggggctggggggccggtcaggcccagcggccaggcctggctggctcacggtgtcctcaggaccctacagttttgcttcctgcagcacagagcccttgggagctgatgtcatcagggattcagaataggcctgaatggcctccttatcctttgagccctttttactactactccanaaataaatagcatttctcttggctccggattggcagatgcatcccgggaatccggaccggtccagcct

SEQ ID NO: 130393 - DNA, 700 bp, Homo Sapiens
  misc_feature (58)..(76): n is a, c, g, or t
gtgccatgctcaaattaccctcactaaagggaataagcttgcggccgcctgctcaggnnnnnnnnnnnnnnnnnnngatttgtttcagttttattttcctgtctcagtttcagtaaaagattcagagaactgattgacacacatcataagctatcacccatataccctaaatatacactgtttatgctttttctttttcacggaacaaggtgacactatctttgttcaaaccaaagtgaaaaggaagagatacaataattttaaaaagaggggtgtgtgtggtctttcactctcagatagtgaatgtacgtcaccacaacaaggaaaaagcgctgaggaagaatgtgcatcccacaggtcagagagtcaagcaggaagtaccagtagagcacctccaaatatagcaaatttggaacaactaggcattactgtgaaagaacttcctagtttttcatttgtctgccaccacattgctacattggaatttaagccctcttcacagtgcaaatatcaaaatgagccaagtcagggttttatggcaatcttttgctaaaatatattctattttaatatacatgctataaaagtatgctaaaaaggtcaatcgagagctccattaaaattaataatttgcttttttacatataggataatgtacattcaattctaaaagtatatttgagaaaagctattactcctc

SEQ ID NO: 130394 - DNA, 699 bp, Homo Sapiens
  misc_feature (78)..(114): n is a, c, g, or t
  misc_feature (618)..(618): n is a, c, g, or t
  misc_feature (676)..(676): n is a, c, g, or t
ggaaataaagattttattacttacaggtcctgggggcacaccgcacacccaaaggtgacctccccacccgtcccaagnnnnnnnnnnnnnnnnnnnnnnnnnnnnnnnnnnnnntggtcagggagctcgtggctgtgaggggccaatgggcggtatccaaacattttgaggagattttaactggtaggttcaaagcaagcaggctcgacttcaggaggtcatgctgtgcctgagagggggtcactgtggcatccgcacagttcagtggaatgtgggggccagcggggccgtcaagtaggctgtctgtggctgactcaaagggagggaggtggtcccccggaggcggctgcataacggagatatctgggtcaaccacacggaggaactgggaggaggtggaaaactgcaaactgctgacggtgaccgagccttgtttctggcatgacaaagtccagcttacattaaaatgaatcccaaggcaacttctgtttttgcttcatgatgtcctcagtgttgggaaggcaatttgtccatggcagaaacccgtagagccacttcagcatgcagtaacccaggctcttgaggtcgctgcggggggaggcccgcatcctttgtgcngtccatgctaatgaactcaaggtccccctcgtgagggctcctgcgtgctttcacgtangccacgtgtttgcacttgggcat

SEQ ID NO: 130395 - DNA, 238 bp, Homo Sapiens
aggatgaggaggaggcgggtggagactacacactaaacacacgcttccctccagatgggaacaagggctggattccacctagggcaccatcgggaggccaatggggtcatatggagacacacgcagatcctgcagcaaagcaggggctcctcatcccgtatggtcatgatgacatccccagtacctagaagatgacatccccagaacctagaagaactttccatttgcagtgtgcaac

SEQ ID NO: 130396 - DNA, 958 bp, Homo Sapiens
tttttttctggtaaaacaatttattaccaaagcacagaggtgtcaagggtaggaggggtcccccctgtgggccggcccaaccccatccagctttgctaggacactggctgaagggcaggccaccaagatggggaacttcacattcacgggagggaaactggggccctccgggaggctaatcaggactgatgagtatcctgaaaccagtggcaggaatgcacattccagggcttgttctagaagcttatctgtgattaaacagcaggccttgagtcacattacttcattgttttttttctgttgcacactgcaaatggaaagttctggattccacctagggcaccatcgggaggccaatggggtcatatggagacacacgcagatcctgcagcaaagcttctaggttgttcctcagcatggcgtagggcggcttctcctcatacgtgagggccatcaccaccttcaggtacttctgcagggtctctgagggcctgatccagtgaccgcagggtcccacgaagggccccggcttatcaacaaacttctgtttttgcttcatgatgtcctcagtgttgggaaggcaatttgtccatggcagaaacccgtagagccacttcagcatgcagtagcccaggctctggaggtcgctgcggcgggagggcccgcatcccttgtgcaggtccatgctaatgaactcaaggtccccctcgtgaagggctcctgctgccttccacgtaggccacgtgtttgccacttgggcaatagcggaaggcgaagccatagcctgccaaagtcacctgactctggtcctctggatccacaaagatattttcagctgtcacatgttccactgaacatagctcattgctcatggaggaactccagggcatccagcaagccggcatgccacgtgcagcacagacctctctgaacagcacatgctttggtatgggcctta

SEQ ID NO: 130397 - DNA, 949 bp, Homo Sapiens
gttgacaaatgttgtttattggtctgttacacagaagagtatagtttctgaggcaaaaatcatacacactctgctcctcacaaaaccacggagtcactaaggcaggcacacaatggccacacgtgcttggtggaggccaaggactcacggacaacaaggatggacaatggggtggtctggcccccagacaggctgtgcagtgcccgggggcagggctgggctgggcaggctgtgctgggtgcagaagggctgcggggccctttgtcatgtttctcaaatgcagaaagtctgccagactttggtggctgctggactaggccccagccccgggcagggcctccacgttccagggcaaggcctagcctgcatgtgttggggtagaggaggaagtggggatggccgagcaagcagcatgcctaggcctgggggcaggagctatgcccttcctggcacccccgcatacacagctcctccaagggggtttctgggttcctaggcctcttggcatcctgagaagcatgtggaaggcagagctagccttgcttctcaccagggacagatggggacacccatgcatcccctgcctcccgcagtctcagggacatggcagatgtctgcgacagataatgggctgccctcgaactgaggcctgtctctgaggggaggctgtgaccggattcttccccgacagagtcaccctgggattcctcagagcaagtgctccggtcgcattccagatcatccactggcaaaagcatcacttcttacacgtggttttcagggaagtacctaatgcagaacgcaagggtggggtggcaggagcgaggctgtacagatacacagaggtacactgtacaaggccggggaggcctgggggtcacctcaggtggccaaaggcagtggcagtgctgctgagtggctgctcccacccaggcccaatcctctgacc

SEQ ID NO: 130398 - DNA, 602 bp, Homo Sapiens
  misc_feature (504)..(504): n is a, c, g, or t
  misc_feature (513)..(513): n is a, c, g, or t
  misc_feature (524)..(524): n is a, c, g, or t
ccagtgttgacaaatgttgtttattggtctgttacacagaagagtatagtttctgaggcaaaaatcatacacactctgctcctcacaaaaccacggagtcactaaggcaggcacacaatggccacacgtgcttggtggaggccaaggactcacggacaacaaggatggacaatggggtggtctggcccccagacaggctgtgcagtgcccgggggcagggctgggctgggcaggctgtgctgggtgcagaagggctgcggggccctttgtcatgtttctcaaatgcagaaagtctgccagactttggtggctgctggactaggccccagccccgggcagggcctccacgttccagggcaaggcctagcctgcatgtgttggggtagaggaggaagtggggatggccgagcaagcagcatgcccttcctggcatcctgagaagcatgtggaaggcagagctagccttgcttctcaccagggacagatggggacacccatgcatcncctgcctcncgcagtctcanggacatggcagatgtctgcgacagataatgggctgccctcgaactgaggcctgtctctgaggggaggctgtgaccgga

SEQ ID NO: 130399 - DNA, 924 bp, Homo Sapiens
  misc_feature (138)..(147): n is a, c, g, or t
  misc_feature (244)..(269): n is a, c, g, or t
  misc_feature (304)..(334): n is a, c, g, or t
tttttttccacaggaaaagaattattttattaagtattttaaaacaactacttaacatttactcatagataaaaatatttacaattttacaccttcaggaaggctccaaaatataaacactgtacctctccctagagnnnnnnnnnnttattcttctcttcaaaaacaggaatacattcattttttctcactgtgtgaatcaagtaattatacaaataaacatctgaaacattttcctttttannnnnnnnnnnnnnnnnnnnnnnnnnacagctttacaaataaaggcaacgacttaataccnnnnnnnnnnnnnnnnnnnnnnnnnnnnnnncacgatcagcaatcaggcatagtgcattttgaaaagctgctgcggagctggctggacacatcgggaaaacaagtactctggaccaaaaataaaacttctttgaaggagacggaatcctttttagcaataaggacactccatatgccgttgggcaagaggaattagcctacagaaaggatctggcggtgccaaggcttggttaggcctttgagaagctaagcttggttaaaaggagttttaggatggaattgaaaactgagtctagttctgcttgaagggggcagctttttactcagctttgtgcactttggggtgctcgctcggggtgtccgcatttctcagaccttggtttggttccctgcacagtaagtactaatggttaggcctagaaacaggtgccagaagcccagggaactcctccctccctccggggcagctcagcttgtacaaggggcccattttcagttccttagtaagctaatcactacgaaagcctgagtagggaactacattctctttattcttccgaggcaggggtggggagcagacctgcggaaacctccccaaaccactaccgtgctatgccagtg

SEQ ID NO: 130400 - DNA, 788 bp, Homo Sapiens
  misc_feature (693)..(693): n is a, c, g, or t
  misc_feature (698)..(727): n is a, c, g, or t
  misc_feature (746)..(746): n is a, c, g, or t
ggctttgaacactcaatttaatttaaaacaggcacaagtgcaaacaattcacaaaaatttctagggaagatgcttttgttttgaaaactctgacccttaaaaaaaagtccttgcaatttctttgcccccaggtaggtcactagggagcagaagaatctaaaaatattatctagatagaaagggtccagacacctgaagttctttcctggaattccatctcacagcagccctgaagtggggcagggccgaggaggacaaggagacagcagtctgtggaggcagctggggcagatggtttgcacacatggatgcctgtgaccttgacatgatggaaacccggaggtggttcgccttctctcccagatagggttctgaagagaacaatgggtccctgatgacctggttattgagataaacttgaaaggtaacacagttgccaatccttacattcctgtctctggccctcacgatgcacagtacaggagaagctcagaagcctcctgagctcccaggagtgttagacttagcatggaccactccactggccaggtagacacaggagtggagaggtggaagccaggccaagaaagcaggtctcttcaggccagaacttagtgggagagaggggcagccttcctgaaactggctgtgggtgacctggagggacctgggctgtcaaggtggctttcctcnccttnnnnnnnnnnnnnnnnnnnnnnnnnnnnnngatgttctctccattctgntaagtgagagcacttcaccacgacccattctttctctttcac

SEQ ID NO: 130401 - DNA, 863 bp, Homo Sapiens
gcatgactgtgtttatttgaaccaccagatctgttccaataaagagctctccagaccctgcctcaccttacagggaagggcttagagtcagggaagaggggcctgttgctcctgtccctgaaaaaggaggtcaagatggagcccgggcttcctggtgaccattcagactcctcccactgcttgtccctgtggaggacacaggacgggctacccaggcagcagggagaagagtgggctggaaccaggtcctgctcttggtgggttttcactctctgcttcactgtccatgaagggtaccaggaataagttgacctcagagtccaggaagtcaggtggaagccccgggaagacattgcattgtaacatggacagagttcccttgtaacgcaggtgggagtgggccatgagctggtcaatcatcaggtgcatctgccgcagcttccgaggacagaagtcctctcggcgagctttgttctgcaagaagactaggtgggggtagtactcggtgccttcatcggagcccgatgagctgctggactcgtggctgggggatggggtggagggcttcaccatctctgctgtctgcaggaacctgtagagactgaggtctgtgaaccagtcctggacaacaatcaccacatggcagaccgtgaaaaggaaggcagcaatctggagtgactgcatttcaacgtaagtgtggggaaggttgtactctggaggcagtttgcggtcattattgatgagatggtctaggatagaagggctcaggatgggctgtgtgtccaggaaaacaatccgttcttgggtaataaagaagtcgatgccactggtctggttgccccctcgttccttcatttcagcgc

SEQ ID NO: 130402 - DNA, 885 bp, Homo Sapiens
  misc_feature (174)..(187): n is a, c, g, or t
  misc_feature (650)..(650): n is a, c, g, or t
atttggggggaggaaatccacaacgcacctaggtcactggacccagggatcttcgctagggaaaaccaggctattgacccatgtttcaccttaccttactggggccccggcgccgcccaaacggaatgggtttaggaaaggcttatcggaggggccgagggcggccgaccatgnnnnnnnnnnnnnngtgggggcgggttttttgactgtgtttatttgaaccaccagatctgttccaataaagagctctccagaccctgcctcaccttacagggaagggcttagagtcagggaagaggggcctgttgctcctgtccctgaaaaaggaggtcaagatggagcccgggcttcctggtgaccattcagactcctcccactgcttgtccctgtggaggacacaggacgggctaccccatctcaggtttggggtgggatcgctcacagtcacccccggaacagccccaactgagggtggggggcctggccctggacacctcatgtctctgggccgggaagccacgatccctcatccatcaggcctgctgccgctctccaccccagcgggggatggacatctgtgctccctcgcagtacactgcggacccaggaggtcccctgcatgacattcctctccttggcctcaggccagncaggcggctgtactctgccagagcagaggactttctcaccccatcccagatccgggcagcgtagtggaaccagttcttctcggtgaggatcgtgtgtgacagctgtggccgggccatggacatcacttggctccggagcttgctcaccaaggactggaaactggggtggccacgatacccaggcagcagggagaagagtgggctggaaccaggtcctgctcttggtgggtttcac

SEQ ID NO: 130403 - DNA, 953 bp, Homo Sapiens
  misc_feature (838)..(889): n is a, c, g, or t
attgactacatgttcctagtgggcacagaggagggaaaaatctacaagtgctctaaatcctactccagccaattcctcgacacctatgacgcccacaacatgtcagtggacactgtgtcctggaacccataccacaccaaggtcttcatgtcctgcagctccgactggacagtgaagatctgggaccacaccatcaagaccccgatgttcatctatgacctgaactcagccgtgggtgatgtggcctgggcgccatactcttctactgtgttcgcagcagtcaccacagatgggaaggggcaagccatccagggtccagccaaaagaggaatcattcatcccatgaggcttcagggaggaaacagagctgttcaccttggaggagaaagcactctgggggatgagatgccatggagcagttatttcctctgctgtatggtggagagctagagggtggcagggcccggctccatctaaggaaaaatgtatgagccagagttgatcagtgactgaatagtgtctgtaatgtagtgaagtctccatccccgggagtgtgcaagctgattctgagggaacttcagtggggtggaatgggagggggctattcaacactgagaattggtgagacctcagaaacaaacatcttgtgagcatattcttgaatgcaaacccattttccctatggactttgatataaactgagaagcactggctgccccaaggaaagaatgcagcgatgaaggcaccatcctaaagtccgtcagtcatctcttcctggaacagataactactaagggccaacgatggtgccagctctaggctggaccctggtggcttnnnnnnnnnnnnnnnnnnnnnnnnnnnnnnnnnnnnnnnnnnnnnnnnnnnngcaacaacaaaattcccagtgttctaggcagagaattattaataaaagactgtgatatgtaaaa

SEQ ID NO: 130404 - DNA, 912 bp, Homo Sapiens
ttttttttgggtttctacacaggtttatttgtgcaaagttagaggggtaatggtggttgaagaccaagtcctggggtaaggtgctgggaccttaaggaacagaacaagaagggaagatgctgggacctgatcaggagtggggtcacatgctgggtgctaaggctgggctgggtaccagggtcaagccctaggagtactgtattcaagcgatgggacagagactgaggccagcccctcaggtcttgattttcacttccctcaccaggttcagcagtttgtccagtttcgcaatctccacagctggacccttctgcacctcctgccccttcttttcctttggcatcttgcgcaaattgggtgagagcttgaggctgatgatgtgcccacggtcatcgcccacaatgatgatggggtggatgagattgaactgcacgtgggtgagcctgttctttttggccgccacaggctggttgcagatggcctcatacttgttgatggctaagtcaaatatgtgggccttcccatctgtggtgactgctgcgaacacagtataagagtatgggcgcccaggccacatcacccacggctgagttcaggtcatagatgaacatcgtggtcctgcagaggtggagggtggaaagcccatggcacatagggctcacagtgccatagcccaggggagggccccaggcagagccaggaacaggcccctcacttgatggtgtggtcccagatcttcactgtccagtcggagctgcaggacatgaagaccttggtgtggtatgggttccaggacacagtgtccactgacatgttgtgggcgtcataggtgtcgaggatttggctggagtaggatttagagcacttgtagatttttccctcctctgtgcccactaggaacatgtagtcaat

SEQ ID NO: 130405 - DNA, 1133 bp, Homo Sapiens
  misc_feature (171)..(198): n is a, c, g, or t
  misc_feature (313)..(334): n is a, c, g, or t
  misc_feature (336)..(431): n is a, c, g, or t
  misc_feature (926)..(934): n is a, c, g, or t
aaaaaaagcttaactcttttaaaaaatgtattttataacctcttgaattaattgacttgtaagacccatttattcatattaagaactctcctttgcacttgatcagcatagtacttattaggccctggctttttaatatgcttaattgcttaattccataaactgaaaacnnnnnnnnnnnnnnnnnnnnnnnnnnnngagatggggtcttggagtgcaagtggtatgagcatagcttcctcaaattcctgggctcgaatggtcctctcactgcagcctcccaacaggctggtaccaccacactcagctaagnnnnnnnnnnnnnnnnnnnnnngnnnnnnnnnnnnnnnnnnnnnnnnnnnnnnnnnnnnnnnnnnnnnnnnnnnnnnnnnnnnnnnnnnnnnnnnnnnnnnnnnnnnnnnnnnnnnnnngcatcagccaccacacctggccttgaacattttttatttgttaatttcatgcgtgacgaaacccaaggatcacccatgtcaaccacaaagttggcattccctttagtagaacctcactaaacggaaaggctgtacaacgcaccgtctagccacaggagaactaatcttctatcagttgccctttcttctttggagtttttatgtaacttacccttgtgagacaagttttctacttgagaaactcctagtacaatgtcttatactagaagcctggataaatactattaactactgtttcttatattcacttcagaaaatcagtggctccacattgtttgagccattagtgataacaaatttggatctacttactcaagtcttatgaattctgtgcctttcatcacattcctagcccactctcatcattactgcagaagggtgttgtgatgaccagttttatactgtgttttgatatgtctagcaataacttaaagnnnnnnnnncctgggaaatcttcaacatgttattggaacatatatgtatgtattaatgtatatacatggcttaacttatacgttatggcagctctgtatacagtttgatctcatgtactgaaaaaaaattcttaattttattggagtttataccactgtgaaactgcaatatgactgtaagagagtaaaaagattgttacatctaaaa

SEQ ID NO: 130406 - DNA, 786 bp, Homo Sapiens
tgagtgagaaaggcacaatttattggttacgcagacttccatcatgggaatgtggggtgcattcccttctgcattcacacacaccactggatttagctccctacattaattctgctatgttgaaaaagcaacataaggaaagacatcacccatctattctcctaataaccaaggaagcagagctgaaagccacagagataggaagaaaaggctgcactatttcaagagcctggaaccaagaggcccaccctccctggcagccaggctggagagcacggctttcgggagcaacagcaaagactcttctaccagcacgatggaatacatgttggggggcttggcttaactgtggctggtgatggctgcccacctcgaggagggcacagggaacctggcacaggccttggcatctctagcccaagctgaggccagatctctccactggagaataggagctgatttcctgctccttccaaccaaagaactgagaagccaggtagatccctgctctcagcctagccatgccggaacccgcgggactttagctaaagcagcttgtgtcactgaagctggacagaacaggcttcttgtaccctaaacaagctacccagactcttcagctccttaaggccgagcccttgtctcactccaggagggcactgggcttcttaatgctttcacccctccgaacacacaccgttttaaactggtgggtttgggcacgtggttttaggtggctagagcctcagctctcgaggtcatcctgatatgacgaatgttcgtacc

SEQ ID NO: 130407 - DNA, 1655 bp, Homo Sapiens
aggtgtgaaagggcctttagtttaatcacagatctcttccttcctgtttttaatgtacttgctccacatcattagatattatgttcactgtttcacatgaataacaagtttctactgaattgtaaatccctataaaccgaggtactttaaaattcttttggatgccattatacagtagtagactcataactgatacccagttaacactgaaagataaatgtgaatatccaactaaaagaagagcccataacctaagctagataaatgagaatggactatttcatagatggagagattaaatgtctggcccatagttcttaccaatcagctgtaggttacaactatgacttaggttccccatacccagtctacttctctatggccactgctaggtttctcaaggagcttctacccatcatctcctagtgtctaaggccacacctttcaagcaacacacctttcacactctatcaagccccaaacacaaggcacagtgtgggcagggccatctttattgaggtttttaattaaaatgctttgcagaggagaccacagcctgccaagggagcagctgcccaaatgtttcctgacccgtgacctagagatgaagtaatttgatttattccctatttcctttagtctcaatggctaaggggtaatggatggaaatggggagaatgaccgagtagaggcaaggacgaagctcattcttaaagaaaaacctcaaagttcaacttcaaacagctgaaatttgtttcatagctgttggtcacccagttctagccaaccaggaataaattatagttttgccacctcagcagatggcaaaaggagctttccagaactttggcctggtctgcaccaggtaccaacatcacagctgctaaaatcaccagaagggattttggaaccgctgtactagtgtcctttcattcgatgggatgtccaggcttcaccccaaagaggcttcatttatgcttcttctcctgtgtgctggtgaaccaagagtctaggagcttcttgctgtagtacaactgccaggcatgcacttgcactgccaacaccaacaccaggtacatgatggaaacggcagaaaaaccaaagaggaaacggtaggccttgccatggcggtagagctgctgtgcagcagggaacatctccatgctgccataaatgagtggagcgatggaaaagagtcccatgctgatcatggagagcaccaggtagctaatgttgttgcggggaaaggagagaaggcccaagagagagggcaaatgctcagcaaatacgggtattcccactgatagggcatggccacctgatcatgtgacaagagcctcaggtgtcccacgctcatcttagcaaccagcagcagccatatgaccagatgtacgtagatcagcttcttgatttcatacttgagggtcacactcatctggtagtgcatggcgacgcgctcccggtgctgaaagtcgctgccgtcggtgccggccgctcgcgggcctgctcgagacgccattgtgcctgcccagaacccccgaacccctcacgcggacctggtaccgcaacgacaccgccaagcggcccagtgaccctatttgcgcccccgcagccgcgcggctccgtgaagagaacttccggcccctctgtctctg

SEQ ID NO: 130408 - DNA, 901 bp, Homo Sapiens
gttcaaacacctgaattggtttcatactgttggtcacccagttttagccaaccaggaataaattatatttttgccacctcagcagatggcaaaaggagctttccagaactttggcctggtctgcaccaggtaccaacatcacagctgctaaaatcaccagaagggattttggaaccgctgtactagtgtcctttcattcgatgggatgtccaggcttcaccccaaagaggcttcatttatgcttcttctcctgtgtgctggtgaaccaagagtctaggagcttcttgctgtagtacaactgccaggcatgcacttgcactgccaacaccaacaccaggtacatgatggaaacggcagaaaaaccaaagaggaaacggtaggccttgccatggcggtagagctgctgtgcagcagggaacatctccatgctgccataaatgagtggagcgatggaaaagagtcccatgctgatcatggagagcaccaggtagctaatgttgttgcggggaaaggagagaaggcccaagagagagggcaaaatgctcagcaaatacgggtattcccactgatagggcatggccacctgatcatgtgacaagagcctcaggtgtcccacgctcatcttagcaaccagcagcagccatatgaccagatgtacgtagatcagcttcttgatttcatacttgagggtcacactcatctggtagtgcatggcgacgcgctcccggtgctgaaagtcgctgccgtcggtgccggccgctcgcgggcctgctcgagacgccattgtgcctgcccagaacccccgaacccctcacgcggacctggtaccgcaacgacaccgccaagcggcccagtgaccctatttgcgcccccgcagccgcgcggctccgtgaagagaccc

SEQ ID NO: 130409 - DNA, 1359 bp, Homo Sapiens
cgggtttgaaaaggttctcaagatcacttttaaatgggtgtgatgtgtattttttttaagtagcaggtttcattttaaaacaaaaaaggttagtgaagactctgtctttcaaaacataaaaatctgcgataaaaccaattattccatacagtgactacggtcagttctgagaaatgacacccaggttggcgatgtgtctcatggttggccttccatggggacagttccaggggtggtccatctcccccatgtgggtgatcagtttcttcatctcgcttgtgttgagagcagtcccaatcatcaccgacttccggcaggctctggaggcaaacatctgcttgactcgggaaggccggcacatgaccccagggctgtcgctcagcatgaagatcagttcatcgacgtcctggggtccgaaggtccagtttttactagttggcaaggaaatcagtttagccctttcagtgactggagcattttcatcgataacaaaatcaaagccattctttctaaatatttccagattttctatcagaacagcttcattaacagcagttaagttgagagtctgaggtgctatgagcctctgcccctggagcacggtgtgctgctgcagcatctcgaagttatacttctcgtccgtggcatgctggtccactatgaagatatcctcattcagtttggttattataaatcccaggttaaactgaccaatgatttccatttctgcaaacatcgttttacttatctcttttcttagttcatcttcggctgcttgattttctcccaggacaaatctttgccctaaacttcctgtaattctgttccccttcactttgctgtgcttcatgatgtaactgctttattcgtttagctaaagaactcagaaaagttcaggggcacaactttcttattaattttcacagctacatcaacctgagaggctgacacgttctgagtatttactaacttttgacgaatgtcagaattggaaagaatttcttctttcttaaaacacttttgtgtttggggatgtgagattagttggctgaggcaaaacctgaaatttacatccggtatcttcctggtttgaatggcagtccacatctgaaaaagagtcgtcagtttcaggcgctttctcctgagagtccacatgttcctgcgagcccctgtcccctggggtgctggccacacactcgctgctgcagtgactgcccgtgtctgggatgctgaacccctcagaatccacggaagtgctgccatgccccgagtccttctccacctccgctctgtccgtagggtcactgggtccctgcggacgcgtgggtcgacgatatcccgggaattccggaccggtcc

SEQ ID NO: 130410 - DNA, 703 bp, Homo Sapiens
  misc_feature (640)..(640): n is a, c, g, or t
ttttttgcaggcagaaatgagtttattgcattagaaaaaacaccgaagaaaaccagcaaacacctccgtactagacagttattagtttgactcaagggcataaagaaaactcagatactagatttacttctgggagggggtgatggtctcatccctcctccttccctatccctttaaaccaatggacctctagaggtgtccactgtgcaatacaagtacgtgactcatttcccactgtgcttgcctgttcacatccaggcggagttagccggccacaatgagaatgctcctgaggtgctgggacagacagaaatatgaggatgggggtaggcagttgaagcctgagcctgagtttacagttagtgacagtggggctcccattgggagggagagcttgccttcccatggagctctgggaaaactgctcagtgatccctcgctctctccccacaaaccctagggcacaggcaatggcacaaatggctgctagtataaaggggggtgctgttcaaggaaatgagtgactcaaattctctcaggggagctgctcctgggcctaagggtgcctgctggaagaagcaaaccagctgaaactggatctggaagaggagaaaggaaaaaaaggagctgtgatgcccanaaccccctggatggaggggagacaaaatatacatgtgaaataaactcaagtatttaaataagt

SEQ ID NO: 130411 - DNA, 1229 bp, Homo Sapiens
  misc_feature (1092)..(1126): n is a, c, g, or t
  misc_feature (1130)..(1170): n is a, c, g, or t
ggtatttaaatacttttattttcatttcacaaaaaaagcaacagtgtttgcagctacacatgcctttcagtcagtgctggtcatatgcaaaacaagttatcagaaatataaagaaaaataagccttttccctttacaagtgaaacaacacaatttgcatatacaatattatatatacatattttcaaaatgtttcacaaaagacagattatgatacaaatttagaattccacccacaagctcagactcaaggaattgaagatctctataggtgtttaaatataaaaatgtaatacctttacaagtttccaagtaactactttccaaagtatttgaaagaggctattcttcacagcaacatggaacacttggctttaatcaagacagctgtaaaactaagttttgtctcaatgtgagtttgttgattaatgcaaatgctccaattatgccataattctcattttatatacacatacatacacagcgtattattgtactgatggtttacacagtccaatttctggagcatttccttcagctaagccatgacctttacttcctgttgaagtattttcatattaagaacttgttcatgtaatatcatctaatgactaccatgacttactccgtaaaatgttgcccttttttcttttatttatgtatccagaatgtaaatcttgtcatgaatacacttatttttttctatggcagtcaggttataagtaatagtcaatagctatagtgtctactttttcaacactagaatctgagatttttgatatacacgctatgtcaacatttctttgcaaattttctaggagttctatcactcaatgtttccaaaatagtaatatggcaaatcttcagcatggatgtatgtagtatcagaaatgggtaaacaaacaatgctaagagtgcctgaagcgaacgggaggatgagcagagatgggagtggagtggaggactgtgtgtcccatgcatttctccctgatgcacgacaaatgtcaagggcggggcgtaatttgatatcgagctcgcttggactcctgttgatggccgaattcccgggcatatgtccggtaccgtcgactgnnnnnnnnnnnnnnnnnnnnnnnnnnnnnnnnnnncggnnnnnnnnnnnnnnnnnnnnnnnnnnnnnnnnnnnnnnnnnattacgcgagctagcgcccatagtgagatgcaagggtttcttttgcctattctatctct

SEQ ID NO: 130412 - DNA, 970 bp, Homo Sapiens
  misc_feature (729)..(729): n is a, c, g, or t
  misc_feature (767)..(767): n is a, c, g, or t
  misc_feature (774)..(774): n is a, c, g, or t
  misc_feature (806)..(806): n is a, c, g, or t
  misc_feature (866)..(866): n is a, c, g, or t
tcaggtgagaaatggtctggttttattgagaagctgttggtcatttgatggaaagacacatacggtacaaaattacaggtggtttagttcattacatgatacaaatcattagagtctttacaagtcattagagtctttggattttttaaactcccatttactgtgtaccaaatcaatataatcacagaatcaaagtcacttctttatatgtgaactcttcgcatttacacgaatccacacatagagaagctgttccaagaccccccaacaccattagtgtctgcagcccaccaggaaggcaccacggactttgtggagagaaagatgctttgggggttcaatgggtcagtatcttgggcaggaagcacagggtgactcccgtcttgtgtgcgtgcgcacagccaccaacacacactctcaggacttcccgtttcacatacagggaacttttaaggcaagaggagaaaatgctaggaagtaacgggggatcagaactcctccacctctcaggctccagcagtcacattcccagctccgttctcttgttgaaccttggtaggcccagaaacatcttccccctcctcacctctgccctcccgctccctctggtcagggctgggtacccaggaacccagtcacacacctgccccctgtcccctctgctgctggacgcagtgccccggggcagagtgagcttctcaccctggagctcagtcttcatagggccgnaggagtggcgggtggggcaggatgttctggcaacatgnggagganggcccagagatccccacccactctgaacgcgncgggcattatgccttccggcttggtgcactgcggcgacaactagggcatctgggctccanagcgacggagcctaggggtggcggagctctggagggtctcttgcaggagaaaataatgaaagggcacccctgcacatctgacactcggcgcagtgggcgggagg

SEQ ID NO: 130413 - DNA, 705 bp, Homo Sapiens
cagcactggtgtcagacacccagaagagacctggaaaaggtgctgacaggagaggagaagtaaggttttaatgttaattttcttcctagactatatagagaatttccgtttgctgctttaagaaaagtagtaaatgaaatgatgttatgctctcatttgtgggaggtgactttcattttaacgtttagtatctacaaagcattgtattgggtactctggggatgtaaggaaaattgagaaaataattcattcaataaagattttattgctgtttgctaagtgctagactccttgttgtgctctgagaatataaaaacaaattaaaaatagtctatgctctcaaaagtgtaagtctttacaaggatgataggcaaagggaggtctttggtaaagccatgggctaagtgtgccaggtctgtgtttggaatggcaagtagactgaaggggttggacagtagtatggggcctgaggtggtagaagataaggttggaaataatagaccggtgaagggctttgaatcaagatgaggaattttcacgtcttgtgattccacaggaagtttttgaggctggatgtgaagccatctggtttgatttgatttagggtgctgatgccaatggcatcatgtaggatggattggagggcagtgggactgaggcagtgatacagctaaacagaggtggtagttgggaaacagaggggtg

SEQ ID NO: 130414 - DNA, 1172 bp, Homo Sapiens
tttttttcacagtggaaataaatattagctttattaacactcaaagtgccattcatttatattcattccatagtccagaaggttacttattagagtaagcctttgcaccacaatctttcaaaaaaatgaacatgtaagaaaaagcagttttcattgtgctaattattgcaggccttcatgcacgtaaacctcaacaaaatgtgtgccaacaatatacaaatttccatataaacaaagtcattgatcactaacaaaatataaacatggtttcttttatattagatttttttttaaaaaaaagctatttaccagcaagaaaaaacaagtacctagaaattataaaactcagaaattgtatacatttttacaagcacaattttgaatgacaaacaaaatcaaaatgtgcatgaaatgttgcacgtaccacactgtatctggcttctggtaggttttcctaatcacactggttccttttaacataataagcttagtgacattcaacttcaacagtggactttattcctaacacgagtaattttacatggtaccgcatatttaaaacaaagttttctttaatactacattgtctgattggaaatttcatttccaattctttttctgccagttacttaaaacacacagtacaatataaagacacacaacgtatgtttggacatttcaaaaccaatttatagtcaattacaaagaatcacaatatgccaatatattgttttataaacccagtctgaccttgcccagtgatagaaaaactaaaagttgaaatcttttggggtggaatacaggaaatattcaaagacaacagtaggacaggccaatagcaactggagatagaaaaatcttgacatctcgagacaatttagtttctcacattgtttccatagctctgagaattcaaaggccatttttagcggtgtgtttttgctactgcttaaaacctatttttcccttaatttgcatttcacggaattctcaaagagaatttaatgctttttcttgcaagagtattttaattgagctctaagtatgacttgcattcaattctgaaaatacaaatacattttgaatggctaaaaacaaaattttaaaaatacttttgatcagcccggccgtaatggccgaattcccgggcatatgtccggtaccgtcgactg

SEQ ID NO: 130415 - DNA, 1346 bp, Homo Sapiens
  misc_feature (195)..(250): n is a, c, g, or t
  misc_feature (1304)..(1304): n is a, c, g, or t
gccgcgctccgaacggcgcctcccgccccaccatgggcaacagcgcgagccgcaacgacttcgagtgggtctacaccgaccagccgcacacgcagcggcgcaaggagatactggccaagtacccggccatcaaggccctgatgcggccagacccgcgcctcaagtgggcggtgctggtgctggtgctggtgcagnnnnnnnnnnnnnnnnnnnnnnnnnnnnnnnnnnnnnnnnnnnnnnnnnnnnnnnnctacgcctttggtggctgcgtgaaccactcgctgacgctggccatccacgacatctcgcacaacgcggccttcggcacgggccgtgcggcacgcaaccgctggctggccgtgttcgccaacctgcccgtgggtgtgccctacgccgcctccttcaagaagtaccacgtggaccaccaccgctacctgggcggcgacgggctggacgtggacgtgcccacgcgtctggagggctggttcttctgcacgcccgcccgcaagctgctctggctggtgctgcagcccttcttctactcactacggccgctctgcgtccaccccaaggccgtgacccgcatggaggtgctcaacacgctggtgcagctggcggccgacctggccatctttgccctttgggggctcaagcccgtggtctacctgctggccagctccttcctgggcctgggcctgcaccccatctcgggccacttcgtggccgagcactacatgttcctcaagggccacgagacctactcctactatgggcctctcaactggatcaccttcaatgtgggctaccacgtggagcaccacgacttccccagcatcccgggctacaacctgccgctggtgcggaagatcgcgcccgagtactacgaccacctgccgcagcaccactcctgggtgaaggtgctctgggattttgtgtttgaggactccctggggccctatgccagggtgaagcgggtgtacaggctggcaaaagatggtctgtgagcccgggctgcctcctggtggtggccattgtcccccatcggcccctcagccttgcaccccagcactgagaagctacatttccttcctgtgctctggactgctgcccttgtccccgaggagtgtcccgcgcagccacacctggcaacagcagtgtgggctgcagggctccgtctgcacgtggacttgccctggaccttgagtgtggccctccctttctgggcctccccaggtgaggcctggccctgccccaccatgacctgggtgctctgagcccacggttcccacggagctgacttctcncggggtgcctgtgccctacattaaacccggcgtttgtttcac

SEQ ID NO: 130416 - DNA, 879 bp, Homo Sapiens
  misc_feature (87)..(99): n is a, c, g, or t
cacaaccaaagaatatactgtttattaaaacaaagcaagggaaacaaaaggcttcaaaatcctttccatgtaacatagctttagtcnnnnnnnnnnnnntacatgaatgcaggaatgtgtacaggtagaaaaagtacgcactcaccaagcgaagcgcagcattaattgaagtgaaaagtaaagaaacgctttgtagccgctcggatttccttaggggacagcaagtcaatgcttatcagcggtcctcagaagagacaattttgattaatatcagacccatctgactcagtctattaaaccctgaaggaaggatactcttcagatatagaagatatgcctttgattaatcattctaccctattgccattccaagcattaccaactatgtagcacctctagaaagagagagccttcgaattctaggaagacacacttactaaaatccccaggtgctcatgaccgcttctcagctcgccccgctgagaagaacccaagttgtgagcggggatgggggggggtggtcaccactggagaagcaaaaacctagttacataatttacttcatggtctgcagttagggtcagtgacttacgacataattcctgcttgatgataatgaaattgacagaagcctgaaggcagagggagtgactggtcttgcgctagccactggctgactccgtaggcctgacacagtctacaccacaaccacctgagcgtattttcctttgcctaccgatgggttctgagatgcgcacgagggaggaaattgcttagtccaccatcaagagcctctgcactgtgtagctaacatgggatcgtcacacggaggtgggaggaaatcgattccattctgcctatttgcaaacttctgccccc

SEQ ID NO: 130417 - DNA, 1760 bp, Homo Sapiens
  misc_feature (960)..(1030): n is a, c, g, or t
tttacaaatattaaaaatgtgatttttaataatataagtacaaaattttatttctttatacaactgtaatgggatttggatcaaaccactagaatttatttaaaaaacaaaataaaacaatgatataaaaactgcaagaaggtctgaatccaaagtttttcctctaatagtaccaaataccacaaggtacagattattatacaaatgtgtacaaattttaaatacaaatacaatagggctgggtttcaaaggaaaacaaacaaaaagcaggtcctcatcaggatttcattaatgtatataaatgacaatgctaggattaatgtcttcctatactatccatgtcttccccgcccctcctagataccctgtgtcaaacaggaaacttccacagatacagaagaggcatggtacaatgttctaacacatgaaatcaagttaagatttctgttcctcttgattttggttctcaaacaatcctgtttctctgtattcccaattaaatcttaaaactgctctgagctgagaaagggattcagcagccagactacctttaagcaacataggccctgtgacaacactggtggggagaagggaagaaattaaataggatgcagatgggctacactgtccccaaagatttactttgatgctgtagtgctctgtcagggccaggagaagaaagcacgttaactcagagcttggtgttggcagagaatctcataccaaatttaaaaaccatcctgaagtgctcaactgtcttctttccaactgggaaacaaacgtctggttctctggaaataagggcagctggggatggtaacattcctctttattttactttctagacattattgaagcccatgaagttctttataaagaattagaatcctaacacaatgattcatttttgaggtaaaataccttaaaatgtagatgattcagagtttttggaacagaccnnnnnnnnnnnnnnnnnnnnnnnnnnnnnnnnnnnnnnnnnnnnnnnnnnnnnnnnnnnnnnnnnnnnnnnatgacaaatctgtatcttccacatgctgttgctggtggaggcttctgttattaaattatatatacagaaatttacaggataaattaaaatctaagagattttaaagagttaaatacacataattaaaatacacattcacacacacataaataaacctacaagagagtgagttttgttttgtttttgcaattcacttacatgtggaatgcagaacactgtgtatctgcccaccaggggaaccgataagatgaacccaaaaatcatgctgggcaaagtttatccataaccaccgagcaactaagcagcacggcttgtgaggacttggtggctaacttcatgctgccagtgaaagacaccagcacttaattctgccgactaaagattctgggttagctcagaatgtatggaggtccaactggtggcattgacagcttcaccccccaaggtgttttttgctgccagggctcacagaactccttggcctctgttgaggccaccaatggtaccatgattacaataaattttgagacacagacacctatacagtaggaattggaatgaaccctctactcaattcacctaagccacctccgtaactataaagggaacaattttatcacctcccacctaggtcacttcaaattgaaggctttgaatttcgacgcgtggtcgacatatcccggaattccggaccgtaccagcctgctttttgacactgttatatcctatg

SEQ ID NO: 130418 - DNA, 824 bp, Homo Sapiens
  misc_feature (66)..(89): n is a, c, g, or t
  misc_feature (126)..(174): n is a, c, g, or t
ccggccttttgtatttttatttttgttcatctgctgctgtttacattctggggggttagggggagnnnnnnnnnnnnnnnnnnnnnnnnaagcacagaggggagaggggccagggaagtggatgtnnnnnnnnnnnnnnnnnnnnnnnnnnnnnnnnnnnnnnnnnnnnnnnnncatccaggggctgtgtattattgtgagcgaataaacagagagacgctaacagccccatgtctgtgtccatcacccactgctaggtagtcaaagaagtggggtgagggcatgcagagtgtgggtggccaggcttcgcagcccatgggtgggactctggggagacagcagcagcagcagccgccgaagccccagctgcaaggccaccagacgcactcctgtgcctggttcctcagtccccaacaccaggtagcaagctctgggcagctgggcctggtagacctcatcttctgtcttctctggtggccctggctctggtgggaagtgcgtggaggtgaccagggtatagaagtttcggaggaggcgccggcgctgttctggtgaaggctctttatcccccaagggctccacggtgaagaggcagcgcttcagttccaggtggaggagcagcagcccgaggatgtctgtgtgaagggggaagccactgggcagcgcccggggtcccaacggcagacaggcccgcaacgggtccagcagtggctgccaccagcgctccagaagctgtggatacaactggctgaggggtgggctcggcccgcagagtagacacagctccaggctcggcagcagagtcagggtcaggagccggtccc

SEQ ID NO: 130419 - DNA, 713 bp, Homo Sapiens
  misc_feature (53)..(134): n is a, c, g, or t
  misc_feature (447)..(447): n is a, c, g, or t
cttaagtaaaatagagaatataaataatcatacattaaacaagtaatttatgnnnnnnnnnnnnnnnnnnnnnnnnnnnnnnnnnnnnnnnnnnnnnnnnnnnnnnnnnnnnnnnnnnnnnnnnnnnnnnnnnnagtaaaataatctaaaattaatacatgcttcgataataactttttagaaagaacacaaagatgaaatcatagatctaaaggataaagttggagaattgatataaagagaaaaggagagtagccagagtggcctatgtaacacaaaaggaactaggagaggtgcagggagaaaaacattggggagagagagaaggggtccccagcaatcaggttcccaaactccccaaggatgtagccgccaaccttcaccatgttctcgtgacaggcaggggcctggagcgcctcaaagacggtcttggcggcatagccctgngacgtcatcacggttggtgacgatctgtagcacacggtaccacacctcctcactcacgtagtcgcccgcaatgcggatgaggttgaggatggtgtccacgtaccagctgtagtccacggcgtacttctcggccaggatggccaccttcaggacgatctcctcgcggatggcgtagtctgccgtctccaggtaccgcagcatctccgacacgatctgcttggcattgccctcgtgccgaattcggcgcgccgtcgacttcatactct

SEQ ID NO: 130420 - DNA, 1684 bp, Homo Sapiens
  misc_feature (50)..(99): n is a, c, g, or t
  misc_feature (135)..(158): n is a, c, g, or t
gttagcgtctctctgtttattcgctcacaataatacacagcccctggatnnnnnnnnnnnnnnnnnnnnnnnnnnnnnnnnnnnnnnnnnnnnnnnnnncatccacttccctggcccctctcccctctgtgcttnnnnnnnnnnnnnnnnnnnnnnnnctccccctaaccccccagaatgtaaacagcagcagatgaacaaaaataaaaatacaaaaggccggaggaaagtcccaggcatcccccaaaccctggtgtcttctctgtcaccagtggaggtcccccatccaccaaaactgcctcagtccaaggggctgcccagtgccggccacatcccccggggcagagtccagggctcagaactgctgtgccagcagctcacacaggtgacgggagacgggctccttgctggtgcgcagggtcagccggtacttctgggcctgggcattgggctccagccgaagcagacagcccacctgcagggctttagtctggatgatccccgcccccacgaagttctcagggttggggtccacattgtccaggagagcagagccaaaccccagaagcttggccttagtaacttctgcgtccatggggtggttggctttgaagattttctgcgcctcctgttgagggaggctcagctgcttccagcgctggaagaaatcctgggccgccatctcggtgggctggaagaacttgttgatggtcactgggagcttcagggtgagggcctggggggcgccaccgtaccggaagcgcacggacagcagcgggggcgtcaggaagtcccgcaggcactcgatattgagcacctgctgcacctgcgcgccgccgtccacctgcgccgccacgcgcttggtctgcacagccaggctgagtttggaggtctcccggggtgaaccaacagtgggtgagaaatttctggaactgcaccgaggtcttgttgccatagaagagatacatgcggcccaggttctgtcggaactctgacttgactccgatctgcagcagctggttctcgaacaggaccccgttgttcttacacacaaacttattcagcaactcatcggcttccggaatgggagggccgatgtcctcaggacctgggctgaggaaggcctcctcgggggtgggccccaggctgggctgggcggccgggccatcgaagacgtccaccagaaggttccctgctcctgcagaagccgggggtgctgccgggggaggggctgcccgcagccccaggaggtcggcggagggcgagggcgtcgacacagtgctgggggtgggctccatgcccccgttgatgtcgttgctgctggggtccctccggccatcgtccagggcgctgccggcccctggccccttcttgcgtttcagcttggccaggatggacgactcgcgctcggggaagggcggcatctcctccagcaccgtggccaggacgtcggtgctggccactgagctgagggtgaggtactccacggctcgctgctgcagctccacgtcagcattgcgcagctgggagccggcccgcaggacgccctggatggtggccttggtctcggggaagaggttgatgaacttgatgtaggtggacagcagcagcgcccgcgtggccacgctgcacagatggaacttggagtggagcagggagaactgcactggggggctggagcggg

SEQ ID NO: 130421 - DNA, 860 bp, Homo Sapiens
tactttaagccgcccccctttttttattaacatttgttatcttcggttaaattcatccaatatttattgaatcgtgaacggttgcaaacgttgccacaatcagaaacccacccatcctgatgcctctcttggcttccccttgagaaggatgcctgaggcgggatgtccccccaaactccaggggacaactggggaagacatggggtatgcaaagagatatgatgaaaccacgggacaggaggagggtggggtggtgtggattccggggaagacacatacacacagactctcccgctcagaggcaaagaccgggggcgtcaatctctgcccccaacagcagccacgagaacatcagggaaagaccaggtgtccacaagacttttcagtccttcctatcatgaagcgtctgctgagaggggctgggtcaaggtccctggactctgccttcagggcgcattagccctgagccaaggcggctttgatggcggccaccaacttcagaaacttgctttctgtgtccacgtagccatcgcctttcttcttagagtgaatcaacttcccggctaccatcacttcaaagaacccggtggcctggggagttccctcgccgcagatgtccaggcggccggggaactcatcttctaacttcttcttgagctgaagatacttggacttgtagcctcaagcgccacaataaacgactcggacggcgagagccatggctcggggctgccacatccgctgaggagcggacgcccgggccacactaacctcccacctggacgcgctaggtctgcgcgagtgcggccccccggccgtaatggccgaattcccgggcatatgtccggtaccgtcgactg

SEQ ID NO: 130422 - DNA, 933 bp, Homo Sapiens
  misc_feature (91)..(91): n is a, c, g, or t
  misc_feature (95)..(135): n is a, c, g, or t
  misc_feature (137)..(139): n is a, c, g, or t
  misc_feature (146)..(146): n is a, c, g, or t
  misc_feature (149)..(151): n is a, c, g, or t
atgggatgtcggccgggggtgcgtggctgggccgtcctgctcgccgcttttgctgggttgtggtgtctgggtttttggcgcttgtggtttntgcnnnnnnnnnnnnnnnnnnnnnnnnnnnnnnnnnnnnnnnnntnnntgttttnttnnnccgggtaaatttcatcccaatatttattgaaatcgtgaacggttgcacaacgttggccacaaatcagaaaaccccacccattcctgatgcctcttcttggcttcccccttgagaagggatgcttgagggggggatgtcccccccaaactccagggggacaactgggggaaagacatggggtatgcaaagagatatgatgaaaccacgggccaggaggaggggtggggtggtgtgatttccggggaagacacatacacacagactctcccgctcagaggcaaagaccgggggcgtcaatctctgcccccaacagcagccacgagaacatcagggaaagaccaggtgtccacaagacttttcagtccttcctatcatgaagcgtctgctgagaggggctgggtcaaggtccctggactctgccttcagggcgcattagccctgagccaaggcggctttgatggcggccaccaacttcagaaacttgctttctgtgtccacgtagccatcgcctttcttcttagagtgaatcaacttcccggctaccatcacttcaaagaacccggtggcctggggagttccctcgccgcagatgtccaggcggccggggaactcatcttctaacttcttcttgagctgaagatacttggacttgtagcctcaagcgccacaataaacgactcggacggcgagagccatggctcggggctgccacatccgctgaggagcggacgcccgggccacactaacctcccacctggacgcgctaggtctgcgcgagtccc

SEQ ID NO: 130423 - DNA, 481 bp, Homo Sapiens
tttttcatgctaaggaattcttttactgtgcgcttccctgaatagatacgccgtcaaacaaggcagaagctacaaataaagcttacttctactgaactcatgaagctgttcctagtgtcagttttgagtttcaagtgaagactgaatgtcaactgcaggctttccgaattcctcgaccatgtccatccatggattctcttcttgtctagatttccaagcatgaagatgctaactaaagcatttctcaatggggaacacgaaaagatttctattattgtgggttctccggtgttcctaaaggctgagttataactaaaggatttcaacctatttgtgagtttgatggtaacgctggaaaaatgcttgaagttgttactttgctcattataggagtatggtttccctccaggaaggtttctctaaaattaagagctattctacaacagagacccctctacacttaaggtatttatgggatctg

SEQ ID NO: 130424 - DNA, 541 bp, Homo Sapiens
atccgctcttaacaaatgatctcttctcagaatactacatctgtattgagagtacagacagcccattggtcactacaccttttgcaagacagcgaaacggatgcatcaaattgcattgatacatcatcaccatcaatcttttgcactgatttttagacttaatcttcttatttgaaaataaactcatttttaaataaaataaaaaatattttagggaaagctctataaaattaaaattacagaattatatgctttttaaaatttatgcaaaaatgtgcagacaaatgtattctgtattggtttatgtatcactttgcccttgtatattttgagattattaagatttgttgacttttttggtttgatatttatcatctgttaaatttttccttttaaattattaaatgcaaagtgcaagaaaaagagataaatatttactgattgctagatgtaaaaatatctatgaatatatatatttaaacttctgccaaagagcaaccatctaacagtcaacttactaaaatctaaattgagtactttt

SEQ ID NO: 130425 - DNA, 1362 bp, Homo Sapiens
  misc_feature (1298)..(1321): n is a, c, g, or t
tcgagaagtaccaaccgagtgaccttcatgtccaacatgctctatgcctgcagcatcttatacaaaaccaagctgcctttcattgtggtcatgaataaaactgacatcattgaccacagctttgcagtggaatggatgcaggattttgaggctttccaagatgccttgaatcaagagactacatacgtcagtaacctgactcgttcaatgagcctggtgttagatgagttttacagctcactcagggtggtgggtgtctctgctgttctgggtactggattagatgaactctttgtgcaagttaccagtgctgccgaagaatatgaaagggagtatcgtcctgaatatgaacgtctgaaaaaatcactggccaacgcagagagccaacagcagagagaacaactggaacgccttcgaaaagatatgggttctgtagccttggatgcagggactgccaaagacagcttatctcctgtgctgcacccttctgatttgatcctgactcgaggaaccttggatgaagaggatgaggaagcagacagcgatactgatgacattgaccacagagttacagaggaaagccatgaagagccagcattccagaattttatgcaagaatcgatggcacaatactggaagagaaacaataaataggagactttagcacacttcacttgtttctagaagtccagaatttggacctccacgtgaaagaactgttcttacctctgaactgggggctcccataagggataattttcctcagagtagcaaagtttctcttattagagaaatcttgtgactcagatgaagtcagggatagaagacccttggacctggcaggttaatgctgattattccttggcctttcccttgtatttatgcaaggaaggatatactgagctgatactcttccaagcctacaacttcaagttttatcatttgaactcaagtacttttgctgctgaggaatggaatcaaaagaacgtagtctcctggtaaccacctcagatctctattattaggctagatgtatagcctctactcccccagcttcttgctcttgaccctgcactgtaagttgcccttctattagcagccaaggaaaagggaaacatgagcttatccagaacggtggcagagtctccttggcaatcaaccaacgttgctatgaaatatgcctcacactgtatagctcattataggacgtcaggtttgttgaaaaaagtgggcaagacatgattaatgaatcagaatcctgtttcattggtgacttggataaagactttttaattttnnnnnnnnnnnnnnnnnnnnnnnncctgagcaggcggccgcaagcttattccctttagttgaggg

SEQ ID NO: 130426 - DNA, 1746 bp, Homo Sapiens
ttttttatcaaacacaaatttatatcaagattaactttttcaaccagcttacaagcagacttttccctttctttgttaaaaaatgaatggtatgaaactatatgttaaagatgtttctataataccttacatttacatagcgctttacaattttcaaagtgctttcacatgccatctcatttaatcctcacaacagccctgtgaggtaggtacagcaggtattattatcctcatttcaagatgaggaaattgaggcaaagagaggttaagtgacttgcccaagatcacacagctgtaagtgctagagctaggacctgaaatcaagttttttgactccttgtccagtactcattccactgtaattactgcctcaagttatgaataatgaactgtgtatcaaaattgaaagcttactgaagttcatttcagtgatgtcttaacagtaaagttaaatgagaaatacaagaacagtaggtctgatggttttacttgacataaaattggtgcaaaaccacttttgtctaattacttgtaaccttttggtccaaatacataaaatatgcaatatttacagcattttccttgttttgtaaatgcaatgctttaaaacacattataaagcaccttagtaaaaatagtctacaggtaaaagtacagaagaagtaggaaaatcctacccataccacagctcactaatggagtcataatacggagtcaccgatatctcagtttacagctttacaaataacccatggagaaacaaatactaaacttacttttttgatattaatgtgtgaaaatcttaactaaaacttcagacaatctcaatattctttgaagtatcttcccagtattagatattgaggaggcaggaatgagaaatactgctttgatgctttatctttttaccatattagtcatgatttaaattgatttttaacactaatcaccatttaaaaaattaaagccacctacataaaatatgggcaaaatccaactacagcagaaacatttcttagcaaatatgattaaacattccaataaatttcatgagacatgactcacaaaaccaaagtacacactgccaaacagttattaacacaattcagtagaggtgtataacccaaaccctcagtgaaggcagaagaggcaaatggactcatcttaattcatggttagttgaaaaaatgctttatcaaaaacaagagtatcagaaccttttctgaaattgtatttagccttttgattagacctgccataagttcattttaggtgatgtatattttctcccaggcaggaggttataactttcaccaacgtttagccaggaaaaataaaaatgcctgaaacttagaacactgacaatgccagccagtatctacttccttgacgttactgtctgtttcctaatttggctcaatacaaattgtcatatacacctactgtcagcaatccagactgtggagctgagaacaaaggtgaagacagggtcaaattttagttcaagaatctaatagtcacaccttatactcagttcgacttagggtaaatcttttcatagaaaaagttttgtgcgaggatgtagaggtctccatctttttctcgaacggcatgggctctgatgaattggaactgctctagtgcaaattcatagaactcattctccattttccaaatatcagattgctgtagttttgcaatggtttgtttagtggggagtttcttctctgtgttttcctaagatga

SEQ ID NO: 130427 - DNA, 684 bp, Homo Sapiens
gtttgtgttctggtgtgttccaggtaaacgacgttttattttcataaatactcctgctctcactcacacactgaccccacttctgaccacggacagatggatggacagacgtaagacacccataggaggccccagcagaggccaatgaatgaaggagacacaccgagaactctaggtgccccacagcccctcgctggggccatgggcctctggcattacccttgagcccccacagtccctcagggggcccaatggcaaagggaaacccccaggagtacgggccaggtgaggttcccccagcctggccccctgaggctgtgaccacagggccaatccggaagaaaagcagagtcaaaccacacaccagagtgcaaatagctgggggtgtaggcgtcaccccccagtcactgggttcctatggaggaggcctaagctggtccccagctcgagcatggcccccgagttatggctgggccttcccataaggcataagagacaggtggggaagaccccaccccagctggggttggggctgggcctgaggtcctggcccttccccaacagctgtgcttcctccccatgacccaagttcttccaaggctacacagcccctctctctccaggtcccggtgatggagacccagcggcacaaacccaggcccagcctcctactgggtttggctc

SEQ ID NO: 130428 - DNA, 1049 bp, Homo Sapiens
  misc_feature (857)..(857): n is a, c, g, or t
cgggtgtgaatcggcacgaggggcgcgccgcgcgtatcctttgggtgcagtgagacaccaggagagctgctgctttgggggatggacaggggcagcaggaatgccttgtgttttcgcagtgaacctccttggcctgggcgaagctgtgtggaccaagcaagtcaggagtgtggccatgttttctgagcaggctgcccagagggcccacactctactgtccccaccatcagccaacaatgccacctttgcccgggtgccagtggcaacctacaccaactcctcacaacccttccggctaggagagcgcagctttagccggcagtatgcccacatttatgccacccgcctcatccaaatgagacccttcctggagaaccgggcccagcagcactggggcagtggagtgggagtgaagaagctgtgtgaactgcagcctgaggagaagtgctgtgtggtgggcactctgttcaaggccatgccgctgcagccctccatcctgcgggaggtcagcgaggagcacaacctgctcccccagcctcctcggagtaaatacatacacccagatgacgagctggtcttggaagatgaactgcagcgtatcaaactaaaaggcaccattgacgtgtcaaagctggttacggggactgtcctggctgtgtttggctccgtgagagacgacgggaagtttctggtggaggactattgctttgctgaccttgctccccagaagcccgcacccccacttgacacagatagggtttgtgctactggtgtccggcctgggcctgggtggcggtggaggcgagagcctgctgggcacccactgctgtgaaatggtggtgaacggggcaccttgnggaacgaaggggagcaagggcagcgcccgcccaacgtctcccggggttaatcctcgcttggcaaccctccctcaggccacaggaaccccagaaacgagggggaattcctaatcaatataaagggcccaaattaacccttcccccaagaaaaaaaccccagggggcagccccccccgcgggggaagggctcgc

SEQ ID NO: 130429 - DNA, 1633 bp, Homo Sapiens
caaggctcgcatcagcaagtgctcaggctttatttacaatgccgacactgcagggaatgaacagcctccatctgggcctctctggtcaaaaccacttttttgagtcaggggcccagccccaggcctcccaggtcatcgtcctctgccccgaagcccgagaagctgatgggctggcaggccaggctgcgcaggttcacaaggcaggcggtctgcgtggcactgaagtcagggacagtcaccaacagcactgtctggtcctcaggacctcggatgattttggagccaaagctgggggtgttgccacaaaagtagacatgcgggcactctgggaagatgaacgggtcagttttgtagaaggggtaacaacctagagtgtcaggggctgtggggctgatgtgacggacccgcagggtccactccaggatctccaagtgatcctccatgctgctgtatcggaaaatgtcactcacgttctgtcctgatgtccccaaaaatctgactccatcaatggtggcctggtaggggttggtgaccagctggagcgtggagtaggcagtggccagcgggaacatgcaggggtggaggggctgctgggggagcgtgtaattggtgggatcaaactcgcctggcatcacgtccacgggcactgaggcgctcagctgcaggaggatctcatccagcatcttaacagcctccacgctggctgcctgggttttcttggtgaggtatttggccttattgatagaatccctgctctgggtgctgtggctgaggaggttgccagcgaggataacccgggagacgtgggcggcgctgcactgctccccttcgtccccaagctgccccgtcaccacatccaccagcagctgggtgcccagcaggctctcgcctccaccgccacccaggcccaggccggacaccagtagcacaaacctatctgtgtcaagtgggggtgcgggcttctggggagcaaggtcagcaaagcaatagtcctccaccagaaacttcccgtcgtctctcacggagccaaacacagccaggacagtccccgtaaccagctttgacacgtcaatggtgccttttagtttgatacgctgcagttcatcttccaagaccagctcgtcatctgggtgtatgtatttactccgaggaggctgggggagcaggttgtgctcctcgctgacctcccgcaggatggagggctgcagcggcatggccttgaacagagtgcccaccacacagcacttctcctcaggctgcagttcacacagcttcttcactcccactccactgccccagtgctgctgggcccggttctccaggaagggtctcatttggatgaggcgggtggcataaatgtgggcatactgccggctaaagctgcgctctcctagccggaagggttgtgaggagttggtgtaggttgccactggcacccgggcaaaggtggcattgttggctgatggtggggacagtagagtgtgggccctctgggcagcctgctcagaaaacatggccacactcctgacttgcttggtccacacagcttcgcccaggccaaggaggttcacgcgcggcgcgccgcatcccgcccctcgtgccgaattcgccacccaggcctcgtacctagccg

SEQ ID NO: 130430 - DNA, 1158 bp, Homo Sapiens
gtgtgtgggaactctgtatgcgggtagtgctctcatctggtgtgcccaggttggagctcctcgtgccctgtttctggagatctgcccttgataaaaccctgtctggccttgcctgaggagtccctgcgagttactcgggaaatgtgtcggcttgcaggttccccttggtcccccaagcgtgcccggttagcgagagtcaccagcaactggggtccccaccaggctcatggcgtccacggccacccaggccccagccggacaccagtagcacaaccttatctgtgtcaatgggggtcgggcttctggggagcaaggtcagcaaagccaatagtcctccaccagaagacttcccgtcgtctctcacggagccaaacacagccaggacagtccccgtaaccagctttgacacgtcaatggtgccttttagtttgatacgctgcagttcatcttccaagaccagctcgtcatctgggtgtatgtatttactccgaggaggctgggggagcaggttgtgctcctcgctgacctcccgcaggatggagggctgcagcggcatggccttgaacagagtgcccaccacacagcacttctcctcaggctgcagttcacacagcttcttcactcccactccactgccccagtgctgctgggcccggttctccaggaagggtctcatttggatgaggcgggtggcataaatgtgggcatactgccggctaaagctgcgctctcctagccggaagggttgtgaggagttggtgtaggttgccactggcacccgggcaaaggtggcattgttggctgatggtggggacagtagagtgtgggccctctgggcagcctgctcagaaaacatggccacactcctgacttgcttggtccacacagcttcgcccaggccaaggaggttcactgcgaaaacacaaaggcattcctgctgcccctgtccatcccccaaagcagcagctctcctggtgtctcactgcacccaaaggatactgggaaaagaaggagaacagctgtagttgacaccagacattgtgtccacttggaaatttatcgtgcctggataccgatgtctcacccgcgcggcgcgccagcatcccgccaatccctcgttgccgatttatcacccagcctcgtacctagccgtaatcg

SEQ ID NO: 130431 - DNA, 613 bp, Homo Sapiens
cgctactgagcgatgtgactacttctcaccagccccgctgccaccaccctggttccacctgctgttctctcgcaaggatggttgtgttaactggtcccctgcctctgtctctttttaacctgttctccacccagcagccagagagaatcccagtcagagctgtccttctctttgtagactgcagcacactagcctctgacttcagacctttgcacaccacagccaggctaatcttccttcatgatggctctcatcacccttttcctgctacagaactcttcttggtgtcctgtcctgtcagggctgatctcctgcctggttcctaaacctctagaatctgacagtgtgaccctgctcatccagcctcacttcccttgcaacccatttgctgccacccacagctcctggcagtgcttgtaccccttccctggagcaccctcactcacctcttccctgacactctaggttgtaccccttctacaaaactgacccgttcatcttcccagagtgcccgcgtgtctacttttgtggcaacacccccagctttggctccaaaatcatcacgaggtcctgaggaccagacagtgctgttggtgactgtcatgaacgctgt

SEQ ID NO: 130432 - DNA, 765 bp, Homo Sapiens
taaaattgagatgtttattacttttctactgacagcagtgaaaatcactggaaattatacttttgtcctttttaaatgatttacattaaaatcatactttctcaaataactggtatagcagataaaattcagttttaaaatcctcaaaacacttagatatcaaagatagaaatactgattttttttccgttaatgatgagaagaaataagacaaccagtttaatcaagatctgacaattgcaaattttaagtatttaaattacagataaggaatatcgtttgtgcattttctagcttcatatggtagttagacaaccagaaaactaacagttgtcagactcaatgtcaaataatggaatttgggaaagcattcttaatatcactttcatttaatatgcactacatgcacatgatgcaggtagggaagaagtttatgaatccatgcattaaagacaagacaggctggcactattgccaaacgtgcactgagccaattaggatgttgctctaagttctttatacataatggtttccatgaaaatatgtgcagaagcagaaatgtgtacatatctgaaaacatcttcatttggtttcctgagctttctttgcgttctgtttttcttttgccttttctactagtggtattaactgctggtgttctgctaaagtctttaacaattccataatgaaaggcagataattatgcttccttctgatattctcaatcttgtatctttttaatttctgtacttcttcttcaatacc

SEQ ID NO: 130433 - DNA, 222 bp, Homo Sapiens
ccccagggaaaactagtgtatttttttatgagcaatatcaatttggagtgaccaaaagatacttaaaaatgggtttattttgatttctcatctgaaataatcatgttctggtattatatctatctatatttaataaatatatacattttaatttattatgtgtactcacctactatagaaagatattagtatgcatttaataaaacatattcacttgaatat

SEQ ID NO: 130434 - DNA, 1410 bp, Homo Sapiens
  misc_feature (140)..(149): n is a, c, g, or t
  misc_feature (372)..(384): n is a, c, g, or t
  misc_feature (394)..(498): n is a, c, g, or t
cgcccaggggggcacaaagggggttgaatttccccctggggcaattcaaggtttcatctaatcccgtttggtgaagaggtttccccgttcgggcgggaaggtttaaggaaattccaccacttcttccaaaaaatgccacnnnnnnnnnntaattttaaattgaacttcccttggactccccgtaaaaaatccagtaaaggcctccggaatcccttttggattttttcaaaaccttcggttcccccgggggttttttatttggggggatcccagcccttgtcatggcccggttttccttggaaacaggtttggcccagttccctttccttttggggccgcggccccaaagaaaggttttgaaaaatttttgannnnnnnnnnnnncggcaagggnnnnnnnnnnnnnnnnnnnnnnnnnnnnnnnnnnnnnnnnnnnnnnnnnnnnnnnnnnnnnnnnnnnnnnnnnnnnnnnnnnnnnnnnnnnnnnnnnnnnnnnnnctgtttccttttaatgacctcatttcaaagaagagccgtctcctgacaagggacgtttcccagagaggagacgtgttagtgcaacaaagaccaggccctggcagccacgaaagccctccagatgccttgaggacgccgtctctagccgggtgggccacgaccgggtggggacagacaatgacaagaggcaagacagccgctcagccaccctgccagtcccaggcactgtgccagagcctgccccatcctgtgccgggggctaaggcaccagggcggcgggagcgcaggccagactgggcagtcgcagtgccaggcctcagcagacctgcggctcgggctcgcagcccccgacctgcagccccttgctcaggaggaaggcgtcctgcttggggtcacggcccaggaagcgcctcagcatggcgctggcatcctcggaaccgccgggtctcaggatgcagcttctgtaatccatgccaaccttgctgttcaggacaccctcctgcttgaagcgcgtgtggaacatgtccatggaatacacctcgctccacaggtacccgtagtactgggcgtcgtagccacctgccagatggccgaaggttgcaggcatgttggttcctggcgtggccgggaccccgaggatctcctggcagagccgcgcatactcctcggcggggtctgcgtccgtctgcgtgttgcagggcctggtccaccttggcgaggacgatctggcgcaggttgaagaggcctgtgttggcctgccgggactcaatgagcttctccaggagctcccggggcacggcgctgcctgtgcggtagtgccgcgacatccgcaacagcggctcctgctcccacacccagttctccaagcatctcctcgtgccaatttacacccaggcctcgtacctaggcctt

SEQ ID NO: 130435 - DNA, 552 bp, Homo Sapiens
tttttgaagccagcatttccctttatttctggatggaaacggggccctaaaagcagaaatcaatatttttgtttgaaagatgcagtcatgctaatttcacttttggctaaaaccgagacgataaaagaacagttgggtgtttataggatgccctcaaagtgagctggctaagtgagctgggctctaacttcactcacaaatttatagtacagctaagaaggccagtctgtccatgaaagggagccgagacaagacgagggcggcctcttccaggcctgtgccaagtgtccttggggtcccgccatggtccacacttctgcagcatccgcagaacatgtggccgggtcctgcccagcagcagggacagccaagtgggaggcaggcatggtgcacacctggggaggcccctggtgcagaagcagccccacagtagcagccccatccagaggaagaccactccggagggcgacaggcctctgcagccctgcactgccgcccagccctccatctcagcgggatgtgcagggtgagacaggaatgcagggacgttct

SEQ ID NO: 130436 - DNA, 510 bp, Homo Sapiens
  misc_feature (106)..(124): n is a, c, g, or t
  misc_feature (442)..(458): n is a, c, g, or t
tttgttgttttcttccagaatacatacaaaaaaatacccattctcttcgatggtatacaccttaaaaataattgcaatttgaaatcagagctgacaaattgtgacnnnnnnnnnnnnnnnnnnngtaacaaacatgcatgtaaatttgtgtttcaatcagacattaaataacgtacaatacaatcatagcaattttaaagtaacattaaagagaagacctctagttctgtggcggttttgcttttatttataatctacaagggatgggagggtttgttttccacatttttaccctcaagttttaaaatttttcccacctcctttttacctacagagctcaaactaaataatgcacttttgaaccaccggtccgcttggagctaacataaataaataccagtgtccaccgatgcagtcctcagatgaacactttctcaattannnnnnnnnnnnnnnnnctataaaaagtcaaatgatattttttcaacttttataaaagttggtggggag

SEQ ID NO: 130437 - DNA, 305 bp, Homo Sapiens
aaaaattatactctcacgtaggggcatcttatgtcttatgtttataaaatttctaagaattctaatttcccttcagtgttcttccttcaaatttacagtgacagttaaagtactattcatgacatacaaaaagagtgcacaatctgacttttttcttgtttttgtggacagagagagatctccataattttgagatactctatgttaaactattttttaagttctctttttacatcacgtctgaaatgcacgagagtggcggtttctgtttcactggttttcttgttcattttttctgcacattt

SEQ ID NO: 130438 - DNA, 644 bp, Homo Sapiens
  misc_feature (604)..(604): n is a, c, g, or t
agtggctagagcgctctgatttttaaaaactgcaccccacacacagggtttcgccatctcagcaggctgtacaagacatgtttcagtatggctcttttctgttcttattccttttgttttgtatgaagactgcaatacaggccttgcttcctttacattcaataccagtaagattctacagaaaagctggaagggaccaaaatactgattgtaataaatatttgtgggcctccttgtactgactgggcagccgatgaagggggtggggaaaggtctctgagaggcaccaccgattgcttctaggtctacacaagagacaggtactgccattagctgtgcgtggagacatcggaggaggagctgctgttgctgttggtggtctgggccctctttatgtataagtttagtagcttcatcttgctccctgtgagctgtgcaaggtgaggtttcaggtcttctccgattacggaataaattgccactaagcaaaacacgctggccttacgcacacttatttcgggtgtgtcataaccctgcagcaagcctgggatgatgtcgacaaggagctgcagcaatgactcctttgcgatcctctcgacgactntggtctgcatcttgatggcagcaaggttgatggggtagtc

SEQ ID NO: 130439 - DNA, 927 bp, Homo Sapiens
ctcaaaaccgagccattgacttttcccagtgcttgttcttcatgtcttctccatcccagttaaagcatcaccagccagccagtcattcgggtccaacattttggaccctctttttgtcgctccctacatcctatcagtcatctctggcttgtttctggagtttgtcctttgctcactggtgctgcttcagtttaggtgcttatcttctcttgcttgaattattgcctgggctcctcgttggcttcttcaatctgtatgctgttctttctattccaagatgccagtcacacagtttcactctcctgtttcacaacttcacacttcctgttgaaggtcattaagccttagtctaagtgctggtggtcgtgggcagacctgtttctccaacattatcacctgctccgcccacacgctaccccctcaactggctgttcctctaagatagtatgtgtcttctgacccttcctccttccatcacctctgcccttgtcctctctgcaattggcagacatccgtaaagaaccagccagatgtctccttccctgttgaccttttcctgattcctccagccttccatcctgttgctccttctctgcataaatagcttcttttttttaaacgtttctctcttgtagcagcaatcactttgtgtccgttatttatgtgcctgtaagcactgaccttggcacaatgcctggcagatagtagggactcaagaatatgttgacttgaataaatgaatgcatggaatgacaggatctcttgagacacaatctagcaaggtgaaatttattaaaggcaaatgtggatcaagaaaaccaattttacaagctcaaagatggaagggatatggtttaacagcaaaatgtgttaaaaattatttaggggttttggttgacagtttagtatgagtcaccaatgtgaccc

SEQ ID NO: 130440 - DNA, 660 bp, Homo Sapiens
gatataaatgatcccttttattgtaagtaatgcgcaacactggcctggctttgcactgcaagccctcggtcaagatatagtcaaataactatggctgcaggttccacagttccacaataaccatggctgcacgatccacaattcagacacagacatagagctggggtgggtggaaggggcaggagggtggcagagtgcggactgtccccagccctggcctctccatgcagagttggcccaggcagacacaccccatggaatgatgagaaagtgacggcacggccccttcccacagcaagcctggggctgccaggaactgcccttcagaacctttgggcccaggtcaccctgaagccccacaactttttatctggattagttattaaaaaacaataaattaagcaacaacttggtcctgaggatgctgagccagcatgtccacagtttttggcacaaaaaaattagggtctgttttgcttttttggagtgcagggtttgttggcttgtcttcacattcattttcacaacacattcccagtgaggtaagaccccagggggtggagctctgtaagaccctgaacctgggacgcacagttgagtcagccagcaccgtgctctgtatcctcttggggaacagggactggggatgggggtgcgggc

SEQ ID NO: 130441 - DNA, 634 bp, Homo Sapiens
  misc_feature (577)..(577): n is a, c, g, or t
  misc_feature (622)..(622): n is a, c, g, or t
gttgatcaatgcttgtgtatttcaatccacaatctgaatatacttaaacccagaacactgcgtggtggttagaaccccatgggggccaggaggtcgacaccagcgcccctctttcatgtcagggccacggccgaagctgctctgacactgacaaccaggcgtttcgggagcccagccaacaggagccagcacttccgagcaagtccgtgaggaaagaaatcagcaacaccatctgccggcagccacgatcccatgcaccaggaatccatttcggctgggcctttccttgcctcactggattttccagacgcccctcacagagtggacacagtcaatgtccccatttcacagaggtaacccgatgctatgaacagtgaagccacttgtcccggtgccccagcctgagcggcagagcagggactggccgggcctgactggcgggcgtccccacacgcgctgcactgttcatgtttctgttgcgccctctgcctgctttgtgtatttcctggtagggaaaaggcgatcggatttctccccagcactttgccaacggatcccttagggcatggcaccgcanccggctgcccgaacttggtctgtggccaccagatgccggcctcanatgctttgggac

SEQ ID NO: 130442 - DNA, 1348 bp, Homo Sapiens
ggtccggaattcccgggatcggaagagcaggtctccaggggtagcgatggcagccgggggtctgagccgctccgagcgcaaagcggcggagcgggtccggaggttgcgggaggagcagcagagggagcgcctccgccaggtgtcgcgcatcctgaggaaggcggcggcggagcgcagcgccgaggagggccggctgctggccgagagcgcggacctggtaacggagctgcagggccggagccggcggcgcgagggcctgaagcggcggcaggaggaggtgtgcgacgacccggaggagctgcgggggaaggtccgggagctggccagcgccgtccggaacgccaaatacttggtcgtctacacaggcgcgggaatcagcacggcagcgtctatcccagactaccggggccctaatggagtgtggacactgcttcagaaagggagaagcgttagtgctgccgacctgagcgaggccgagccaaccctcacccacatgagcatcacccgtctgcatgagcagaagctggtgcagcatgtggtgtctcagaactgtgacgggctccacctgaggagtgggctgccgcgcacggccatctccgagctccacgggaacatgtacattgaagtctgtacctcctgcgttcccaacagggagtacgtgcgggttgttcgatgtgacggagcgcactggcctccacagacaccagacatggccggacctgccacaagtgtgggacccagctgcgggacaccattgtgcactttggggagagggggacgttggggcagcctctgaactgggaagcggcgaccgaggctgccagcagagcagacaccatcctgtgtctagggtccagcctgaaggttctaaagaagtacccacgcctctggtgcatgaccaagccccctagccggcggcgaagctttacatcgtgaacctgcagtggaccccgaaaggatgactgggctgcctgaagctacatgggaagtgtgatgacgtcatgcggctctcatggcgagctgggcttggagatcccgctatagcaggtggcaggaacccattttctcactggcgatcccctgcgtgctgtgaagaaagcagccaaagtcggaaattggtggcagaacagagagaggccgcccgggaccggggtgcgcgttagtccggccctctaggggggtttggggggcgggcgcaaggcccaagggaagggtccctgcgccgaaaacagcggtggagccgccgagaggggccccgtgggaaacggggggatacccatatttgagaccgggtgtcacacaaccctcttgaggaagtataggccccattatgtattcgatatctaac

SEQ ID NO: 130443 - DNA, 1422 bp, Homo Sapiens
ccccggagggggtgttttaaatcggacgaggggcaatacttgggtcgtctacacaggcgcgggaatcagcacggcagcgtctatcccagactaccggggccctaatggagtgtggacactgcttcagaaagggagaagcgttagtgctgccgacctgagcgaggccgagccaaccctcacccacatgagcatcacccgtctgcatgagcagaagctggtgcagcatgtggtgtctcagaactgtgacgggctccacctgaggagtgggctgccgcgcacggcatctccgagctccacgggaacatgtacattgaagtctgtacctcctgcgttcccaacagggagtacgtgcgggtgttcgatgtgacggagcgcactgccctccacagacaccagacaggccggacctgccacaagtgtgggacccagctgcgggacaccattgtgcactttggggagagggggacgttggggcagcctctgaactgggaagcggcgaccgaggctgccagcagagcagacaccatcctgtgtctagggtccagcctgaaggttctaaagaagtacccacgcctctggtgcatgaccaagccccctagccggcggccgaagctttacatcgtgaacctgcagtggaccccgaaggatgactgggctgccctgaagctacatgggaagtgtgatgacgtcatgcggctcctcatggccgagctgggcttggagatccccgcctatagcaggtggcaggatcccattttctcactggcgactcccctgcgtgctggtgaagaaggcagccacagtcggaagtcgctgtgcagaagcagagaggaggccccgcctggggaccggggtgcaccgcttagctcggcccccatcctagggggctggtttggcaggggctgcacaaaacgcacaaaaaggaacgaaagtgacgtaatcacgtgctcgatgaagaacacgttggcactttgcagatggccagtgtcatcggtgaacggctggggttgcccccacgggtctagggagaacgaactctttggggatgacattttcaccgtgacatttttagccatttgtccttgaggaagccccttgcactgctgcggttgtaccctgatacggcctggccatcgaggacacctgcccatccggcctctgtgtcaagaggtggcagccgcacctttctgtgagaacggaactcgggttatttcagccccggcctgcagagtggaagcgcccagcggcctttcctcgctcaccaggccagtctcagggcctcaccgtatttctactactacttaatgaaaaagtgtgaactttatagaatcctctctgtactggatgtgcggcagaggggtggctccgagcctcggctctatgcagacctttttatttctattaaacgtttctgcactggca

SEQ ID NO: 130444 - DNA, 885 bp, Homo Sapiens
agacacaaacatctagtttattttttctgactgtaaccaaagtcagcaaaagaaacaacaaaacttcagtgccctagaaatcctcctggattcaatgacaacacatcaatggccgggcacagggttggattccttttatgaaatcaccttataatctctcatcatcccaggacagtgccttttgggactgcatgaatctttaatagctacaccacattttctcatcctttaagttatgacagacaggttatctctctccaagagcatcaggttagatgctctttcactcttacaaactgtcaggtggagggagaatcacgacatcgttcataaataactgtggagtctgggatgctggctgaaggcatctccaggaaggactggagggcgattttgctaaagggctgctcactgctcatttcactgcatgccgcttttctcactttggttgggagtttgaaggaccatgtaatcacagagattagagctccctgtgaaatcaatcactgcctttagatctccacaaagacctgttctccaatagcacatgcgtttctctgtgagctgtattcgcatcagcgccggagcctcagaaagaatgcgtgtttacactctgtactctccaatgggtaatatttatcatagaaatctaatacatattcttcagtcttgaatccaaacttctggtacagtagcatagcggggttgcttgctgagacgtgaagcggttacgtccttgcccatgcaggtctgaatcagatgatagatcatgaaagttgcaatccctgctcttctccattcagggtggacgaacagaaatgaaatgtaagcttcattgtatttcacatcaggaaccatgaagccaaaggcaatgatgactttttt

SEQ ID NO: 130445 - DNA, 2135 bp, Homo Sapiens
  misc_feature (283)..(284): n is a, c, g, or t
  misc_feature (286)..(297): n is a, c, g, or t
  misc_feature (301)..(304): n is a, c, g, or t
  misc_feature (308)..(309): n is a, c, g, or t
gggcctccccggttggaaaagaatcccagttaaaggcccttcaaggaaatttccatttgggaatttgtttccagaaacgccttcggttgcccccccggggcgtttttttaatttggggaggaattccaaggcccttagttcctggcccagggtttttcttagggaaaacaggttatgggcccatgttccatttaccttactgggccccgcggcgccaaaaggaaatggttttagaaagctttttcgaggggccgagggcggcccgacaaggttttattttttnntnnnnnnnnnnnnttcnnnntttnngccaggttataaccattggccctttaattgaagagtctaaaaactagaggtctgtaacagaatactaatcctgcagaacaagggacagaaaagtcaggcgaggcaagcttgtcttcgtaacctgggctctcaattggggtgctctcttacatttcaattgaatatctgtttttaaacctcccttcaacagtcagggtgtctgtctattttgtggcttccaaaattctaactgcaaaataaatgaccatcttatcatgttttcccatggctatcaggaggatatagcaattttatagattactacatggtcaagaatctacgcatcggatgtattcttttcttcttctttacttgatgcattcaaaagcaaccactggatttttttcaatgtaaaaaagtaaaaatagatacccatgccaaaattcatgggtgtaaacagccaacagagccaaacttacaaagaaaatgaaagacttgtttctggacagtggttttattggtaaagatataagacatattggctctattaaaaactcaggtaataaagcactaagcttgatttttgtattgctacagtctctttcttctaaggggaagaaaatctccccaagaataggatgctacctgaggaattatgccgaataaagaaaaggaatggatggtcggcagtgaaattttcttcgggcatcaacatgcagaaagttgcgatgcctgctgtggcagctgccgcctctgttccctcttcattcacttccacaaatgacttgtggacaatttttgatataaaaatatctctggctcctgacatgccagacagatcagccttgctactgttaaagagatcctgcacacctaggcgggcgaggtcggagttgagagtgtaactctcttccagtttgaacctgggcaagctgacattaacttcaatgaaatcgagattctcaggtttagtccactcatgcaacttttccaaagtcaactgttcctcaatcttcttcaggcccgtggactcgtcctcaatgtcatccggcagcaggatgaccatgctgagctcctcgccttggtaaggcagttccagcacacggcacttaaggtcctcgatgtagccatatgcaaattttttcttctgatacatcattttcacagtttttctgtctttcttattcaatctgaatggtgcattcgtcgtggcttctttcatgaatttatccttccagtttcccttgaaatagatggcatttactagcacaagtttggtcatgttatcaaccatgcccgaagccaacagttccggaatttttccttctgtctgtcctttgacccactggtttatggtcttccttgcatcttcagaggcatgctgaaaatccacactggccaggtcagcaccatatgttttctgagtcgaaaccaagaactcaggaaggaaattgtaagttttctctccatataatctattagcaagtttcagaatataagacgctccacgtttgttgatatcagcattcagactctggaatcttgaatgaacctcttcaaccgtgttgaaatggaaagtcttggacagctgtgctgccgtgttacctctggtccccagaaaaaccatggccatagcagatgaaatgctgaagggagagatgaagatgtttccagccggattgttctcactcaacgccaggaacaggtccaaggcgaagcgggtgtttgctgagctcagctgctccatggtgaaaaccgacaggccgccgaggcacgctccgggctccgagctgggtgcgcggacgcgtgggtcgacgatatcccgggaattccggaccggtaccagc

SEQ ID NO: 130446 - DNA, 836 bp, Homo Sapiens
  misc_feature (665)..(699): n is a, c, g, or t
  misc_feature (702)..(741): n is a, c, g, or t
attcgtcgttggcttctttcatgaatttatccttccagtttcccttggaatagatggcatgtgactagcacaagtttggtcatgttatcagaccatgcccgaagccagacagttccggaattgtttccttgctggtctgtcctttgacccactggtttatggtcttccttggcatcgttcagaggcatgctgaaaatccacactggccaggtcagcaccatatgttttctgagtcgaaaccaagaactcaggaaggaaattgtaagttttctctccatatgaatctattagcaagtttcagaatataagacgctccacgtttgttgatatcagcattcagactctggaatcttgaatgaacctcttcaaccgtgttgaaatggaaagtcttggacagctgtgctgccgtgttacctctggtccccagaaaaaccatggccatagcagatgaaatgctgaagggagagatgaagatgtttccagccggattgttctcactcaacgccaggaacaggtccaaggcgaagcgggtgtttgctgagctcagctgctccatggtgaaaaccgacaggccgccgaggcacgctccgggctccgagctgggtgcgaggtcccccggccgtaatggccgaattcccgggcatatgtccggtaccgtcgactgnnnnnnnnnnnnnnnnnnnnnnnnnnnnnnnnnnncgnnnnnnnnnnnnnnnnnnnnnnnnnnnnnnnnnnnnnnnntcttaggcccgagcggctatggccgcccccctaattagttgagtttctattttaccattgtgttgggtggcgtggttgtgtgtggttgttgtgta

SEQ ID NO: 130447 - DNA, 956 bp, Homo Sapiens
aaggaggcaaacatactttattttgactaatttgttagtaagtttattcttcactcataaaaagaacatatttttggctttgaaatcatgacataaaataaaaagggaaataactgaaaattatcagctaaaagtaggtagatgcagctcatgctgaatcatcagcaaatactacgtgctttgggctatagcagggcaccaatcaaagcaagaaccaaggatgcagtgccacgccatctctgaaaactgtttagttcccaaaggttgtttggtcctcacatacaggcaattaatccttcctttctcctgctttccttctttccttcttaacttttagctatgagaacagtgggcaataatgcttttatactagtctttctagtttataggatagtgttgttgttgttttaacatgtataacctgcatattttcaaccttcaaaaaataaaactgccaaaatcaactgtaactaaaggccatttttatttttggtctgttatctgctgtaggcagagcttcatataggaatttttattgcgaatttctatgactgcatccctaacaagctcaatgaacatctgtggccaaagcttctgcaaagcctcatttttcatgttgatttctgtggcttccttcacaaggtcttctatatatgttttacagaatttcttcttttcctttatttcctctagcttttcattataaaagtctcttgtagtataatttaatgtagcacgatttgtgttttctcctacaagtcttttgctgtcattattttcttcgttgataataccaggtttttttcctttggattctagtagataccgaaattgctttttcctggcatcacccagaatggaaatcagacgatactggggtaactcagaagatgctacatgtgctaggattccaaagagcctttcagccattatcatatcattctgtgtcacctctg

SEQ ID NO: 130448 - DNA, 729 bp, Homo Sapiens
tttcatttttgtcatttattaacctggaagcaaatatgacaaaacagtcatactagtaagtcatctgaattttttaaatctcttaataaaacaaccaaatcccacgcaaatcagtccacaagggaggcccccgcctccacagtgcagggtgactgagtgtacaactacgggccaacccccgcctctcaaccggaagggagggcactcaaaagaggaatttagagaaaaggcggagagggcggacctcgggaaagggtctgggcgggagccccacctggctccccacccctcccgaaaccaggggaaaagcctgtggcgtggcgctgctgtctcccattagcagttacagggccgaggcttcccgctgattggtggaaattccgatcttctgatccctgatttgcatagagactggggcctgcacccccgccccccaccagcagcaatcggccaacgccaacggtgctgcgccaggagcgttctgggctcggcgccgcccagtcctcctggtcatctcggaagctgttttcttccagctgcttgggacagcttttgtgaatgcctcccttagggatgttcgaaagaggagtggcccgacactgctagaaactggtcctttccttcccacctgtggtaaggatagtttctgctacggcaagcactcaaactcaggctggtttgaagctaaaggattcagacgacttccaagtatcaagaatgaaagaaaaa

SEQ ID NO: 130449 - DNA, 983 bp, Homo Sapiens
  misc_feature (770)..(770): n is a, c, g, or t
  misc_feature (820)..(820): n is a, c, g, or t
  misc_feature (882)..(882): n is a, c, g, or t
  misc_feature (908)..(908): n is a, c, g, or t
tttttttgggatacacattcgcttttaataaaaaagaaatttcctcctacaattgatcctgcacacgggggggccatgagccacgcctgctgactcattcctccaattctcaaacacaagcaacgattcaggtcctggtgagaaccattcacgactcctccgggacctgttccaccctccccgtcatgcacagatgatcttagtaaccagagtaagagtctgcctgagacacgagtcttttttcctggctccaagggctagtgccaaagttcctccctccaccggggagggaggtgagacttgagtccctgagtgggtgtctgggtgttcacgtgtcctgctgagcagcgcggggcggctgcctccaggtcaccacacctggcacacccggatcacctccctcagcgccttcagcccctccatgcttttgtccttcacggccacggcgaggaggactgctctgtttccagcttcttgagacacaaacgctaccaggttctttgcaaagacatggatgagaggctcatcctgccccagaaggacttttgtggtgagcacaggcttgctgacgtcactggccacgctgctgggctccagggagaccagggtgcccatcttcccaaactgggtcaccaccaccaggatgtgactgctgaaggccgtacacaccacctgggtggggaccccgcacaccacctccgtcttctgcttcgatatcaccaacggcgtgtcttccatggcggggctctgcagtggcagctttaatttanggttaaaagaaaggggaaaaaaggagtcaaatcaacagtacagccttggnggctcccaaaaagtgcacggggcattgaacggaacgcaggaggccattcaaaagaagggcangcgcggtggtcatgctgtcatcccgnactttgggaggcgagacagacatcgttgagggcagaatcgagaccagctgggcacatagcgaaccccatctctac

SEQ ID NO: 130450 - DNA, 862 bp, Homo Sapiens
aaagccctggagtgcagagaagagacatgcagggtaatgaattggtgtctccctcagaccactacttgttcaatctttattagaggaaaggctgacctctgtatgggcaagaaccaagcaggaagatcatgggagcactcagcctaccctctgtggtcataaacaatctagctagagtccctgttttatatatcctagtaagaaaaacagaaaccctgaagtcaaacagcatattcctctatattctgattatgccctactttctacccctaaggaatttaacaaatcattacttccaaccccacacagaatcctccctgagagaagagctggtaaatatattttccatggatgtgttagcctactattgacatgttagtgcccttatagtttagtcctccaagcaattgtccagttgttttgtgtttaatctgaccctgctgacagtcattactcaaaatgaagaaggcaatctagagagaaactgtagctgatgctcctcttctctcagtgggtggacagcccatccataaagtcttcttgatgatggtgtccaggagccaggatccaaggagctcaacaacagcagtgggaagaattacaggaaaaggtcatgctcctccaagggagtgggttttcctttgtctcagcaactgtaattttcttccacttttaatactaaaaagccatctttatttagattcaggaacaggaaaggcgaaacaaaagagggaaattattctgttattcatacacaaattgcagagacgtaggaccctcagtgaatatctcttaagcaatgatcagggtttagaaatctatactgaaccaaagcacaggagaatatttttctcctcgtgcc

SEQ ID NO: 130451 - DNA, 1199 bp, Homo Sapiens
  misc_feature (135)..(166): n is a, c, g, or t
gctcaagcaatcctcccatctcagcctcctgtcataggccaccacacgcagctaatttgtgtattttttttgtagagctggggttttgccatgttccctaggctacacttgaattcctgggctcaagcaatctgnnnnnnnnnnnnnnnnnnnnnnnnnnnnnnnnagtgtgcagcaccatgcctggccctgcataattatctgatgtgtatctcaaggcactctaaaagttgcttgagtagaatggggcatctgtctgtagttggttaccctgggacatgggcacattcccctgggatatcgttgattctttccaaagagaaagacagcagatgaaagaaattagggttttgtctcctggagactgggaaagtctcaggtttaccttgtatctccaaacctagcacacacctggtacacggcaatggcatatgctcaatagaaatgtgatgaagggaaggagagggagaaaggtagcggggaaaaaaggaggggataaagctcccatatgctctacagtgtatattcctacaaccttcctaactccaaaggggagaagcagactcactgtatcctaaaacattgataaaacacccacttcagaaaaaagtaataacaatcaagtaactattgaagatctatttgacctaacagcatagaaacagaagaattacacactggccagctgtagcgtagggcctgatcttaatgttttagagctggagaggcctggagtcactcaagaggcatccaaatggaatgtgaaatgacttacccacagtcacatagcttgttagtattagaacacaactaaaacccaggtctcaaaattcccagcccagcatttttcacgctgcagtttcctatatagaacagaagcaatagctgttcttgaatcctatcccttcctgtttcctaacccaagtcacttcatatgtccttccgcagaggccctgctaaccttaagccctttcctggtaccacagaactttgtacaacttgctggggggaaacagcccatggtcatacgccatttatagaatgcaggcttatagcctcgtccgaattcggcacgaggaagacagcagattgaaagaaattagggttttgtctcctggagactgggaaagtctcaggtttaccttgtatctccaaacctagcctcgtgccgattcacacgcggcctgatccatgccata

SEQ ID NO: 130452 - DNA, 999 bp, Homo Sapiens
  misc_feature (229)..(229): n is a, c, g, or t
  misc_feature (280)..(280): n is a, c, g, or t
  misc_feature (408)..(426): n is a, c, g, or t
  misc_feature (886)..(946): n is a, c, g, or t
tgatgtcttcttgatgttggctgcttcgtttctcttcgtcttcttcttgtccagcacggtcaacacgttgtcttgctgctcacatgcatttcgcacttgaactcgcccttccacttttgtggccaatggtgttccctctgccgtgcgcggttcctgcttcgttctcgatccgacacagtctgcctggtcgatccgataggtgcgtcattctcgttctcgtgtcgctctnttttgtcgcacagagataatcagcagttaatccggggcttttccaaattanataacgacctccctatagggggaccggcagatttacccccttgtacaaaaaaactgggtcaggaaacagctatgacaagggcccattcaagacctctttttcccgcacccgacatagaagcctcgagnnnnnnnnnnnnnnnnnnnaagctcttaaaaagatcatttataaaataaagtgtaaaaatactcaaatcactcaacataaaaatgtcaagtatctaggattatttttatctctaacacaatggcctcaaagtctaagtaaaaataaccagtttacctgaacagagatcactagtactgaaaaatcaatccatttgtatcaaagtcctccacagagtgtcctagtcagataatctgcaagtcttttgacttctcagacttcttctcttacgttttgtttgttgctttctgtagtagaaactgctgacttgtcagctaatgcaggctgaaggcaatgtactccctatgggcagagtgcacagcggccgcgttgctgtaacgccacaggacaatcgccgatgacaggacgtccaggatggcatcaaatgcaaacccaaaagcagaggcgctgtacctcataacggagacagttctgaaaggnnnnnnnnnnnnnnnnnnnnnnnnnnnnnnnnnnnnnnnnnnnnnnnnnnnnnnnnnnnnntttgttcaccctcggtgccgaatttacacaccccaggcctcgtacctagccta

SEQ ID NO: 130453 - DNA, 928 bp, Homo Sapiens
gaatggtccctaaaggagcggccaaaatacttggccattgttgttggacctgtttttcaaacaagggaacacagtttaagcccccggggcagggaacccattcgttttacccctaaagtctcacagtgtccagtagatacttaactattagttgtatttttaaacatgaccaccaggttccatattttcatgattccaagcaggttccatcatggcctttatctacaaataaccagcaaatgtcatcctttagccaaatatttttgaagcatccagctctaccttgtgtctccgataatctaatgaactcaacacagagtctgaccaccaggcccataggcaaagagttcaagttccatttgacttgaactactctgtgagcaatgaccctcacccccaagtgaacgaagactccctaagggctcacattatagaaatggaagatagatagtctgccagtgtctttattatcaaagcctggagtgcagagaagagacatgtagggtaatgaattggtgtctccctcagaccactacttgttcaatctttattagaggaaaggctgacctctgtatgggcaagaaccaagcaggaagatcatgggagcactcagcctaccctctgtggtcataaacaatctagctagagtccctgttttatatatcctagtaagaaaaacagaaacccctgaagtcaaacagcatattcctctatattctgattatgccctactttctacccctaaggaatttaacaaatcattacttccaaccccacacagaatcctccctgagagaagagctggtaaatatattttccatggatgtgttagcctactattgacatgttagtgcccttatagtttagtcctccaagcaattgtccctcgtgccgaattcaacacccaggcctcgctacctagccttat

SEQ ID NO: 130454 - DNA, 1024 bp, Homo Sapiens
gggtattggggtagtgcgggggttggggaaatagtagaattggtgtcgtgagttccccaagggatgggggggagattttagtttaaaatggttccgcaggtcctatttgggttggtttccctttaattaaatctcaaatttacaagagtccagactgtctggacagcccaacagggacacagagagttttacacactgatgtctcaacagcacagggttccatcgggacttcgtgagaaaatcaggatccatgtacgttcttgaagagctgtctctcggcctaagataagtggagaaggttgccttggaagcgtggggtagaggtaggaacagctggctctctggccaaggcctttggctttttcgcggaagcaaaaaccgaaccacgggaaggctgctccgagtctggggtcagaatttcctatcagtgagtgcagcaggccagggagaggcgaaagggagtggagaggactgtggtgaaagggagaggggcggcccctgcacagcttcaccaggcgtcagtgcaggctcagacggccggactggcgagttttcaagagaaactccaaatccagacaggtgtgtgtgatctcttggttttaaatgcagacaaattccaaatgtctcaaatactgaatggagccagctagacctaccttctcaccaagtaaggcccacaggcccctgccgcaacctctaccctccacagacaaggttctgcaaaacagtcatgggaccttgtttcacctcccccacaggcacccaaaataaccttcctgacctgcagcagcattttgcaatctttgagaacccctgccccctgctgacaaacaaaaatggcaaatagactcccccacaccacgcctccacgccctgagctgagaatcgcccgcatctcgtgggtggtaccagagccaagacgacagccaagctttgctttctcagctctgtcttataaaagcaacatggttggctggttggttgctgattctccaaatatgaaatcacgatattacaatgtgca

SEQ ID NO: 130455 - DNA, 692 bp, Homo Sapiens
  misc_feature (432)..(432): n is a, c, g, or t
tttagataggctataaaacttcatattatgaaagcaatatattccaagtttcaaagatttgacaagttctgtagagtatctttcatcagtacatgaaaacttccaaactgcatgatcttctgccaggcaggactgggtgctattcgctggtttgaggtcgaatccatttcaaggcatgtcgtggtgggacattaatggtgggatggtagaatgtgcagtccggtcttgtacattgagtgttaaacctacaatgttttggatgatagaagggacattccatcttcttacaagcagggaagtaacggcagagctgactactggaaggtggtgctggtggtgcaactggttttggagacagtactggaattcttctactcacatgagtgaagggacaatctggtttagtacactttgcatcatatttacaatttngggtgaacaaacaaacatttttcagcaaatttacaattggggaaggctttgcagggtgagatggggtgatggtaggacactcatccccatttttacaagcaggccagtacttgcagcgctccaaaagtttttcgtggtttctgtgccacactcagttcactcatctcagcgttagaaaagctaccatttgggtgaacaaacaacatttttcagcaagtgcaactgctgtgggtggaggagacctctgagtccttgtttga

SEQ ID NO: 130456 - DNA, 1677 bp, Homo Sapiens
  misc_feature (1566)..(1600): n is a, c, g, or t
gagccagactcaggagcaaccaaaagttcaggtaaattagggttttttccgggaatgaactgattggtttttgctaaacatgtttaaagccccaaaagattaaaaacgagtttaaaaatacctatttgtgccaacagtggtgttttgcagtagataatcttcctcggaaaccatatactggtaatatagtgccaagactgaaaacaaacgataaacataatcctgatgtttatttatcaaatgtcaatcagtggaatctttgactggcttttaaaataagggcagtttcattacactggcatacttggcaaaccaggtaagtacagaaacccttttcaagatttaaaaaatggagcaacactggtcagcatttggtaccgtgaatataatacacctactgaaaatcttcccatacatcatgaaaacttggaagtaatttgtatagcttgaaatgtcttcattttagaatattatgcacaaaagagcctcttcaggaacagaaaagtggcattttctgtgtttcaactacaatttagaacccaactggctttttatgttatattaagtatattatacttcaagttccagagtatgtggggcataaaatcctgattcaagttttatatgacaaaaaattctagtaaatactccttttaataaatggcttatcaatattctcagagtcagtctaatcatccaagaaaaagtagtttccactcttcttttgttctacatccttaattgaattaagtttgtttattcgtggcctatagttgtttggatctcttctgaatgtaatttcaagctgagacaaaaatttattcatgccagccaaaagggtttgaggactgtttgcaactgtgttcttagatggaacaccatcaaaaacgatggacgcgatccgctagataggtggccatgatgaagtcatgttccacaacaaaggctgtcttttttgcatggagtatgaaacgtttgacaactcgagctgccatcagtctttgctcagaatccaaatatgcagatggttcatcaattaaatagacatcagcaggtttgcccaagcaaagggctaaagctactcgctgtagttcaccaccagataatgtctgcacctcttgatcaatgatgttttcaatttgcagaggcttcattacatcggtcactaattgtgggtgagtataagcatctcttatcttttcatgtagtaactggcgaacacttccagttgatttgggactaattttctgctggcttataactgacatttagaacctggtacttctcctccttcatcaggtttaagtcttccagcaagcattctgataaatgtcgttttacccgttcctggcacacgacatatgacagtttgatctgaaagatgcttgacgtttaaagtaaatcacctatgtcctatttggttttagactgagaaactttgcttttaaagatatacactgacaattattgaattctgaagtttatatagaaaaatacttaagtctttcatggctccccggccgtaatggccgaattcccgggcatatgtccggtaccgtcgactgnnnnnnnnnnnnnnnnnnnnnnnnnnnnnnnnnnncgccgcttcctcgctcacatgactcgctgcgctcgtcgttcgactattacgcggggcccctatatgaagtctatcag

SEQ ID NO: 130457 - DNA, 1534 bp, Homo Sapiens
  misc_feature (58)..(93): n is a, c, g, or t
ggcttttcgctgtatattttatatattttttggcttgtgaatggattttttaataccnnnnnnnnnnnnnnnnnnnnnnnnnnnnnnnnnnnngtccagaaatttgacgttcttgaaaacatgatttatcacataatatatacatttactttgcttgtcacttgaaatgcctaagaaaacacaaaatcaatcttaaactagaaacttctattgaatatgacatgaagagagcacatattccgacaatttcaagttcttttcatagccttccagtcctaataactcagcgttaacatcttattctgttcagcactatttgataatttctttcatcctcatgggctctagtattgatgtttcatcagtctcaattttataaaaccatcctttactttgtaataaagcaatgctgagagacattttccataatgcagggggaaaaatgtggatcaatcacaaactcaaagaacgttacagttataatgctttcgacatttttttctacttctgtgatgctttttcaagataagcttccccctccccctttttttcccctccacctgtgcactgtcttatcgcgatatactcttgacttctgaaaatcaagttgcaggattggtatgactggaatgcagaggttctcttgaagtagtgtcaccacataactattctctattgataaacttatcgcaaccaagttcttctatcagagggttgataacttcagaggcagtcagagctatcgtaaaggttaaaatatcgaggtccaccctgtgaggatttccctgatattcggcatcaaacgctgcttcccttgctctgcaggcttccccgaatcgcctgcggcgttcttcaagctcttgtattctgccgggagcaatcgggtaattttccagatagtggcggagaaactgctggtaattgatgcctaaaacgctaagtgggtggcggagacggagatagggcaacgcagccaggcctccgttcccgtgtctggacctgggcctgccctcgggaccctcttcgtccactggctcccccagcaagcgggcgacctccgccatccgggcttcctggccgccgccgccgccgggctttccctgccccgccgcggctggcctggccaacgccgccgctgccaccaggggctcccctggctgccgccgccggggctgccctgccgccgccatccgaccttccttgccgccggcaccgggcctccctggccgccgccatcgcgccttccccggcctcctcaggctgtgccggggccggctcccgcctcccgcggcctacctccgcctgcgggacgtctctgtcaccattcgccgcgcctgtctgcgggacactgctgtctgcgggcagcttggacatctcagaccgtggggtcaactcggctgctcccagagaaactggaataactggacagagcgatgcccggcggacaccccagtgcgcgtgcgtagggcgctatgcgcgctgtccccggccgtaatggccgaattcccgggcatatgtccggtaccgtcgactg

SEQ ID NO: 130458 - DNA, 963 bp, Homo Sapiens
gaatttccgctgaatacctgtcccgtgtccatgggcagcctctgggccgtgttccctaaaccatggtgaaaacagctggtctcaacacacaaacaagggtggttgagtttcagcatcagctctggacatggcccgcccaaagccaagcattgatctttctccattttgtgtggagcctgtgccagtgggtacggaaccgctcccagtaagcggcactttgtgtttctgacggacacttccagggcagctcacaacacgtcgaggttgccttctcctcccctctgttcagaaagtaagagcctgatgaaaaccagcagccaccacttgttgagtgcttgctctgccaggtgccatggcaagtgcttgcccgttcatttttttcttgtgatcttccttatatctcctcatgcttgtttgccagatgcatcttgagtgcaggctggtataaccagtgtaaggaagagaacccacactctccagcccctcgtgtgccgtctgcagctctctggactttgcaacattgtgcccactgggcagcacccacgcccatccattggacaggggatgcgctcagcttctttttgaagttggctagatggcagccagcagagcaaaaaggaacgttggtctacaccacgaggaagggagccaggttttggatgcccctctgagcagaatggacagttttctctttttcctgaggtggagttggattgttgccacctgtgaagaccaggtgcctgttttgttgtaaggatgttaaggatgatcagaaaaacaaactactgctgatagctggggattttagtttcttttttaccctaggagggaacaaaaaggcattgttttagggccagaacctcagctgccggggaatggctctgcctctgggttttattctcttcctctttgccataaaatcagtcatggagcttgggagtttctgtttgtttgttgttgttg

SEQ ID NO: 130459 - DNA, 691 bp, Homo Sapiens
  misc_feature (75)..(84): n is a, c, g, or t
ctcccccacaaaaaaattgacaaatggacaccagagagaaattctttctttattgaagtgcgtctggaagcctcnnnnnnnnnntgtttaaaacagacttggggtaaaaggggaagaggaagaatgtgtctcaacagtagccaacaaaaacattcaagataaataaattcagcattctggcatctgtggacccagaaaaactaggttgcagattaacttaattaggaaaaccacccacaacaaaccaatagcaccaggagagggagacggaaagaagagactgaaagaatgaagctttgtcaaaacagaggtgtcagaatcacaagtaaaataactcccaaaggaactctcagcccttcataggacatggtggtctctgcatctcattcataatgtttgccttggctgaggttctaaaccacaaaaacatctgtacagaaggaagcaaccaatttcagtgaaatcatactggaaacctttaacattatttagcgtcatttcatgagaggacaatgcagttaatgttccccactggaaggaccgtcttgtggttcgcagcgctaggcagtttctctctttctctctattggtttaaatgtgaaagagaaagaaaagggggatttcagaaatggagggaagaaagaaataacatctaaggagcacagcaattatataggttggctttattttc

SEQ ID NO: 130460 - DNA, 1062 bp, Homo Sapiens
  misc_feature (45)..(45): n is a, c, g, or t
  misc_feature (57)..(57): n is a, c, g, or t
catggcccctgtgcgaaggaaaggggcccccgggccctccccacncagaggctaganggaggggtggctgccaaaagggagcctgaggaggaacgaggggttgaggggctggggacttgcgcccaggtaggcacaagcacatgaatcaactcccaactggaagcagagaaaaagcagtaaacccaaatgtccttagaaattcctttagtgctcagctgtccatgaaaacaggataagcggcttcctccgtctgtgctcagcagggcagggtggaggcgctgcgctcaggccaggaggacctctaatcaggacggggtggggcggggctctgagctggggaagcggctccagcgttgctactttagggcgtccaggtgggtgcagacctgggagaagacactgtccacggagccctcagcgttgaccttgcgcacaatgccacgtttctcatagaaggcgatgacgggttctgtggccttgtaataggtctccagccgctttttgatggtctcctcattgtcgtccacacgcccgctggtctctccacgtttcaagagccgctgggtcatggtctcagggcctgcgtccacatacagcagcagtgtgggctgtccaatccgtcgctcaaactcttctccttgctgcacctcccgcgggtagccatcaatcaggaagcctttggaagtattgactttggccaccatggcatcccggagcatgtccaacactgtctccagtggaaccagctgccccttctccatgatttccgacagcttcttgcccctggccgagcctgagctgacctcggaccgcaggaggtccccggtggagaggtgggtgtagccatacttctgcacgatcttctcacactgggtgcccttccctgagccaggcccacccaccacaaagatgatcttggttttcttcagcttctcttccatcctgccgaggtcccgggagccgtgtcagtgctctggggaggggtgcgggtgggcgccggggccagtgcgtgccctgcccgtgtggtcgacgatatcccgggaattccggaccggtaccagc

SEQ ID NO: 130461 - DNA, 574 bp, Homo Sapiens
  misc_feature (104)..(104): n is a, c, g, or t
  misc_feature (234)..(234): n is a, c, g, or t
  misc_feature (292)..(382): n is a, c, g, or t
ccctcccccggtgaagtggttatagcgagactacatgaatcagccttgagccagtacagtagcgaaggccattgtgcccttcacatgctcagaagtaaggggcnccgagccttctacaaagggttcataccctcctttcccgcatggggttcctggaacgtggtgattttggtcacctatgagcagatgaaacgagccctcatggctgcctgcacttcccgagaggctcccttntgagcctctcctgctgctgacctgatcacctctggctttgtctctagccgggccatgnnnnnnnnnnnnnnnnnnnnnnnnnnnnnnnnnnnnnnnnnnnnnnnnnnnnnnnnnnnnnnnnnnnnnnnnnnnnnnnnnnnnnnnnnnntccctctttctacattttcatttactcattgtctcagtgctggtggagttgacatttgacagtgtgggaggccttgtaccagccaggatcccaagcgtcccgtcccttggaaagttcagccagaatttttgtccttcccccgacagcccagcctaggccacttgtcatccctaaagcaaggtcaaccttggg

SEQ ID NO: 130462 - DNA, 1113 bp, Homo Sapiens
cttctcctgcggatatatgtcgtcctctcgggtgttctcttctgcgattatcttgcctcctgtggcagactgtgaatgtccctcgccatgttggccggtttcttctcaggtgtcttcacgggcctctgtggtcttggttcccgtcgcaccttgccaggccttgcgacacttgggggaggccctcttccgagggccgggacctttcttttcggccaggtctttggcatgccggtctttggttttccgacaactccagccgggcctgagctggaatcggccctttaccacatccgtggctggccacagccacagccagggcacctgtggtgctgcctgctaggagcggctcccaatgctggcatgctcagagcccttggtgtagaactgtttgacagaatcatacaggccgatgcggacagaggcaaagctcatttggcgctgcaggccggcaaccagcccattgtagaggcttcgggggccctcagtacgcaccatggtcagaatggtgcccatcacaccgcggtactgggcgctggctgtagcgcgcactggcccctgactttctccttggatctgtaaccggactttagcagtatccagaggaaaggtgatgagatctgcgatgcaggcagctgtgccagccccaagaaacttcacagtggcagtagggggcacatctgtggccttgaacccaaccatgatgctgatttcctgctacgtcccaggagatggagaaaaactggagacaggggcacctttaatcagcaacaagacgagatagaggaactctgccggaatccggctttgtaaggtctcacggtgaggcctccaagatcaagcttctctaaaggtgtcccgttcttcaaagctgccagtggctatcatggcccgatccccttggttttccatagaaaatgggtgggagacgaaacacctaatggtcatactatgtgtccgagccgcagggagaacacggcagtgcgtgcggctgtgtctgtcggctggcggagggcgcgtcggacgagccgggcgagcgtggacagtcaatcccaaggcgcgcgcagctgcctcgtgccgaattcaccacccaggcctcgtacctagcctaacgtg

SEQ ID NO: 130463 - DNA, 1694 bp, Homo Sapiens
  misc_feature (232)..(295): n is a, c, g, or t
gttgtgtgttttgtgttttcaaggttgagcttgctttatggatgacaagtgggctaggctgggctgtcgggggcaggacgaagattctggctgaactttccaagggacgggacgcttgggatcctggctggtacgaggcctcccacactgtcaaatgtcaactccaccagcactgagacaatgagtagatgagaatgtagaaagagggaaggtggtaggtaaaggagcggannnnnnnnnnnnnnnnnnnnnnnnnnnnnnnnnnnnnnnnnnnnnnnnnnnnnnnnnnnnnnnngaaagcatggcccggctagagacaaagccagaggtgatcaggtcagcagcaggagaggctcagaagggagcctctcgggaagtgcaggcagccatgagggctcgtttcagctgctcataggtgacgaacatcaccacgttccaggaacccaagcggagaaaggagggcatgaaccctttgtagaaggctcggggcccctccttctggagcatggtaagggcacagtggccagcgctactgtactggcccagggcagagttcatgtatctcgtcttgaccacgtctacaggggaggcgatgacagtggtgcagaagcctgccccaaaggcagaagtgaagtggcaagggaggtcatctgtcatgaggttggctttcaggagggcatccttgatgaggtcataggtcaccagctcagcacagttgacaatggcattacgagcaacattgggagaggtccctttccagaggccccggaacccttcctctcgggcaatggtcttgtaggcattgacggtgctttggtatctccgaccacctccagcccgggcctgagcttggaatcggacctttaccacatccgtgggctgggccacagccacagccagggcacctgtggtgctgcctgctaggaggcggctcccaatgctggcatgctcagagcccttggtgtagaactgtttgacagaatcatacaggccgatgcggacagaggcaaagctcatttggcgctgcaggccggcaaccagcccattgtagaggcttcgggggccctcagtacgcaccatggtcagaatggtgcccatcacaccgcggtactgggcgctggctgtagcgcgcactggcccctgactttctccttggatctgtaaccggactttagcagtatccagaggaaaggtgatgagatctgcgatgcaggcagctgtgccagccccaagaaacttcacagtggcagtagggggcacatctgtggccttgaacccaaccatgatgctgatttcctgctacgtcccaggagatggagaaaaactggagacaggggcacctttaatcagcaacaagacgagatagaggaactctgccggaatccggctttgtaaggtctcacggtgaggcctccaagatcaagcttctctaaaggtgtcccgttcttcaaagctgccagtggctatcatggcccgatccccttggttttccatagaaaatgggtgggagacgaaacacctaatggtcatactatgtgtccgagccgcagggagaacacggcagtgcgtgcggctgtgtctgtcggctggcggagggcgcgtcggacgagccgggcgagcgtggacagtcaatcccaaggcgcgcgcagccctcgtgccgattcgccaccccggcctcgtacctagcctaagtt

SEQ ID NO: 130464 - DNA, 414 bp, Homo Sapiens
ttctgcctttggggcaggcttctgcaccactgtcatcgcctcccctgtagacgtggtcaagacgagatacatgaactctgccctgggccagtacagtagcgctggccactgtgcccttaccatgctccagaaggaggggccccgagccttctacaaagggttcatgccctcctttctccgcttgggttcctggaacgtggtgatgttcgtcacctatgagcagctgaaacgagccctcatggctgcctgcacttcccgagaggctcccttctgagcctctcctgctgctgacctgatcacctctggctttgtctctagccgggccatgctttccttttcttccttctttctcgttccctccttcccttgctctccgttcccccttgtccagagcttgggatcctctaggagtcg

SEQ ID NO: 130465 - DNA, 562 bp, Homo Sapiens
  misc_feature (381)..(460): n is a, c, g, or t
atgccgtcttgtgagccaacctcatgacagatgacctcccttgccacgtcagttctgcctttgggtcaggcttctgcaccactgtcatcgcgtcccctgtagacgtggtcaagacgagatgcatgaactctgtcctgggccagtacagtagcgctggccactgtgcccttaccatgctccagaaggaggggccccgagccttctacaaagggttcatgccctcctttctccgcttgggttcctggaacgtggtgatgttcgtcacctatgagcagctgaaacgagccctcatggctgcctgcacttcccgagaggctcccttctgagcctctcctgctgctgacctgatcacctctggctttgtctctagccgggccatgnnnnnnnnnnnnnnnnnnnnnnnnnnnnnnnnnnnnnnnnnnnnnnnnnnnnnnnnnnnnnnnnnnnnnnnnnnnnnnnnacctaccaccttccctctttctacattctcatctactcattgtctcactgcatgctggatttcacatttgacagtgtgggaggcctcgtaccagccagatcc

SEQ ID NO: 130466 - DNA, 765 bp, Homo Sapiens
  misc_feature (722)..(722): n is a, c, g, or t
ggtaaaggacaatctgtattttatttgtatctgcctttggcgtgtatacagacacccaggagccccttctcccagcctgggggaggggtggtagattctgaaggaaggagacatcagagtgaggacacaaagttcaacagaaggtcctgctaccctcagcaaggggcatctatgtgggctgggacatgtaccgtctgcccttcctcccatccaggccatctgcgaatctacatgggtcctcctattcgacaccagatcactctttcctctacccacaggcttgctatgagcaagagacacaacctcctctcttctgtgttccagcttcttttcctgttcttcccaccccttaagttctattcctggggatagagacaccaatacccataacctctctcctaagcctccttataacccagggtgcacagcacagactcctgacaactggtaaggccaatgacctgggagctcacagctggctgtgcctgagggcagggcagcaggcatgaatgcttctatgtgtaaggcaggactgcccctatggcagggtgtggggagccacagggctctggggtatgtctaaaagtgggggcaaaaaggttcaggaagccaaaaacatgggcttatttgtcatagaagtccacgtgggctccagacttgaactcgtccttttccagttagctcagcagtttctgggctgacccttgcaaatccacagctcncctttgcttcagctcctgcagccttttcgcatgtctgggtcac

SEQ ID NO: 130467 - DNA, 744 bp, Homo Sapiens
  misc_feature (536)..(536): n is a, c, g, or t
  misc_feature (554)..(554): n is a, c, g, or t
  misc_feature (664)..(664): n is a, c, g, or t
tttaattttatttgtatctgccttggccatgtacatagacacccaacggccccttctcccagcctggggaaggggtggtggattctggaggaagtagacatcagagtgaggacacaaagttcaacagaagctgctgctcccctcagcaaggggcatctgtgtgagcggggacttgtaccctctgctcttcctccctaccaggccatctgcgaatctgcatgcgttctcctatttgactcaggtcactcttccctctccccatggactagctatgagcaggagacacaacctcttctcttgtgtgtttcagcttcttttcctgctcttcccatcccttaaattctattcctggggatagagacatgaatacccataacctctctcctaagcctcctcataatccagggtgccacatccagactctcgacaattggtaaggccagcgacctggaagctcatcacagcaggctatgtgtgaaggtaggacagtagacatgagtgtttatctgtgtaaggcaggactgccaccatggcanggtgtggggagccacggngcttctgggggtgtgtctgaaagtggggggcagaaggttcaggaagccaaagacatgggcttatttataggtagagttcacgtgggctccaggcttggacaccccctttngcagcgagcttcagccgtttctggctgacaccctgcatccaccaactcttccttttgcttcactccttgcacctttttcg

SEQ ID NO: 130468 - DNA, 195 bp, Homo Sapiens
ttttttcagaactgcagagtaaatttattgggtggttgtcggttaaaatgacaaatgatgatctgaattcaatacattaaattgctgatagaattgcaaatttcaactgaatttacattgaggcctagcagtggtagttggctacaactggaacagtttatcacctcagggtatttgagggcaaggaagatacag

SEQ ID NO: 130469 - DNA, 1103 bp, Homo Sapiens
gaggttgcatctttaaaacatctatttcaggatttggaagcttctggaaccataactttaacccagccttccataacagtctttttactttctattacagaacatgacactgcaataatagcaatgaaccgcttcagctttttcacttctgcagaagctaaaacaacttctccaatatataaaggggctggaaagctaatttcctgggaaagaaatacacagcctggccctggcattttagttcctaggagagctgagataagtccgttgatcaaaactccatgtacaattgtatttccaaacttggtgtgttttgcaaagtcttcattcaaatgcaaaggattgacatcccctgttaattctgagaaggtagccacatcagtctgtgtgaaggccctcctaagttcagcgcggtctccaactttgatgtgcatatgctgaaagtgctgcagggtcagcactggcaggttcagacagactgtcctccgaagcccaccccaccaaaggtgatggctggaaattagtgggaacatcttcagcaccctcaaatttcatcaagagcttttagcctgcttcagtcttcaaacatgcaggcaccaaaaaataaatatgagagtggatgaacgtttccaaaatggaagactattcattcaatccaatactagttccctactattaccagataatgcaagaagaaatggagaaacctgaatcacccggaaagcacattttttgcctttataggatcctaacagggtcaaagagctccacaatttgacaagaccactgctacatattctcaagatggctgacaaggtcttctcttcataggttaggatgtccaaaggtaaggcggcatcaacctccccaaacaggtccttcacagccgaaataagcagctgtttgaactgtgcagcattcagtccaactccacaatcttgaaattctccactcttcgtcggactagcctgacgcctgaccagactcctattcgccgcaaggacccgccaaggcttggggctccccggcagcagccacagctgggcccgagaaactcccggacgcgtggtcgacgatatcccgggaatccggaccggtccaac

SEQ ID NO: 130470 - DNA, 419 bp, Homo Sapiens
tttttttaaaatccatacaaacatttattctgtccctgcctggaggtgagggggaagggggtccggagagccccgcagaggaggacggggctctagcgggaagacagtgtccggaggccggtgggctccctctagacggcagaccctggggctaacgaggggccagctgggttctcagaggtcacggagtgcaggggtggggcggcgagtggtggaagccggcgcccccgaagaccggccagcccctggagcacagaggcgggtccagcccacactgcgctgagtgtggccctggcccccactggggtctgtcccacccccaccccgcaggagggaaggcagcaggcccgctcttcccggtgggaaagatgctgtgcaagtcatcaggtttaaattaaaaataataaaaataacaatac

SEQ ID NO: 130471 - DNA, 952 bp, Homo Sapiens
  misc_feature (349)..(397): n is a, c, g, or t
cagagttttctttaactttatcatttataaagccatacaatgcattgcaaagaaacaaagcagctgtacaggagtggggacgcgtcagtgtacaatacattcatgtccaggataaggagcatacaccaggatttatacacggtggcagcggctataggcacgatgatacaaaatataaagtatatttccatctatataaatacacagctggggtggggaaggatgctgggtgatcttgtttcccccgcagagggcctgggaggcagggagggtggtgggaagggatttcttacatttgttctcaatgatgggtctgaagggaggagagaaatggggaaacacagcctgnnnnnnnnnnnnnnnnnnnnnnnnnnnnnnnnnnnnnnnnnnnnnnnnnggagagtttcaaacagcttaacactgattggaaaacaagcttgggacatccctctacagtaactccactgctggcaagagcccaggcgtgggatatgaacagaggtcctccaacattttggacatttgaggacagaggtgccaagagggacagatctgcccgaggcccccaccctgcccctctgggtgaaccacttctcacctgggctatcgctgagactccaccaattggttggcctacaggcctcacctcccgactcccctcactgctgggcgacattgaatttgaagttccattgcccagcacctccaaccccgactcccaagttccctaaagaaatgagcaaaacaaacgcacacacatacatccacacttgcacatgcgcacacacgtcctgtgttaccactggccaaggaaacgcgagtctcaggattccagggcctggacctggggtaaagggctgcttctgggactctgccccccaacctcattggaggaccccgagtgtgggggcaggattgggtgatctgaccttggagagtctccgtgaactga

SEQ ID NO: 130472 - DNA, 569 bp, Homo Sapiens
ctttaactttatcatttataaagccatacaatgcattgcaaagatacaaagcagctgtacaggagtggggacgcgtcagtgtacaatacattcatgtccaggataaggagcatacaccaggatttatacacggtggcagcggctataggcacgatgatacaaaatataaagtatatttccatctatataaatacacagctggggtggggaaggatgctgggtgatcttgtttcccccgcagagggcctgggaggcagggagggtggtgggaagggatttcttacatttgttctcaatgatgggtctgaagggaggagagaaatggggaaacacagcctgcacacactgatgtgctctcacacacacgcacaaacaaaacacagacacaggagagtttcaaacagcttaacactgattggaaaacaagcttgggacatccctctacagtaactccactgctggcaagagcccaggcagtgggatatgaacagaggtcctccaacattttggacatttgaggacagaggggccaagagggacagatctgtccgaggcccccaccctgcccc

SEQ ID NO: 130473 - DNA, 304 bp, Homo Sapiens
  misc_feature (203)..(213): n is a, c, g, or t
caaaacctgtgaactaatcagctttattttaaaatatacaagtattttgaaatgtagagtttaaggctgttctatttcttaaactccacacaaaactgacaaatccataccaaattaatcacccacagactgccaatttcatccactaatttaacactacagcattcaggataaattaaaggatttaatagtatagacagttnnnnnnnnnnngcagtcatttgtaacatgctgctataaatagaacaaccagtttatggattactggtacaaaaagtttcaatggcaaacttagagcttcctt

SEQ ID NO: 130474 - DNA, 661 bp, Homo Sapiens
cagcaggtaaatgaaaaatttttaatactttccgaacaatctgggtaacaggaaatgaaatgtatttgaatgtctcttctaagtgctgaaggtattttcaaatccaagttcaactatgaggctggcatctggacatttgtttcccagagctggttttagattcttggttctgcaactgaacggttatgaaacttggagaaacaaagaaaatatgcctttcgtcgctccggggctcgattttttccatgtgaagcgtggtaaaatactctttctgaagcctgtttttgctctaacaccccccgatttgattagtgctttagctctctgcctttgttttcctatttatataaaagaattttattcctttggccttccaggatcaattagtcaatggatccattagtgaagaactttcaaccttgaagtgctaagtagttctgttattgcttgtagagcaagctgatcttggctgcatgtgatgtaaaactgctgcgacttctaaaatcgttgctgagtctttaagagaacaagatacttattgaatccaaaaggccactctgtctcagcactctggcctgtggggttgaagagaggcaggtgtttgggaaggggatgtttgggaaggaggtgttggggaagggggaagcaggtgttgggagga

SEQ ID NO: 130475 - DNA, 779 bp, Homo Sapiens
  misc_feature (61)..(78): n is a, c, g, or t
  misc_feature (741)..(741): n is a, c, g, or t
gtgccaagctaaaattaaccctcactgaaagggaataagcttgcggccgcatacgcggtcnnnnnnnnnnnnnnnnnngacggtcttcaggtttatttcttaaatcaattaggaaataaaaccacagtgcccaggaaagttcacatgagacgccacggtgtctcttgccatggccccaccactccaggggccagggggtgctgctggagggaggacagacggacaggcggcctgggtggccggccccagaaaggctggcgtggatgttcgagatgagccaccagcgaagccagtagggatgtctgggccgtcctggtgggattgtctgggacatcgccaccaacacggtgtcagagccatcagtggggacatcggaggggccaccaccaggtggggtatattcaacaggctagaacccctgaggcttgagaggccaacccccggcaggagacctcccctgacccctctgctgcctctcctgtgggaccctccagtagacacaccagatgaggacacccaggaggcctcctcccaggacaggaggcagctggctgggcagccacgcagtgcagggttcagggccctccagcaggagctccatggagatggctaaatggggacatcaaggcaggggctgacagtggtgacatccaagtggtcacagtcaattccgggagctttcagggcatcaggaggggaaggtggggctggggaaatgtgacagggacgggggaagtgcanaaggcaatttgggctagctgggagatttccagttggcg

SEQ ID NO: 130476 - DNA, 1237 bp, Homo Sapiens
  misc_feature (158)..(167): n is a, c, g, or t
  misc_feature (182)..(311): n is a, c, g, or t
  misc_feature (352)..(362): n is a, c, g, or t
  misc_feature (386)..(400): n is a, c, g, or t
  misc_feature (409)..(560): n is a, c, g, or t
  misc_feature (761)..(773): n is a, c, g, or t
ggggcgagaattattatttccccacaggggccgccaaggggttctctaatcccccccgggggaattttaggtttcttcccaaccccgttggggagggggttccccctgcggcgggaaattctaaagaaatttccccccctttccccataaattgcccnnnnnnnnnntatttttatttgagnnnnnnnnnnnnnnnnnnnnnnnnnnnnnnnnnnnnnnnnnnnnnnnnnnnnnnnnnnnnnnnnnnnnnnnnnnnnnnnnnnnnnnnnnnnnnnnnnnnnnnnnnnnnnnnnnnnnnnnnnnnnnnnnnncttgggaaaaactttggccccttttcctttccttttggggnnnnnnnnnnnaaaaaatgtttttaaaaatttttnnnnnnnnnnnnnnnccgcaaagnnnnnnnnnnnnnnnnnnnnnnnnnnnnnnnnnnnnnnnnnnnnnnnnnnnnnnnnnnnnnnnnnnnnnnnnnnnnnnnnnnnnnnnnnnnnnnnnnnnnnnnnnnnnnnnnnnnnnnnnnnnnnnnnnnnnnnnnnnnnnnnnnnnnnnnnagaaacaacgtttattgtttattgttaaaatagtgagctctcatgagaaaagagtatgtaaaaagggccttcctacaccctgggctttctcacttatcccagcagactgggactgtcctcactgtgtaggagggaaagttctccacctgctcccagaaaattaggctactccagttttacttttgattatttgcaggcatnnnnnnnnnnnnntcaaaatccaacgattaacagtctatctcctcctaggcatatatgctcaatccacttggacacagaggtgggcctcaagtccatatccacatgtacagcccaggattagatggcaccctggaaatcaaatgggtattcctggctagggactgaagaagatctcagctcctggtgatctggttgaaaatatgcacagtgcctccagtgagaacctgagattctctctttaatgaggaatactttgactgtggtaggaccagcagttaactggtaggcagcattcttgccacaggtagtatctggtctggaagctacttgttccatttccaaatccttttaagatcccttaaattgataagaatgaattcaagtttcaaaatgacacactaagttatacacggtgcaggatgtcattaaggcaacagtctcaccaagtccatgcacagggctcggatctcaccatt

SEQ ID NO: 130477 - DNA, 1058 bp, Homo Sapiens
  misc_feature (587)..(587): n is a, c, g, or t
aaaaaatcagttatttttttatttgcatagaaccaaaggaaagacttaaaattccaacatacatcctacgaggcttacaatttaattacaaatccaattttgacggaaaaaagggttttggttttcctctactaacgaggatgatactgtttcacatgcttcagttatgtatgctgaaacaccagatgcctatacatctttacttttcgcagaattagtatccagtccaaaaaagtcttttttgatgatgtaccgaacacactgcaaaatcacatttctttcatgtcgaatgtccggagctagaagcatttccaagagatatggatggtgtgttcttggttcgaataacgtttgatagttgtgataatcttttttccttttagggtttgttttttcaaagcttttctttcggttctcactcttggcttctgaaaaatttctaacagttgctttaacatcttgacttggactcttaggagcactgctatcaagaacctggttttctgccaaaacgtctgcttcagtcttgatgggagtttcttctggctcactctctgaccctgaaagactgccatagctactcattnagtgagcatagggctggtgtcacttcccttgggtatcacagaatgttgtggtttctcctccttatcagactcagaatcactgtttatcaaaacaccaagaggatctgcatttgcctccggtggaccttctagcttcaaatcacacaagtgactgcctgatccagtgactgctctctgtctagaattgtcgtttttccatttgtgattcttgccaggacttctgatctttgccatttgtgaatgtctggacatccccttcatcttgccatattgtgttgttgtcaatactgctcctctcttctccttttcaagttttaacttcttcttcctttcaatattggccagagttggatagtttttccttcgttcttccctccaccgtgcaatttcctctggagtgtctaacttgatcttcttcatgccaggagcatgcatatttctcccaatggaactggacaatcttctcgtgcc

SEQ ID NO: 130478 - DNA, 828 bp, Homo Sapiens
  misc_feature (766)..(766): n is a, c, g, or t
ttttttactttctgacttcaagtcttgtttattcttgaataaaaacagcaattcatggtattttacacatttattcatgcaggacaaaaatttgtatacaattaaggctaaaattaaacaattttttatctaaaacatgcaactcagaggacatgctacttcaatttcccagtaagaaagaaaaggaaatcattttacccaaatgaaatgattttttaaatgattgatttggccttgtgttttcctgccagcgtttttacatttgaacaagagcaggaaatgttttcattcttaatctttcaacttcagtctgtagtattgaaatctgttcagcttgttgttttgaaatatttgttaacttctgctgttgcatcatgttttcataccgttctttgacaatcttttcacaagtcagtttagaccccattgcattacagatgtcttttctctctgagacagctaccaactcttctcgtagattgcagcttagggcataatttgctatatctttttgattgctgaactttccaagttttttgagtagtttcttgcagttttccacattctttttgtgcatcttatctaaaacagcaatggtttgttccattattccaatctgaatactaatcagagcctcatagtttggttcatttaggtacttttgacgatctcttgaaaaaaatagcatctgaatatcccaagccttctgatttagatcttccctttccatctccattttcttatgttcccactcaatctgaagtantcttttgtgtacatctttactttccatcatgctagcactttcttttgtccttgagtccgatc

SEQ ID NO: 130479 - DNA, 1242 bp, Homo Sapiens
ttttggtagtattatcatttattgagtagctacactgtggccagaactaagctttacatgttttatatcacttatttatctcaacaatcttgaaagggtggtattattttccccgtcttataggtgaagactctgaggttcagaaagttaaagtgatatcgccagggttcctgactggtaagtgatggaggctgaatttgagccagatctatatgctccatcatcactctcctggggaaaagagcctagatgtgttctatctgcattcctgcttagattctgcatgacttctcctgtccatccccttggccccctctcttctagtccatgagattacagctttgcacactgacaggagggtccttccttcttagcctacacatacaaccaggtgtcaaaggatggaagggttcatctcacacactcacagaccatgtagactattcaatctacacctccagctcgaactcagaacattgacaggaacctgctcttcaatctttcacctcccctttctccatgaaacgaacgtcaacattcacacagcagcccatccccagcctacagggcggcccctgccagatcatgcttcccactgtggaagaaggcatgtacgagtgagtgggctcatcggttgacctctgtgtgagatggcacgtggtcctaccctgcagagtcagagcacagaattccaagtgtagcacaggtgtggcaattcagaagagcagctgtcaacacatctgagggcacagacccccctatcatgccaggctgggagaggccactcctgtatttggcaggtggcttgtgcccagtggcatcaaggctatggcagggtatagcagagatctaaggccaagtggaagtagagctgtcgctttgattttgaaaatcaaatgaatggcctttacaaacttccacccacaattctttgaaaagggatgagtaactctgaccctactcttacctccctccccatcaattcaagctgaattaagagaaatcctatgtggatacacagatacaatgacctcagctctgtctagcaccactttcagggaggcggatgtcctcactgggccctcttgcatctcttcaaaatgggaatgaccaagtttggatttattattctattcttgaatcccaaagaccatcctaagagcaaaatatgctccttgaaggatgaggatgtggagaagcacggtatctttaaaaaacaagggaagggagtctcagattaag

SEQ ID NO: 130480 - DNA, 1112 bp, Homo Sapiens
  misc_feature (395)..(407): n is a, c, g, or t
ggtttaattttaggaatgtaactccattggggctttccaggccggatgccatagtggaacatccagaagggcaactgtctactgtctgcttatttaagtgactatatataatcaattcatcaagccagttattactgaaaaatcattgaaatgagacagtttacagtcatttctgcctatttatttctgctttgttctcagtgatgtatatgcaacattttgttgaaagccacgatggacttacaagctttaatggactcgtaagccagcatgggcttgcaaaaatttcttgtttaccagagcatcttcttatctttccacagagctatttacatcctggactatataacttaaaagaagtaaaacgtaattgcactactgttttccagactggnnnnnnnnnnnnntctctgcaagtgaaactgtatagagtttataaaatgactatggataggggactgttttcacttttagatcaaaatgggtttttaagtagaacctagggtttctaattgacttgatttctggaaatgaaaacccgcgcttttattatgggaagcttcttgaactgcatttactattgtgaagtttcaagtcccgctgtaaagatcatgttgttttgttttccccagggctttcactgtgatttactgcattgcaggctgtatgataaaacacacataatttaaagagagaaggctcttgattccttatgcaagtggaagagttgaaacttgattgaaggacttaaaacattcacaaccttaagccgaggtggggggatatggggattcaggcaattgtttacacactttgaataactgcaaaggatttacggtttgtgaaaaatgtgtactgtggaaaagataataaattgaagacattattgtgtgggattgtgctgatttttgttgataacacaaaaaacactatgttttctggagagctgtgtaagctgtcttgttgcttagttgcaatataagaaatagtgatgttttggacgtaagttgtcaacaaatttctattttatattgttatatttttatgtagtttgaaatgtaaaaatgttctaatatcaagattaacaaatataaatttatggtgcatttaaa

SEQ ID NO: 130481 - DNA, 729 bp, Homo Sapiens
  misc_feature (715)..(715): n is a, c, g, or t
atcacttgcggattgctttttaaatgctgtagtatgaataactgggcatttaataaccttgagaatattaattcatttactgatgtgcttattcatttatactcattcttactccaaaaaggatctaagaagactcgcaaagataaaaataatacaagaaaaactaaaatttaaaaaggagagggaattaggaaaaaaggaatcaagggtaggaaagtgagatgaaattggctcttacaaaaaatggtgatgctctcacacttctacgtgaggttggttacaaaaatgtgtcagtgcttttcagcacagacatgtagaataaacacagaagatggacatctgttcccagcacagagagcttctagggtcattaggtttttgttctcagagatattctgattggtaaaggatggggtgtttgactgagtgtggagttggcaacaaaaatattggcctcttttactggagcgtgtccctgaaaaatggacaggagagctaatagacaaacaaaatccacatggaagtgtggtggctgcaaaacgaagttcacagaatttcaggcaaaaacatcatatatgtaatttaccaaacagtggaattagaagaataaaaaccacaagagttggtgaagttgaagaggaaactccatgtggagacacggcgccgtacttcagacctcccggtctactaatactgatggtgtggctggaactgnggtgtgtacagcct

SEQ ID NO: 130482 - DNA, 750 bp, Homo Sapiens
  misc_feature (619)..(688): n is a, c, g, or t
  misc_feature (713)..(713): n is a, c, g, or t
tatcctttaaaaaaattatttttattggtggtaaaacatatataacataaaatttaccattttaaagtacacaattcattggcattaagtacattcacaatgctgtataaccaccacaacggaacttttgttatagagcttttcttcatcgctatgaaggagtaatccttttaaacataagtcacagcatgtcactaccctgcccgcaaacattcagtggcttcccatcttgctcagcaagggacaaagtcctgccgtggcccacagagcttttggctgtcctctctgaacgctctcttcactcatttcacccggtcattggcttccttgctgtccctttgacaaagtgaccctgcttctccttcagggtctctgcatgtgttttttcctttgctggaatgctcttttccttggatatccattgtatcctcacttcattcagatctctcctcagatatcaccttattagagtgatagctaagatagccctgtccacattactcactgtatccgttttgttcttcatggcactaatcatcacccaacgtagacaagtacatcttcctccactcaaatgtaggagcctcatgggaacagggaccacatctgccttgatagnnnnnnnnnnnnnnnnnnnnnnnnnnnnnnnnnnnnnnnnnnnnnnnnnnnnnnnnnnnnnnnnnnnnnnatcctgggtcatgataggtatccanatattaattgatctcaaacaaatgcattgaaaacttt

SEQ ID NO: 130483 - DNA, 748 bp, Homo Sapiens
  misc_feature (65)..(65): n is a, c, g, or t
gaagaggacccactgagccacttccacatggataccctgctgatgaccacacataacctgctctntggcggcaccaagacgcccgcgtgcaggaggagatcgacctcgtggtgggacgcgcgcggctgccggcgctgaaggaccgcgcggccatgccttacacagacgcggtgatccacgaggtgcagcgctttgcagacatcatccccatgaacttgccgcaccgcgtcactagggacacggcctttcgcggcttcctgatacccaagggcgccgtctgtgcctgggagagtcgctggcgcgcatggagctctttctgtacctcaccgccatcctgcagagcttttcgctgcagccgctgggtgcgcccgaggacatcgacctgaccccactcagctcaggtcttggcaatttgccgcggcctttccagctgtgcctgcgcccgcgctaacgccccggcccttccagattcgcctgtgagcgatgaggcccgcccatgcgggttgctacgtccccttcttggtccacagtctgccctcatccctctggcagtcacgctgtcttccctgcatgctgtgcctgccgcgtgcccttcccccatccctccaatctgtgccccgtctgcagggcagaggcagatgtggcatgtctttttgtacccacagagcttgttctatggcacgcccttttctaggctttttgtatcatttcttagtacattgtaatagattcaaaccagtcttggctg

SEQ ID NO: 130484 - DNA, 726 bp, Homo Sapiens
tttggcattgttacgattcatttaattttacaagaattaggataacagaaagcattcaggtgcagcagaacagccaagctcgtcccgcccgtcccctcccacatacttggaggctcctgtcgtggcaatgtgtccaaatggtcagggagctgcctggaaaggtattttcaaagtggacagactttctgttcctgatttgtaggtggacgaggagggtcgatcatggaggagaaacccttccccactcctgaaggtcttcccgaggccctgccatggccatgcaagtctggttgagggtcaagaggtgggaaaggaaggcacacagggatagcgccgcagtcgaaggctgacttctaggctaagtcttcttccacttcttcatccccttcttcccccgctgcttcctctccctcctccaccacctggtcttcttctggacttggttgctgctgcaggggaagacagcacagaagtgttggtgttggtaggggacaggccttccccactcccctgggatgtgaaccccacgaggaccaaagcagccaaatggctgaagcctgggtcgctgagcaccctggaacccgggtggcagctctgcggctggtgagggcccagacagtgcggaaagtgggcagagctgggggaatctggcagacttgggttcacgcctggcttctgccacatgcagactgggagggctcgggctagctcctcctgagtctcctt

SEQ ID NO: 130485 - DNA, 767 bp, Homo Sapiens
catgattaatgatattcgtatataatcatatctaagatctatatctggtataactattcttgttttatattttattatactggaacagctcgtgtcctctgtctcttgcctcggtgcctgggtggcttgccgcccacatctcccccctttttattaactagaatcgccatcgccatcattgcttgttgttgacttcggacttggtttcggactccttggaggcatctgcagactaaaaggagacaacataagcataccaatattaataatgccagtaacaacaatgatcctctgacgggtttgagccatttgaagggattaaaatcaggtaattgtttagttatgccttcaaaaatgtgtgagccaggaactgtggataaatgggcttgtgaagcctcaaagatttgctctttaagttgtgaaatatccaaggttaagttatcatcccaggcttttaaatgtcttgagacattttcccagctatgttgatcttgattataagcataaggcgttatgcaataatcagaagtattccaatcacactgtaattgcatacggtgttgcaagttcataactctatctcccagccaggttacactttggcggagatcattaatctgattagctaatttttgatcaatttgcgcctgagaattccaaagtctggaggagtttttctggcatgcttcaacatagtgagcagtttgaacagaattgcggatggaactccagcagttgctgctgttgcagtaccgcaagtatcctgc

SEQ ID NO: 130486 - DNA, 865 bp, Homo Sapiens
ttctgctggccctgtccgggcataacagaaggctcgcactctgtcttctggtcacacctcactatgtcccctcagctcctatctctgtatggcctggtttttcccaggttatgattatagagcgaggattattacaatattgggataaagagtaattactacaaactaatgattaatgatattcatatatctctaagatctatatctggtataactattcttgttttatattgtattatactggaacagctcgtgtcctccgtctcttgcctcggcgcctgggctggcttgccgcccacacttcaggggcccagacttacaccctgactgtcccaccttctgtccttgtcctggacctcaggttcccagcgtcccgagcccagcactgtctcttcagtgccctgatttctcacccagaggtttcaccctccttcatctcacgggcccagagccctgtctcactcaccccacctgtcttagaccccagttcccagcctgacaagctttccactcacaggggagaggctactgcagaacctgacggttcaggctgagtcgcccttggggttggggccctgacgcacctgctgctctctgggagccctgaggaccgagtggcctgcgcgctgaccctgcccttcatctgccggaagccctctctgtggcgccggctgcttctggagcagggtggtctccggctcctccttgcggcgctgacccggcgggcccacacccgtcttcctcttctttgccgcggactcccctttcctgcttccaagacctgggtgtctcccactgtgagcccagctgtccacagggaagtcccatggactaggatcacctttcccttgcctctatgaaccta

SEQ ID NO: 130487 - DNA, 837 bp, Homo Sapiens
  misc_feature (171)..(179): n is a, c, g, or t
tttttgctcccaattcaatgtttactcagtaatgcaagaacctatgcttttacatcaggattccacggctgcacccaaagcactcaaaggaaaaatgtaatctgacagcataagaaataatccccctataactgtttattagaatgtgaatataatccaaatcaataactnnnnnnnnntcaaattacagagcatgcataaaatacaaagtagcaatttacaaatagataatattatcttcataactaatacactaaaataataaaatggctatagaagaaaaccaaaatgactgactacagcaatgccttccgtgtgccccacacatcatgagcaccgcaagagacaaaagattaactatgaaatatagtaatctaagcaagcccacacatacatatttttggggatttcccaccatcctgaatagtatcactgcagttgacacaacttccaggaaactgcagagtaagtgcttaatattatccacgagaaagcaaaactaaatattagtgtgcacatttctgaatgagaaactaattgcttcattgatttcaacaatgtagtggaagaaaactatttcagatctctacaatgcctaaatgcattctatttaaactcaaggtactatttcattttacatactaaaagaatacatgcctttaagtggtaccacttgagcagaaattaacctctcactgtactcttcagacatactgaaaccaaagatttaactggactatattctataatatactgcacaactcaactattagcattgttaaaataattatccatgcctgctggtggatatggtgataaaactaggttgtatttcac

SEQ ID NO: 130488 - DNA, 725 bp, Homo Sapiens
  misc_feature (47)..(85): n is a, c, g, or t
  misc_feature (93)..(233): n is a, c, g, or t
gggaacacttttgccccttttcctttccctttggggcccccgccccnnnnnnnnnnnnnnnnnnnnnnnnnnnnnnnnnnnnnnncccccaannnnnnnnnnnnnnnnnnnnnnnnnnnnnnnnnnnnnnnnnnnnnnnnnnnnnnnnnnnnnnnnnnnnnnnnnnnnnnnnnnnnnnnnnnnnnnnnnnnnnnnnnnnnnnnnnnnnnnnnnnnnnnnnnnnnnnnnnnnnngccaatgcaatggctagtctttactggaaagaagaaactttacagcacattttgagtaatttagtgcaggtgctcagtgtgccagctgctggggcaccagcttgtaatgggctccacagcgggggcatcgctgggcctcgcctttgtgcagccaaaaccagacgacgctggtattgtcctcttcacagatgcagcctactattctcttgttggagatggaggggactaaattagggtcttccctggtgcctgaagctccctttggggccagtacattgtatgggtccagtcccttctttgcagccagcatgatctccctctccaacccagtcgcctgctcttcatcagtgggaacaccacctccagatgccatggagcgcatcgcggccgcgccactggggccgcgagccctcagggcctgcgcggccagcgttccagctccgcgaagtaaccttgaagccattgcgtccgcgactagcagcaaacttccgg

SEQ ID NO: 130489 - DNA, 624 bp, Homo Sapiens
  misc_feature (320)..(329): n is a, c, g, or t
gagctctcatagggagagcaagagggcgccaggcgtggggccagtgaagggcacatacctccttccccagacccaccccagcagatgggccatccagatgtcagctctgtggacattgactgctggttttcctggggcctcggttttcctctctggcctggcatggactgcctcttgccttggagttgctgggatggtggggtgtgtgtgtgagtgagagtgtgttgttggggggcagtgccctggagaggacttcatagcctcagagtagtgttgggagcgctggcttccctgtgttgacggtttaccctatagtgttnnnnnnnnnntcaggttgtacagtaggttgtttcttatgatccaaagttttaaatgtacgtattcattaaaaagtgagtatttttgagaagagaagaaaatacctcaatgttaatgttgggattcttgggaattttgattttattctttatgcatctctgtattttcccaattttctacggtagatattaattacttgtttggggaacagggggtttacattacaagttacatagtttatgggaagtttgggaaataaacaagaatcattctaaattccccttctggccagacatggtaggtctt

SEQ ID NO: 130490 - DNA, 1171 bp, Homo Sapiens
aaggaggaaatcttgtcatttatgaaaacatgggtgaacccggtgcacattatgctgagtgaaataagccaggcacagaaagacaaacactgcatgatctcacttacatgtggaacctataaaagctgcccttatacaagtaaagagtcaaatgctggttaccatgggctgggaggagagggactgggcagatgtgtcaaagaatacaaaatttcagttaggaggcataagttcagggatcttgtacagcatggtgactatagttaacaacaacgtattgtattcttgaaaaaaaggagtgatataggggtaccagagatgggcaggatgattgaagatcacagtccagccttgcaggaccccgggggacagggcgggcactcagaggtggacctccagcaggtagcgcaggcgacactggctctcctggtagatgaggtactcgctctgggagaatgtggagctgctgaactctgggcagggcacaggctggccctggggcaccaccacttgctggccatccagctccaactcagtgtcctgggtcggatcaggctcggtgtggcctcgggcaatgacactgtcgaagccaggaggtgggctcttcaagctggggttgtccgtgttgatatggtgctctctgcccagggccacctcacccaggaacatgtagccgacatggtgggccccacacttcatgccaataacatatccagctgacttgctgttctctgaggcaaagtagatgcccttgccaacacgcccaccagaatgtggcatgatgcggagcccactagtgaggatggcggccaccacggccatgttggtgccatgccacagcagcttccgattacccagtttggagtgggcctggaatctgtcttcctccccttcttggtttactttccagatgtgttgacaagtgtagggcacctgtggttagctgacagtctgtatctaaagtaggtactgtatcacctatgtacacaaagtgctccagaatctagcagctagcagctggcacttagtgaagctggtacagtcatcggtcccagggagtgtggcaccctccataacaaccgaatttctactgctacagagactgcctacagaggactatggcccagcacgatgtcccgcaagaaacagggagcatgtacaatcatggcca

SEQ ID NO: 130491 - DNA, 623 bp, Homo Sapiens
tactttcctatatttattaggaaatttaaaaataatcttaaggatgactgccacatgccagccataatggaggatggtctttcttctaccctagacatttcacactgaacaggcctcacttggatctcggacatcttcctttctgcactgtgcagatcccctcagtatatgcagagaacagaaaatcattttgctgccagtggaaggtagacagaagctacgtttattggggaagaaaatacccttgctgtcaaaccatggcctgaaaataaaggccttggattactcccacccatctccactccatgggtgcagagaatgctgagggtgcttgcatacgagaccataaagttgtaaaggatgccttccagcccccatttggtttgttatggtgagagctggggcctctgtgagtggcaagcatcaaaacccacgaccacagccgttggtactgctttcaaaagcatagcacccaccctaatgccctgataaaggatttgtccagtagcctgggcgtcaggattcctgggctctaggccccacaggtgattcacagctagccccaggctgtgcctcctggcctcagttttcctggcttgctctattggtacttcctacctact

SEQ ID NO: 130492 - DNA, 675 bp, Homo Sapiens
ttttcccttccagtttaaaatatgtaaatttattctcttacaacgttcaaggtcagaagtccaaaatgagtcttccaaggctaaaatcaaggtgtcagcagggctggttctttctggaggctccagaggagaaaccattccttgtcccttccagcttctgatgtctgtcagcactcctgggcttgtggccacatcaccccaacctcttgcttccactgttgcatctcttactactcactctaaccctcctgcctccctcttataagaaccttatgatgacatcaggctctcccagataatctccccatctcaaaatcctaaactgaatcacatctgcaaagtcccagggattcggatgtcaaaacctggggcctgggggcattattctacctaccgcaagaatgaaacccagatttctgacttttgcaaccaagtgatgctttcacccaaggatggaggaggttggtgggaaagataattagcttgatataggaaacagtaattctaattagaagtctgggagacatccaggaggggagccagagtaaggactggtccaagaggacccagaacacaggagggaagtgtaattagagagtgtgacttttaggtcttgggtaacatcaacatagctataatcataaggataaatgaagctttatgtatttcacattt

SEQ ID NO: 130493 - DNA, 1060 bp, Homo Sapiens
  misc_feature (104)..(135): n is a, c, g, or t
aaaaatgttagagaagaacatttattgacatgaaaaggtgtttcagatatactgatatgtcaaacaaatagtaaaacaacatagagtaatgattcattttggtnnnnnnnnnnnnnnnnnnnnnnnnnnnnnnnnttctgcaaggacatatgctaaattggtaacagtgcttacccctgggaagggggtatacagatgttgatttactctttgggtaccctgtatttcccagtttttctataaatcacatccatttgcttctgtcataagaaaaaataatatctattatcatcctttattttgatcaaaacaaatcaattttttaaaaaatcttaggtttttttaagaagcagaaataatttccaaattgcctccagagacaatgattttatcctctgcagaagctggtcagaaccttcttgatcacagccccagttagatacagggaagaatggcgcttcctacagcttcagcggcctcagctcagctctgtgccccaaggccaaaccagctcatctccagccccatccatcctattcttgctgagtcaccagtctcatcatcttcagagccatgtccccttggtcagaaggaaccatatgaccagctttcagaatccagtagaaagcaaggttcttgtaggacttgacaaaagcagatgtttccaaagatttagggtcactgtacagggccttccacttcagctgactgaatttaggcagttctggccacttcagtttccgcacccaggcctcctgacccatggtatctacgatgagatccagctgtccattatacaccgtcacgttgatccctgcctccagcaactcgtccacaatgctaatgactggcttcatgaagtcctcctccatgttcacaaagacgttggtagcctggcctccccaggattgatcctcaggaataattttgagcttctttctgatggggccattcatgagctggcttaaggcatctcgttgtaggtgtctcacgtggcgctgacaaagacaaactaggtggctctgtgtgaattctagactcgactccattgtagacgtgg

SEQ ID NO: 130494 - DNA, 732 bp, Homo Sapiens
  misc_feature (605)..(605): n is a, c, g, or t
  misc_feature (663)..(663): n is a, c, g, or t
  misc_feature (681)..(681): n is a, c, g, or t
ttttttttcttaagtgtgccttgctttatgcaacatacgtcttccatagagaaaatgttagggtcggatcacattaatattgtcattgcagagcatggcttcatcgattggtgaaaaatcgacgtgttcatctcaacaccaggaagtgcatctaaccagggatttgccaacacatttgttagtctgtaaacaacacctgaatacaacaggagagctgccatttataggaaccctgagagtattttgataatgcagtcatccctaatttacctactgtgtaaatgtagattttggaggttgctcaaaagggatgcagccattatagggcatgttatagtgagaatgcagtgttaaaatctagggtgtggatcctggagacaaaggacccacatctctctgaaagtgaggtttcggttagagagcctgtgcagccacagggagacacacctgagacttggtccaatcacctttcctccaagaggctttcctctatgttctcatttctcctcccaacaggtatttttacccctgatttgtaggcagaagtaaagcccaagcaactcaatcaaggtcacaaaacaggcatagctgagaccagaagccangtctccctctgccttcttcactagctcactccaccctatcgtggcccagtccacatancactgtgccagggcctancatctccttccacgctcccaggagctcagcaagggagcatcttgttctctg

SEQ ID NO: 130495 - DNA, 1331 bp, Homo Sapiens
  misc_feature (97)..(109): n is a, c, g, or t
tttttcttgtttaaggatactttattattgaaccagtatgtacaaactctaacatgaaaataatgagtcacagaatatcaagactatttacaatacnnnnnnnnnnnnnacaaaacatttttacaagattacttctctctaaataatgtgacagacatacacaaaaatccaactttttttattacatacataaataaatattgactttaaatgaccactgtaagggacatgaattctacagaccacttggatgagaaggtagcagttttgttatctgcacactacaatataattaagtaaaggggaaaagtaactttatatagacctctgttaatcactccgtaaatcatataactcactagaatattcagtagaggtaagacagtcatgagaatcctctccgtacctgacaccgagtctgaccatgcaaaatcacaggtaagagtcaacatctttatatatctgtttatattttataataaactttaaagtacatgcaacagatatttagccattgtgttctgcctataatatgaaagtttatataataagttttagagttatttgcaaccatagaaatgagtaaacttgaaaacccacggcataagaaagggcattaaataaataagtcaaaatcacaaatgacatttacggatacatagggcaaaattagtatttgtacttgtatgatacagacacgagtcaaaattccgtcttttaatcaagttgtttagtggacataaaaaacacagtttaggcctttgaagtcaaccataataacttcttagctgtcccttagtttttgggacttgctctagaaattcactgggtttcttataaagggcaaattcagtaaagatcattctctagcaatggttctcaaccagaggtaccatccctcaaggggtagctggcaatatctggagacatttttggttgtctcaacttgggggagggtgcaactggcatctggtgaggagaaagtgtggatgctactaaaaacctacagtgcacaagacaaacccccacaacagagaactatccagccccaaaagtcaatagtgttgaggttgagatgaacctctgtatacagtcggctatgtatctaaggttttcaggacacagatgtatttctaatctttgaacttcgtttaatacacattacaaaaaattacctgccataaaccttatcttctctaccatgtcatattaaaacagtgaatgactgaaaagagcacatgttggtttgcaaacatcattctatggagttccaggtagaaaaacagggtacacacagataaattaaatccattaaggagacaaatgttggt

SEQ ID NO: 130496 - DNA, 1452 bp, Homo Sapiens
  misc_feature (34)..(34): n is a, c, g, or t
  misc_feature (751)..(752): n is a, c, g, or t
  misc_feature (770)..(783): n is a, c, g, or t
tggttctggctgccgtcctcaatagggctatctnaaacaggatggtggagcacaaggcttcctctcgcatagctgcatccagaagaaggtctgttaaagagagagcaacttgctgattgcagaggggggatttgttctcagcagtccttaagagtaatgaggagccctgttctttttatctgtactgactgcgttttccaggccacttggcagcttggtttaccgatggatgggctagagatcttgtcgtttcttggaagtcacagggaagattgaagagaacgcttgagcatccttggcaacagcccaggtgggacctggatgaagctttgcactcaagtattgtcaagggaagcttcctgtgaaccaaagttctcaggccaaggtctcgcccaccaaagccagaaagtgcaagcacccgtccacccagctctaacttgtatgtgtgagacagaccaggcttcgggggtaggaggatctgcagttgttcagccgtctttctgctggtgttgtctttctgccatcagagaagggacacacagcccgttcaaaggtgtgcagagggctctgagcgccaggatggccagggctgtttttgctactgaaggagcgtgtgtcttgaactcccacttgcagggacagtccccaccttctctatagccggcactgggagcagccgccagcagggaaatctggcctgagcacaaggatgctttagggagagatcacttcagtgtgtgtgtatattatnntgcagtacagtgcgcgcnnnnnnnnnnnnnnacgcgcacgtgtgggtgagtgcgtcttctgagtgggttctgttcagttgctaatgaggctcctccgctctggacacaacccttttatagattaatttctctgccaattaacttgtcattttcagtacatattttactattccacaccaaccataattacaacaagggatttttcttatgcactcctatgcatgtgaataacatgtggtgtaattctgcttcttacagaagtattactgaaggtattatttccaatattatttggtttattatgcggatcttttttatatatgcagtcccatcccttctgtgccactcaatgccatccagacatggtttttccctccaggggcctttctccagagggcacttcggctgcctctgcttcctctcattcgaggcccggctcttgctgacagaataggttccgttctgggcggtggttctcgagcctgccattcaaaaccaaagcaaattggagcatttctcacaacatggtattgaagttcctttttgttctcaaaagttgtgaccgtgttaaattgtactcccttagtcctgtaaggtatgttaagtgaatcgcagttacgctgtacttttattaatatttaacataattaaagatggacccataagagtgacgcctgtggagcgcgtgctcttcctctgc

SEQ ID NO: 130497 - DNA, 993 bp, Homo Sapiens
  misc_feature (238)..(357): n is a, c, g, or t
  misc_feature (359)..(383): n is a, c, g, or t
  misc_feature (416)..(894): n is a, c, g, or t
  misc_feature (953)..(953): n is a, c, g, or t
tttattttcacattgtttaattttatgtacatttcacatatcataaatacacacaatacaaaaagctatacaaaaaccctactaattcaacatttaaaaaagggagagggagatactgcatttgatttctgacacttttctgtttaaataatacttaaattcagttttcaagaagacaacaaattgaaaatcattaatttttcagagggctttgtgttcacataaattcatcattcannnnnnnnnnnnnnnnnnnnnnnnnnnnnnnnnnnnnnnnnnnnnnnnnnnnnnnnnnnnnnnnnnnnnnnnnnnnnnnnnnnnnnnnnnnnnnnnnnnnnnnnnnnnnnnnnnnnnnnntnnnnnnnnnnnnnnnnnnnnnnnnngcctacagccgcggccctcgtgccgaattcttnnnnnnnnnnnnnnnnnnnnnnnnnnnnnnnnnnnnnnnnnnnnnnnnnnnnnnnnnnnnnnnnnnnnnnnnnnnnnnnnnnnnnnnnnnnnnnnnnnnnnnnnnnnnnnnnnnnnnnnnnnnnnnnnnnnnnnnnnnnnnnnnnnnnnnnnnnnnnnnnnnnnnnnnnnnnnnnnnnnnnnnnnnnnnnnnnnnnnnnnnnnnnnnnnnnnnnnnnnnnnnnnnnnnnnnnnnnnnnnnnnnnnnnnnnnnnnnnnnnnnnnnnnnnnnnnnnnnnnnnnnnnnnnnnnnnnnnnnnnnnnnnnnnnnnnnnnnnnnnnnnnnnnnnnnnnnnnnnnnnnnnnnnnnnnnnnnnnnnnnnnnnnnnnnnnnnnnnnnnnnnnnnnnnnnnnnnnnnnnnnnnnnnnnnnnnnnnnnnnnnnnnnnnnnnnnnnnnnnnnnnnnnnnnnnnnnnnnnnnnnnnnnnnnnnnnnnnnnnnaaaatcgacctcaagtcagagtgcgaaccgacagacttaaagaacaggcgttcccctgnagctcctcgtggcctctgttcgacctgcgctaacaaactg

SEQ ID NO: 130498 - DNA, 1326 bp, Homo Sapiens
  misc_feature (159)..(181): n is a, c, g, or t
  misc_feature (183)..(185): n is a, c, g, or t
  misc_feature (187)..(190): n is a, c, g, or t
  misc_feature (195)..(199): n is a, c, g, or t
  misc_feature (203)..(270): n is a, c, g, or t
  misc_feature (1042)..(1101): n is a, c, g, or t
  misc_feature (1245)..(1245): n is a, c, g, or t
ccccctattttccttgggccccggggttgttccctttgggaaaaaccaggattgtgccccatgtttcctttttcccctcttgggggggccgcgccggccaaaacgaaagtggttttaaaaaaatttttttggaggggcccaaggccgcccccaccaatnnnnnnnnnnnnnnnnnnnnnnntnnntnnnnaaaannnnncccnnnnnnnnnnnnnnnnnnnnnnnnnnnnnnnnnnnnnnnnnnnnnnnnnnnnnnnnnnnnnnnnnnnntttttcagaagtaaaagatttttattgttctatagacacttctgaaaagagatctaattgagaaaatatacaaagcatttaagagtttcatccccagagactgactgaaggcgttacagccctcctctccaaggctcagggctgagaacggttagcatatcgaatgatcagtaaaaacatgcaaaagtgagaaggaaagggaaaaaggtgcattcccctaagctgagggggatggaatttcagaacagaggaggcagggtggacaagtaccaggtggctctccctttccctctgtgttatctttcaaaacagttccaagcttggagaaagcaatgagctccacctactcagcagaacccacggctcgtcccccgtggacgtgactgagcagtgaccttgcctgccccgttcctcagccgcccatcccactgccttgactgaggggaccctgcttgtgctcctggggggcaggactgggggtcctagctccttgcttctttggttccactcagagaacagttgtgcttgacggactcatccccactccccaaactccaagctcctgctggtgggctgaaggcactgacagagtccctgggacacccccaggtagccaccttctcttgtgctctggtgggtccctccctgggcacatcgtcccatcctcagctcaagccccaggtctaggaatagggacagtgaagaaagtgtaccctccaagaaaaagcttctgaggacttttctaattgtgcagatacttctgaagcccatnnnnnnnnnnnnnnnnnnnnnnnnnnnnnnnnnnnnnnnnnnnnnnnnnnnnnnnnnnnnaccggtccttccccttgggctgccggtgcagctgtgggcccaggctttggcaggcccagcttcaagacagtgggacacagaaaacactttgcagcatcgcctctccctccgccacacccaggtcagcagagatgggccccccanccgagagatcacagctctggtacagggaggtgggcagggttggagaggaatggagagacatgtcacctctatagaaacgcg

SEQ ID NO: 130499 - DNA, 725 bp, Homo Sapiens
  misc_feature (22)..(22): n is a, c, g, or t
  misc_feature (49)..(49): n is a, c, g, or t
gggggtcctcacaagcatgatntggaaaaataatccggtctggatggcncagagcgcctccaaggaggaggaggaggagggtggccaacagcatcttgggctgtccagaggtgccggaagggtcccggagcttctgtggtctacccgatggggtcgcggcggagccccgggcgcccaggctccctggtgccgcctccccaggggggctccatggcccgggctcgacccgtactctggatgccagggctgggggcggggaggcggcggcagcccgggagtaggggcggtgcctttcgccaactttggagttgttttctccgtccgccgccgcactcttctctcccggggccggctcctgaagccccgggtctcggcactggggcgcgccctcgcctacagcccgcccgcaggcagcgagcgcccctggtctggcctggtcgccacctgccggggtttgagaccacttcctcttcgggccaaactttgccgactgtcagcccccagggccggccgggtgctgctccactcctccagcgcgtccagccagcggagcgcgacagggaagcgggggaggggaagaggtggctcggcccggcgccccggcccttgcccaggcggtacccccgcccgcccaggggttcctcgtgccgaattcgccacccaggcctcgctacgtggcgggggtgcgatgcttgtggggtgactagaacatcgtgggtgggagc

SEQ ID NO: 130500 - DNA, 1043 bp, Homo Sapiens
ctacgggggaagagtatgaagtgacggcgcgccgaattcggcacgaggggcatccagagtacgggtcgagcccgggccatggagcccccctggggaggcggcaccagggagcctgggcgcccggggctccgccgcgaccccatcgggtagaccacagaagctccgggacccttccggcacctctggacagcccaggatgctgttggccaccctcctcctcctcctccttggaggcgctctggcccatccagaccggattatttttccaaatcatgcttgtgaggaccccccagcagtgctcttagaagtgcagggcaccttacagaggcccctggtccgggacagccgcacctcccctgccaactgcacctggctcatcctgggcagcaaggaacagactgtcaccatcaggttccagaagctacacctggcctgtggctcagagcgcttaaccctacgctcccctctccagccactgatctccctgtgtgaggcacctcccagccctctgcagctgcccgggggcaacgtcaccatcacttacagctatgctggggccagagcacccatgggccagggcttcctgctctcctacagccaagattggctgatgtgcctgcaggaagagtttcagtgcctgaaccaccgctgtgtatctgctgtccagcgctgtgatggggttgatgcctgtggcgatggctctgatgaagcaggttgcagctcagaccccttccctggcctgacccaagacccgtccccttcctgccttgcatgtcaccttggaggacttctatggggtcttctcctctcctggatatacacacctagcctcagtctccacccccagtcctgcattggctgctggaccccatgatggccgcggctgccgtgcgctcacagcctggacttggctttgagatgcatgctgtgtagacgcctgggccccgaactccgacacgctatccacactcacatgcagctgcatgtgaacctgtgcagcgtggtcacacgtgctgacatgctgtcagacactgtgggatgtc

SEQ ID NO: 130501 - DNA, 2890 bp, Homo Sapiens
  misc_feature (47)..(63): n is a, c, g, or t
  misc_feature (66)..(66): n is a, c, g, or t
  misc_feature (69)..(99): n is a, c, g, or t
  misc_feature (103)..(119): n is a, c, g, or t
  misc_feature (126)..(126): n is a, c, g, or t
  misc_feature (128)..(252): n is a, c, g, or t
ctttgggggcccccgcgccccaaaaaaaggtttttaaaaattttttnnnnnnnnnnnnnnnnnccncannnnnnnnnnnnnnnnnnnnnnnnnnnnnnnaaannnnnnnnnnnnnnnnnttttttntnnnnnnnnnnnnnnnnnnnnnnnnnnnnnnnnnnnnnnnnnnnnnnnnnnnnnnnnnnnnnnnnnnnnnnnnnnnnnnnnnnnnnnnnnnnnnnnnnnnnnnnnnnnnnnnnnnnnnnnnnnnnngagatgtatgattcctttatttttgacctcaacttactgagcaatgccgtagctatggaatagaagcatttgttgcactctttttgtgagccaggccctgtaggagggattgtggatggcaaaacctcaggttctgcccaaatcctccccttgggggctggagggtctctagttaattggcattccggtgcttaaggccacttttgggtagaggtttggcaaggatggagtgtccagacctatgatcctctaagaactttactttttaaaaacagccacccaaatggtggtggcgtggggagcaggtggtggtgaagggactggggtgtctggccatggccacgtacagaggagactctgtgagccctctccctgcctgagggacacttaactttatagcagctacatagggtcaacgggaggcccaccaagtccctgaaatccagggacagggaaggaagtggtggaggggaggctgacccacctctaaaaggttgtgccactatgagtagagcccccaggggagaggcctcagtagagcccccaggtcccctcaggtaagcagtggctcatcctctgcctcagctacccacacccccggctcagccagtggcaccagtagcacatcgtcctcatcttccagggccaggactgctgtgtggggtccaggggggctccgggttggtcctgggggccccaggctgggcaacaggcggcctcgcagggcctgcaccactccagacaatagtgatggctctaggggcagtgagggcagtggccctggggcttcagggacagtagtgggggctggagacgtgctagcagatgggaggggagccttgatgggcagtgggggtgcctgctccccatcttgcccacccactgccccgccctcacgggctggacctgtgccaccatctagggcctcaaggggagcagcagaaggtgtgacctgggatctggcctcagaggcccgagccggggtgttggttcgagggagcaagccccagcggcggagacggcgtaccaggcgtcgcatcaagcggccccgctgacgacggcgggcacctgggccacctcctggagtcatatcctggcgtaagatctgtagcagagaacgcaggttgcccagcactgagttatcattaggattctctgtaggaaagtcttctacaggtgggatggcaccctgggcaatgagctgcccgtaggaagggggtgcctgctgctgcacaatctcagcctccatccgggagaggggggcaaagatgctgtactcctgggtgcgaatggcatagagcttgcaggtgcagcccagggcgatgaccaggagcaggccgcacactaggctgccaatgactgcagctgtaatgaccttgcggggcagaacataggagcagtcccactcatcactgccgtccgcacagtctggctgcccatcgcacacccacgtctcatacacgcacttctcgtcccggcatcggaaattgccaggctggcaatgccgacagcgtctctcatctgctccatcagcacagaaagtctggtagttgcagcggtcagcaggcaggtagcaggctgtggcaccagaggtgccagcagccccacaggggaagtgtccaggtgggcagcctgggcagtcctcctcatctgtgccgtcagcacagtcccatgagccgtcacagcgctgtgcctcactgtagcagcgctcacctaggccttcgccagctcccaggccagagcctaagccacagggtctgtcccaaggcaagcaatagccccgcacatggtaggtggcattgaagccacgaccattgctccaagcaactgtgtggtaggacacaacagcctggccagacagtgtctccacagtgacagccttgccattgctgaagtgggtgagactacgcagtagtcgggagctctcagggggcccagggccgtcatacacatgcactgcatctccaaagcccaagtccagggctgtgaagcgcacggccagccgccggccatcatgggggtccagcagccaatggcaggactgggggtgggagactgaggctaggtgtgtatatccaggagaggagaagaccccatagaagtcctccaaggtgacattgcaaggcagggaggggacgggtcttggggtcaggccagggaaggggtctgagctgcaacctgcttcatcagagccatcgccacaggcatcaaccccatcacagcgctggacagcagatacacagcggtggttcaggcactgaaactcttcctgcaggcacatcagccaatcttggctgtaggagagcaggaagccctggcccatgggtgctctggccccagcatagctgtaagtgatggtgacgttgcccccgggcagctgcagagggctgggaggtgcctcacacagggagatcagtggctggagaggggagcgtagggttaagcgctctgagccacaggccaggtgtagcttctggaacctgatggtgacagtctgttccttgctgcccaggatgagccaggtgcagttggcaggggaggtgcggctgtcccggaccaggggcctctgtaaggtgccctgcacttctaagagcactgccctcgtgccgaattcggcgcgccgtcgacttcatactct

SEQ ID NO: 130502 - DNA, 972 bp, Homo Sapiens
gagaagccatgatctcaggcaatcagcagaggaggtctggtcagcaggagggttagtgcactgtcatagagcatgcacagctcacccatccaggtgacagcagtacacagcgtgttcagcatgaaatctctgcaggcacatcagcaatctggctgtagagagcagaagccctggccatgggtgctctggccccagcatagctgtaagtgatggtgacgttgcccccgggcagctgcagagggctgggaggtgcctcacacagggagatcagtggctggagaggggagcgtagggttaagcgctctgagccacaggccaggtgtagcttctggaacctgatggtgacagtctgttccttgctgcccaggatgagccaggtgcagttggcaggggaggtgcggctgtcccggaccaggggcctctgtaaggtgccctgcacttctaagagcactgctggggggtcctcacaagcatgatttggaaaaataatccggtctggatgggccagagcgcctccaaggaggaggaggaggagggtggccaacagcatcctgggctgtccagaggtgccggaagggtcccggagcttctgtggtctacccgatggggtcgcggcggagccccgggcgcccaggctccctggtgccgcctccccaggggggctccatggcccgggctcgacccgtactctggatgccagggctgggggcggggaggcggcggcagcccgggagtaggggcggtgcctttcgccaactttggagttgttttctccgtccgccgccgcactcttctctcccggggccggctcctgaagccccgggtctcggcactggggcgcgccctcgcctacagcccgcccgcaggcagcgagcgcccctggtctggcctggtcgccacctgccggggtttgagaccacttcccctcgtgccgaattcggcgcgccgtcgacttcatactctctcgcccta

SEQ ID NO: 130503 - DNA, 776 bp, Homo Sapiens
tgctcaaatggggaagagtatgaagtcgacggcgcgccgaattcggcacgaggcgctccgctggctggacgcgctggaggagtggagcagcacccggccggccctgggggctgacagtcggcaaagtttggcccgaagaggaagtggtctcaaaccccggcaggtggcgaccaggccagaccaggggcgctcgctgcctgcgggcgggctgtaggcgagggcgcgccccagtgccgagacccggggcttcaggagccggccccgggagagaagagtgcggcggcggacggagaaaacaactccaaagttggcgaaaggcaccgcccctactcccgggctgccgccgcctccccgcccccagccctggcatccagagtacgggtcgagcccgggccatggagcccccctggggaggcggcaccagggagcctgggcgcccggggctccgccgcgaccccatcgggtagaccacagaagctccgggacccttccggcacctctggacagcccaggatgctgttggccaccctcctctcctcctccttggaggcgctctggcccttccagaccggattatttttcaaatcttgcttgtgaggacccccagcagtgctcttaaaagtgcaggcaccttcaaaggccctggtccggtaagctgcccttcctgcaatgcacctggtcatctgggcacaagataaatgtcccaacggtccgaactaccctggctgtgtcaaggttaactatctccttcaccatgattctggtagtctcccctt

SEQ ID NO: 130504 - DNA, 857 bp, Homo Sapiens
  misc_feature (201)..(201): n is a, c, g, or t
agggtagcagaatctcagcgcctcgcattgcgtgaagcagagctgccctgggttggcccacaactgtatgatgtgcgtgccccggcgtgcgaggctggagtctcacacaggagatcgtgctgagagggaggtagggttagcgtttgagcccaggccagtgtagcttctggacctgatggtgacagtctgttccttgctgcncaggatgagccaggtgcagttggcaggggaggtgcggctgtcccggaccaggggcctctgtaaggtgccctgcacttctaagagcactgctggggggtcctcacaagcatgatttggaaaaataatccggtctggatgggccagagcgcctccaaggaggaggaggaggagggtggccaacagcatcctgggctgtccagaggtgccggaagggtcccggagcttctgtggtctacccgatggggtcgcggcggagccccgggcgcccaggctccctggtgccgcctccccaggggggctccatggcccgggctcgacccgtactctggatgccagggctgggggcggggaggcggcggcagcccgggagtaggggcggtgcctttcgccaactttggagttgttttctccgtccgccgccgcactcttctctcccggggccggctcctgaagccccgggtctcggcactggggcgcgccctcgcctacagcccgcccgcaggcagcgagcgcccctggtctggcctggtcgccacctgccggggtttgagaccacttcctcttcgggccaaactttgccgactgtcagcccccagggccggccgggtgctgctcctcgtgccgaattcggcgcgccgtgacttcatactctcccc

SEQ ID NO: 130505 - DNA, 779 bp, Homo Sapiens
ggggtaggataagcgctttagccacagaccagtgtagctttggaacagaatagtgacagtttgttccttgttgcccggatgagccaagtgcattggcaggggagggacggctgtcccggaccagaggcctctgtaaaggtgccctgcacttctaagagcactgctggggggtcctcacaagcatgatttggaaaaataatcccgttctggatgggccagagggcttccaaggaggaaggaaggaggagggtggccaacagcatcctgggttgtccagaggtgccggaaggttcccggagtttctgtggtttacccgatggggtcgcggcggagccccgggcgcccaggctccctggtgccgcttccccaggggggctccatggcccgggctcgacccgtactctggatgccagggctgggggcggggaggcggcggcagcccgggagtaggggcggtgcctttcgccaactttggagttgttttctccgtccgccgccgcactcttctctcccggggccggctcctgaagccccgggtctcggcactggggcgcgccctcgcctacagcccgcccgcaggcagcgagcgcccctggtctggcctggtcgccacctgccggggtttgagaccacttcctcttcgggccaaactttgccgactgtcagcccccagggccggccgggtgctgctccactcctccagcgcgtccagccagcggagcgcgacagggaagcggggcctcgtgccgaattcggcgcgccgtcgacttcatactctc

SEQ ID NO: 130506 - DNA, 968 bp, Homo Sapiens
caatcttgcctgtagagaccaggaagccctggcacatggtgctctggccccagcatactgtaagtgattgtgacgttgcccccggtcagctgcagaggctggaggtgcctcacacagggagatcccgtgtctggagaggggatcgtagggttaagcgctcctgagccacaaggccaggtgtagctttctggaacctgatggtgacacgtctgttccttgctgcccaggatgagccaggtgcagttggcaggggaggtgcggctgtcccggaccaggggcctctgtaaggtgccctgcacttctaagagcactgctggggggtcctcacaagcatgatttggaaaaataatccggtctggatgggccagagcgcctccaaggaggaggaggaggagggtggccaacagcatcctgggctgtccagaggtgccggaagggtcccggagcttctgtggtctacccgatggggtcgcggcggagccccgggcgcccaggctccctggtgccgcctccccaggggggctccatggcccgggctcgacccgtactctggatgccagggctgggggcggggaggcggcggcagcccgggagtaggggcggtgcctttcgccaactttggagttgttttctccgtccgccgccgcactcttctctcccggggccggctcctgaagccccgggtctcggcactggggcgcgccctcgcctacagcccgcccgcaggcagcgagcgcccctggtctggcctggtcgccacctgccggggtttgagaccacttcctcttcgggccaaactttgccgactgtcagcccccagggccggccgggtgctgctccactcctccagcgcgtccagccagcggagcgcgacagggaagcgggggaggggaagaggtggctcggcccggcgccccggcccctcgtgccgaattcggcgcgccgtgacttcatactctctccccata

SEQ ID NO: 130507 - DNA, 1284 bp, Homo Sapiens
tcccaatttaaaaaagcctttattcatacttaaataacagcatacatgataatttgatgagtaaatcaaactatataattttaaaatttgcatattttaaagttttatcagttacttacagactgtttgcaaaatagagggaggatcactcataatcttacatagcactgtcagcagtctgctgtcctgtgcccagtcgaatggattgacactagatatgcatgtctcatgtcattcgtatatttccgtttccccaagtcttcacctgtccccatctacccagatcatttgggaaatgtaaatgtgcagtcctaagcgctgcccgcagggtcgcgatgtctgccaggtactgctggctggctctagacaccagcagcagtgataagaaacaaagcagaggagacagttaaatggtagagaagagaagggggagcagaggtggtaggccgggaacaggggaataagtatggttctccccgcacgtgcccatgtgcgcacacaccgaaggccatttaaagggaagcggttaggtatgaggttgtgtttgctgaattagtggttggtttttgctgtctatctagatagcagctgctgccagctcctcgtctaagaggctttctttgctgccaccttcactggtttgtggaaagcttctggccccatagactgttgagaattccaggagaaaattcctaattagcggatcccgtttgaatgcattcttacaggactgcatatgtacaaaagaagaattggcttcattggccccacatagatgtcacgtgagagtgaaaaaacctggggtataaatatcaaaggaacccctatctgctggtttgctgaggagcccacttccagcagaaccttctctgtccttctgagtctgtagagggcgcttatgtcactggaatcctagtctggcatggggcaggcagaggagcaggagcccccagtgggttcagatcttctgaaaacttgaggttagcggatctgccctttgagggtctcaggctggatttgggcctggagtccgtgtttctccaagggtgttgcttgggtgagcgctggagtgcacttgcatgtgtatgtactctcacgccctcgtggactgggaaggcgccgtagcacaggttagattccctgctttcagggagcctggttcatttttgtcctcgttgtatatagagcttgaacttggtgttccccaggtccagcggcacgaggcctcgtgccgaattcgccacccaggcctcgctaccttaagaccgttagagttactgccga

SEQ ID NO: 130508 - DNA, 1427 bp, Homo Sapiens
aagcgagaaggagcaaaaggctttattgataaatatgcagatatgtctgtccacagggacctgctgtggaggccatgaccaggctgcagacctcccactgcctgggttacagccaggacatggccctgtgcagaccctgccacgacagcccagccgtccaccacccgcctcatctctgccaattgtgctgggggcagggagaggcagaggcccgcctcaggcttcccaagccctggggctcacgggtggttccctcccttccaagggagtggcactgtgcccaggggagagccaggggatgggggcagaggagggagacagcagctgcttcagaccctgagcagaaaaccagagtgagcacagctggcagcaccagatgacagatctgggctccaggggcctcctggttggcccttgtggctcgaacctgcttcgggagacaggcagggtgagggccctgttcgccttttctctgacaaggttgcaaggcccgtgtgtggctgcctgctccctgggtaccgggaactggtggcgcgtagtgccctgaaaggcagggtcccttcacggctcacccaccagccacaccgaggggagggcccctgaagaaaatgacagcactggaaggcagcagcagggtgggggcctagtgctccaggcggggcctcttcccaggggtccgtgggcccatcagtcctggggtggtgggggctggttgatgatgccctggatgacaaaatctttctggattttggtctcctggagccgtgtgcggtctgtgagcagcttcccggagaagacccaccgctgccacgatggctcgatgccctcctgggcgtgcagctgcctcttgagctgccccactgtgtcgggcaggctggcgctgagcctcacgtccttgcccgtggacaggcgcaccttcagcgggaactcacggcgcacgctgggtggaggctcggggggctccaggctctcctcctccgtgtgctccagcagcaggttcaccggcggtgacaggcagtagatggggtagtcgctcttccacttaagccgctctttcttcaggggctcattgcgtcctgctcgcttgcgggggtgtcccggggctgccggcctctcccggcgctgtctccccacgcagttgcccatgctggctcctcagccagtccccatgcaccggaggcggcggggtggtcggctgctcagcggacggcggcgtcccgggtcaatggctccggccgcccggcatcgggcgctccccgatctccccccgggggcgcgctcagccccagcgatggctccgccaaaactttgcgggccaggggagggagggaagtggcagactccccagcacggtcccaggtggccgggccaggggggcccgcgacggtgcccggccggagaccagctccgctggaggggcggagaga

SEQ ID NO: 130509 - DNA, 918 bp, Homo Sapiens
ctccagcggagctggtctccggccgggcaccgtcgcgggcccccctggcccggccacctgggaccgtgctggggagtctgccacttccctctctcccctggcccgcaaagttttggcggagccatcgctggggctgagcgcgcccccggggggagatcggggagcgcccgatgccgggcggccggagccattgacccgggacgccgccgtccgctgagcagccgaccaccccgccgcctccggtgcatggggactggctgaggagccagcatgggcaactgcgtggggagacagcgccgggagaggccggcagccccgggacacccccgcaagcgagcaggacgcaatgagcccctgaagaaagagcggcttaagtggaagagcgactaccccatgactgacgggcagctgcggagcaaacgggatgagttctgggacacagcgcctgccttcgagggccgcaaggagatctgggatgccctcaaggctgccgcctatgctgctgaagccaacgaccacgagctggcccaggccatcctggatggagccagcatcaccctgcctcatggcaccctctgtgaatgctacgatgagctgggcaatcgctaccagctgcccatctactgcctgtcaccgccggtgaacctgctgctggagcacacggaggaggagagcctggagccccccgagcctccacccagcgtgcgccgtgagttcccgctgaaggtgcgcctgtccacgggcaaggacgtgaggctcagcgccagcctgcccgacacagtggggcagctcaagaggcagctgcacgcccaggagggcatcgagccatcgtggcagcggtggttcttctccgggaagctgctcaacagaccgcaacacgggtccaggagaccaagatccagaaagatttgtcatcca

SEQ ID NO: 130510 - DNA, 418 bp, Homo Sapiens
  misc_feature (305)..(305): n is a, c, g, or t
tttagtgacaatagtgcgctttattccgagtgccaatgcatgccacaagtagttgttcatgaaatgttttctcaattggatcgacaaaactggattcctggttttgccctgaacttgcaacaggacaataatgcccacgctggaatgttccaggctaactcctcacccgtccccaaggcagtggccacacaggtcacacacactctctgcaaggccctgctggaaaactctgccaaggcgttgattcatccgttgggcagctagtgggagggcagagtgggtggaggtgatgggggcacagcacnaggatctcactggggcctcacagaagcctgaacaccccacggtgccctctctggggcctcttggcttggaatgatgccctttctttcaaagcatcacatataggacagcaggt

SEQ ID NO: 130511 - DNA, 214 bp, Homo Sapiens
ctctgagaaagctcttgactatttttatttttgcagacaacacttccttcagaaaacgggaaacttccatttgtcacacgtcttggtccagataaatcccaggaagtagcatcgtgatctacacttctgatgagaatactgcagcccacagtaggaaagttatatttttgaattcacgactaccagtacaggataacagcccctagaaatggaa

SEQ ID NO: 130512 - DNA, 988 bp, Homo Sapiens
  misc_feature (104)..(123): n is a, c, g, or t
  misc_feature (125)..(242): n is a, c, g, or t
  misc_feature (250)..(259): n is a, c, g, or t
  misc_feature (610)..(628): n is a, c, g, or t
  misc_feature (882)..(882): n is a, c, g, or t
  misc_feature (972)..(972): n is a, c, g, or t
ggtgggggggccccgccgccccaagaaaaagtcccgaaaaatacttttggggccggggtaagggccccgctccccctttcctttttggggcccggcggcccccnnnnnnnnnnnnnnnnnnnngnnnnnnnnnnnnnnnnnnnnnnnnnnnnnnnnnnnnnnnnnnnnnnnnnnnnnnnnnnnnnnnnnnnnnnnnnnnnnnnnnnnnnnnnnnnnnnnnnnnnnnnnnnnnnnnnnnnnnngttgtttnnnnnnnnnnatgaaaaaaatattttattccaaaacactgtttacacaaatgtgtggtctttgtacaaagtacaaaaaaacccctcttctcatccccacctcccttcagagaagtttaaaccttgggctctcaatcttccatggtcagctgcccctgactgcgagtcctacagcctcagagggaggagcgtgtggggttgggagcaaggcctcaccagaacacagccagttacgcaacagcgcaaggcctgctccaggccccacctccagcggagtcaaaccagatcagcttttacccctcactccagattccacaggcacgcagcacatggctgatttgcagcttgtctttcactgcagnnnnnnnnnnnnnnnnnnnccaggaggcaagaggaccaaccctccaagtcccggggcccctgtccacccaccatatcctagacccaatcttttctacctctttgtcgacaaggttacaaacagagaggcaagcaaagaaggctggggcccaacggaggggagagaatatatatcccgggaaacgtgggcaacagcatcatagacttgaatgaagcccaaggccaagcagccaagcaaggactaattcagagcagctcagaaaccctcactcanaccggcggcccccctgtgctaaggacatggccgggcccagacgcgctctcatagggttcacagagagtctggagtccacgttcactaaangtataaatactactcg

SEQ ID NO: 130513 - DNA, 1165 bp, Homo Sapiens
tcatctagaaatcctttatttacattttctcttagaaaaaaatatacagatctgctgccctgttgattcctcagatttagggtctttagggaaaggtgaaagagggtacagggcggcccccagcaaggccgttcattgtccatcgagagcttctgctcatctggccctggagctgggcttccctgagatcagccccagggcactgggcgacaggtgccatgccaggcctagggcggggttggcatgaggggcaggggctgggaggtgctcaggcagcctgggtcatcaggaactagactggctcacaggcagagagaacgtgggctggagactttgtccttgaggggaggacactggtgcctcgggctccaggaatggaggccctgcaccagccgctgggatggacacatgtgggcaccttgcatcggggccgggtgacttcaagggctggggactatttgctgttttctgtgaaccactggagcaccacctccttgttctccttcacccacttgatgttggctttcgtcttctccagggcttgctccagggcccgggtgcctgagccgaagcctgtttcctcgttgtccttcttgaactgctccagctgctgcagctcatactcggtggagaatcgtcgtgtcactgcctggatgaggttggagaaggagaacgagcaccaccattatcgttaaaaagcttcttccagttgctctggacaaagtcccagaccagaccttgcccgatgacgttgttggtaatgctgatgatggtagaggtggcgtcctgcttccggattaagtccgggttcagggtgtagctcaggtacctgttcaggatccacaactctttgctgcaggccagggctgcccggagcttgtcagcctcattgaccagtgtggcatttcggaactgctcccaggcgaagtcccactcctcctccccgccctgggcgatagcgttgcagtagacagtggaccgcaggttggggtggatcgggttattattggggttctccatccactgcttgaaaaggccagagaccatctcctcacactctggaactccgttggagcagcggtgcgacgcgtgggtcgacgatatcccgggaaattccggaccgtaccagcctgctttttgtacaacgttttcatagttacagtgc

SEQ ID NO: 130514 - DNA, 800 bp, Homo Sapiens
  misc_feature (114)..(114): n is a, c, g, or t
  misc_feature (760)..(760): n is a, c, g, or t
tatggccaaggacttagagtaacaagattatagccaattaatatcctaagccagataggaatagacatggacaggcattcattaccccttataattattatttattttgttttntaagtagaagatgaacaaacaaaaagccaaaggtgaggttacaaaactgacttatttttaacttctatgctacgcattgagccatagctcaatcttgtttttagttttagtatgtaatcttggttttggttacagacttatggcaattagctatacaaaacatacgcgttctgaaaaaatttaaaatatgtatctgtacaactcataactgggagtattatacccaggaggctttgtcacaagcctcctgtcagtaattattttcttcttttaccagttgttcaggcatctttgtacccatccttgatttggagggtctgaccttgacctaattatatccttcaaaactcgcccttacactctcatgcgacagtccctgggcttagagggaggatgcctgtatagtcttagtagcaaggcatttgcagtgaaaaacagattgggcccagtgggattgttacaggtaattaggcatgagctgggcaggagagagggctctcctctaccaactagaatgtcgggtgatggttcagcaattattgcattgcctgtctaaaaatgataatttggcagcaccagggagaggccatttcctgatggtccacacctgttaacatcatcaaactgttaattgactgcaggcccncacggaggagcagcttcctgggcatgcgtattaagagacc

SEQ ID NO: 130515 - DNA, 1782 bp, Homo Sapiens
gttaaaatacttctttagccctattcaagaaaagatgatagccccatccctgtcctgtatcccatgaatacaagccacactaaatcttttcctttctagccacacaacagtgttatttcaagaaaacaaaacaagtcagagaaagaaaaattacctattacctattggcacatttctgttacgtcaagtctgggcttaagccctgttggtcctgttaagctctttttgttctgtatcaagcaggagtgtcttgagttctttctaatccccatacatcatgtctttgaaatgacaaaagtcccatcctttgttgcccgtgcagtaatctgcttgtggaactctttaagaacatccagctggccaggcctgatgtggatgtatgaccggatcttggcgatggctcttacagcctcctctggactccatttgtgcacctgaatcaggtatgctgccaccatagtggcactcctggagcgcccagccttacaatgcacgtaaacacactggcccagcgactggtacttgagagcaaattggactcccttctggaggttgtccaaggtggggatcccagtcatgtctactgtgctgagccgcagctgctcgactcctagtctcttccactcctgtgaagagttgcacaggaacctcgtctcgtactcctcgttcatggtgatcaccccgcgcacgttctcgtcctgtaccagctggcgcgtcaagctccgcaacggcagcgcgcccagcagcacggtggggtcgatgcggtggtaccagtcccggtgcgcccgacccggcaccttcccgcggaacagggtgtagagcagcgtcgggtagaagagcacccgcgccaggccggcctccagcagcgcggtggccgccatcccggcccggcgcagcggcgacccgtcggcccccgcgctcgcggtccggccccgcgagaagagcaggcgggtgccggggcggggctgccagttgcactaggcctctcgcgggttcgcaccgggtgacggcggggactggcctggactctgggggactggcgggactctggaggagggcccggcggcctcggaggagggaccgaggtctcctgggcgggaaactgggaccccggcgaagggagagcgcgtcgcaggccagacacgtgtgagccctgtagcgtgggaaactgaggcccccgcctgtggccggtgacctccctcctccgagggaggggggttgtgaccccaggtgagaggggcaggaaggacccctgcgtgtggaactgtgactccggccgagggaggaggggacactccccccaaccctcgaccagaggaagggggcagtgaccccaggtgcgggtgtgaccccgccaaagggaagacaagacaaggagaggctgtgtggcggggtagccctgaagaggacagtggaagggcttagagctttcaaacagaggagctacctgggtgagggcctgatcccagggtgaacaggggtcctgggttgaggtcgccttcctcctcccctcccctgtcctagggcagggctccctccttcatcttcactctctaggctcagaggcctcgtgccctgcccagggccagctccgttttcctcgtctttctggctgccgtgctggacccaggctacctgcccgggacaccccatctctgcccctgtcgtctcacgtgttcttagtgtccactcccagtcgtggcctagtagctgggcaggaatctcgcacccgggagcgggaggagcacattaaagcgctttcttcgctatcccgggaattcc

SEQ ID NO: 130516 - DNA, 631 bp, Homo Sapiens
ttttttccttcgtatgccacctttattgtgtttccccaactcctggggccccactggtagactggccacatggctactgggctcctggccttcctagggctagcagctggtgggcaaacactctgccctgctggagagctgccaggccatgcccgggcacaggctagtggggctcctggctcagtcctgatagcagtgccagggaggcgtaaagtgcacacatgcggccctgggcctgcggctcccagcacacgtggggagtgtcctcccccatctctaggccacactcgtccagcaagacccaggccggtgctccttcgccccagctgttccccaggagcccggggggcagggacatggtgctgcgctcctgccacggggcactctgctccaagaggctgcccaccagctcgagcggccccaacagggtctgcgactccagcgcctccgccagcagcttgtgctgcgtttcactcagcatggtcagtgcccccagcaggtagacaacagggatagcgagttccggcaccagcattccggaggacaacaccaggcactccaggacagcacctgctggaccgtccaggggctccaccggcccaaggctctggccctgctccagcgcctcctc

SEQ ID NO: 130517 - DNA, 489 bp, Homo Sapiens
tggccttcctagggctagcagctggtgggcaaacactctgccatgctggagagctgccaggccatgcccgggcacaggctagtggggctcctggctcagtcctgatagcagtgccagggaggcgtagagtgcacacatgcggccctgggcctgcggctcccagcacacgtggggagtgtcctcccccagctctaggccacactcgtccagcaagacccaggccggtgctccttcgccccagctgttccccaggaggccggggggcagggacattggtgctgcgctcctgccacggggcactctgctccaagaggctgcccaccagctcgagcggccccaacagggtctgcgactccagcgcctccgccagcagcttgtgctgcgtttcactcagcactgggagagagtcaggtaaaagggggtttctgaacgcccaccgggaaagcccacctccctccctcccacccgccacctgcccccagcggccgc

SEQ ID NO: 130518 - DNA, 1020 bp, Homo Sapiens
tttgcttctctgccccttttccatttcttttgtatttgttttctgtgagagcactgaaatggcagccctggaatctacaatttggctctccactgagcaccttatcttgccaccttagccttaagaatgaatatgaagaaaaatacacagccacctctgtccagggcagtaagaagggctgcaaggaaggggaggatggggacaaggaaaggatcagatacctgctccagtagttgtgaggccactgtgtctcaggggactccaggaggagcagaagagggatcccacgaagttattcttacgcagctggggccaggagggtcagagtggtgccaggtgcaagttaggctaaagaagccaccactattcctctctcttgcccattgtggggggcaaaggcattggtcaccaagagtcttgcagggggacccacagatatgccatgtccttcacacgtgcttgggctccttaacctgaaggcaaattgctacttgcaagactgactgacttcaaggaatcagaaattacctagaagcaccatgttttttctatgaccttttcagtccttcaggtcattttaaggtccactgcagggggttagtgagaaagggtatactttgtggtatgttttgctttcctaatagggacatgaaggaaacccagcaatttgctgttatgtgaatggcctgtagagcagagtcaagagcggtgtgctttgcccgactgctcccatcaggaataggagagtagacagagatcttccacatcccaggcttctgctgctgctttaaaagctctgtccttggagcctcccgctccctgaagtgtctcgccccctgcacagcactggcctttcggaagcatcccagtagggttttctgaggctcgctggtgactcatgccctaattgcaatcctctgcttttatcttgactttgaaggatctaacactgctctctcttccaaaggggaaaaaaagattcatttgttttgagcaataaactaatacaaaatgatggcc

SEQ ID NO: 130519 - DNA, 1071 bp, Homo Sapiens
ttttgatatttttggcgttttattaaaaatggaaaaagttgttttagtgagcactcatggtgctttctcccctcctcccccaggcagaccccaaaagtgtcagggaaaggcaggcccccttggaggggtgcggtggggctgaagcaggggctgctatggctaccagaggtgagctggtgatgtgagctgagttgtcacatgacactctccaccacgacgaccttgctgctctcggacactggggtcagggtggtcaggcccctgacatctgcgtcctgagctcggtactccaagtggtggaggccccagatgggctgggtcaggtgctgccagcgctcagccatggtgcccttggccctgaggaggcagcccaggaggtgcagcggcacgcacagcatggaggacagggcgaaggcccagcccatggcctcaccccaccacgggtacacgtaggtgttgttgtagaccagcggctcgtagtacacaacgttgaagatgaagatgcccatgcagaccagcggggtgaagaaggaccagcaccatttcatccaggggcaaggtcggtacccgatcatacaggcaatgtcgtccatgaagcggtcagctccgtacacccaggccaccaccacgcactcccaaaaggcctgccagagcagggtggtgccgctggccgagtagtagtcaaacagctggaagacgtacatcccgccatcagtcaccatggagagatcgatgacaaagcagagggcacaacagagggccacagagatctccctttggaaacggaagtagtaggaggccgggaggaggtcgaggaggccggtgatgaagccctccacacctacaaactggctgtcgagaccaagcagcaacagcatgaagaagaacagggcagcccagagtggggccactggcatcagcgtgacagcccgcgggtaggcgatgaaggccaggcccggccctgactctgccaccttggagatgtgccgaacgcgtgggtcgacgatatcccgggaattccggaccgtaccagctgctttttttacacactggtttatagtacatgccccg

SEQ ID NO: 130520 - DNA, 1501 bp, Homo Sapiens
  misc_feature (1450)..(1450): n is a, c, g, or t
tatcttgcaaactcaatctttactcggttgctactagttctaggattttattaaaacagaaaatagcaacgaaatgaccataataccactgccccaaatgcacggtttttcaatctcaatctatataaaaatgtcagaaagactaaggggacatattattgtttactgtaatcagttccagtgaaaacttaccatttcttcaggatataaataaactaaaaaacatattttggaatgcagagatctattttactttatttataatgccaaaaagttgtcaatcaatacctgattagttagaggtagaaaggtaatcattctgattgtcttcaaaaacacaaagtttctttgtgtttgctcaaacaactacactttgcagtctgtcccaatgaaatcaaactggacttctcaatccaccactgcaaattggttattcactcaacctatacattcatcattgtattctgcttcatgatagctatttcattttacattttacataaaatttaaaaaaatgactgcaatttataaaaatgaaaaggtaaattgtagaaatacacctttttgaccagcaaaattttactaaacaatctcagcaaatttcgtaattcatctttcaatatcacagtcttttaatgtcaatgaaaacaataatttatgaattaaaacatctttttaaacctgacaggaaaatatataagcacaatttctggataaagaaaatgaggtgcagttctcagggctttagtacttcattttaaacagtaaacacagtaccaaccatcgttttgattccagtgaataaaaagttaagattaaatttattaatcaactttgaagtctgaaaccgaaatgatcctttaacagcattgccaaataaacaggtcagttctacaaagctaatcataatgccaaattttgaccaaatgataaagtggctctgttaccatagtaccagagtctgtctttttgttgggtttctgtttgccataacaaccaaggattgaattacatttaagcagaagtatacaaggcttgatgaaattgaatatgagggattaagcatttttaaagtatgggttataattccttttgcaacacaagttctactgcataatttgcactggcctaaaaactttttagcaacaaaatgtattttaaaaatatcatcatccctacatgtcacattaactgtagaccacttcagctctttattaacatagaaaagtataacttttccctgaaaaactgtaaatagcgaccatatttcaatcacagctgtcctgaactactctcattatcagcaggactttatggtgtcacctctttattctaacagtaaaaatggtgacaatgatattcaagaagaaggttggagaacctgaatggaattagtgacacatggactttttaaacacccactggatttttatagggttttcaggtgcanaacatccattacataagttaaacagctgagaggacacaactgccacttgcc

SEQ ID NO: 130521 - DNA, 922 bp, Homo Sapiens
  misc_feature (16)..(16): n is a, c, g, or t
  misc_feature (27)..(27): n is a, c, g, or t
  misc_feature (65)..(65): n is a, c, g, or t
  misc_feature (119)..(120): n is a, c, g, or t
  misc_feature (122)..(122): n is a, c, g, or t
  misc_feature (240)..(240): n is a, c, g, or t
  misc_feature (247)..(247): n is a, c, g, or t
  misc_feature (365)..(365): n is a, c, g, or t
ggtagatttccattgnttagatgttcntgcagcatgctgtgaaatgttctcggagttgttgccanagtcacccatgtaccatcatgatcttgttcagtttcagtatatgtagtgtcgtnngntatacaagtcttgtccctccagacccaccccgcccccctgcccgtcttgaatgtaggcatcatgcattcaaacatgagatgtgtgactgtgcactgcctggtcacacacggagcatcntaccctntctggggaaagacactgcctggctgaccccgtggcggccccagcacctcagcctgcacagtgtcccccaggttccgaagaagatgctccagcaacacagcctgggccccagctcgcgngacccgaccccccgtgggctcccgtgttttgtaggagacttgccagagccgggcacattgagctgtgcaacgccgtgggctgcgtcctttggtcctgtccccgcagccctggcagggggcatgcggtcgggcaggggctggagggaggcgggggctgcccttgggccacccctcctagtttgggaggagcagatttttgcaataccaagtatagcctatggcagaaaaaatgtctgtaaatatgtttttaaaggtggattttgtttaaaaaatcttaatgaatgagtctgttgtgtgtcatgccagtgagggacgtcagacttggctcagctcggggagccttagccgcccatgcactggggacgctccgctgccgtgccgcctgcactcctcagggcagcctcccccggctctacgggggccgcgtggtgccatccccagggggcatgaccagatgcgtcccaagatgttgatttttactgtgttttataaaatagagtgtagtttacagaaaaagactttaaaagtgatctacatgaggaactgtagatgatgta

SEQ ID NO: 130522 - DNA, 688 bp, Homo Sapiens
gggagaaaaggaagagaaatctcaagaccctcaagaagacaaaaaggaggaaaagaaaactaagaccatagaggaagtatacatgtcgtccattgaaagtctggcggaggtaacagcgcgctgtattgagcagcttcataaagtagcagaattaattcttcatggacaagaagaggaaaaaccagctcaggaccaagcaaaagttctaataaaattaactactgcaatgtgcaatgaagtggcctctttatcaaagaagtttacgaattctttaaccactgttgggagcaacaagaaggccgaggtccttaaccccatgatcagtagtgtattgttagagggctgcaacagtacaacgtacatacaggatgccttccagctgctgctgcctgttctgcaggtctcacatatccagaccagttgtttgaaagcacagccgtgacctggccagactccatctagttaaaggagacagctggccgccttgcctcaatatgtaccatttaaggggatgttctctgtgcgcctggccacagacatccatttgaggacactacaagcaattttgcacagacaatattgagaatgcaaatttagagagagttatcatttctctcaatgtgtataattgtttttacaaacaattgtgttttctttatgttaatttaaacttacacagcttatattg

SEQ ID NO: 130523 - DNA, 682 bp, Homo Sapiens
gattcatagactttatcggcttcttctccacccagcggtttctgcaatgacaaccgcgcctgtacaatacacatggttcactctgttaaagctgcagggcaacgggagggggctgggggtccctgggcaggcatcaaggctaggggtaagcagcagccaagactgggccagtgggtcccagtgtccgacccagagggtggtggcagctggagttccaaggctgttggaaggggtcaggaggaaggctgggaagccaggggctgcagggagaggagagtgcatcagcagtagcagggagggggcagggagcagaagggggcccatgggacactgtcagggcaagagggcatgggacacagcacctcctatgtccatagaggatttttgctgcaggaacaagacagatcactgtataaaagggtctgtacaacattacctatgatacaatgttcacatatgatacaaggctctttccctctttgagttttaaaaaataaatgtacaattccagagctttgggtaaaaaatatatacaccctcatagcaggagcagcagctgcttttgctacggctgttgctgtctcttcaaaagggaaagaggtggtgccagaaagaagggtgagtctgtgccaggaaacctcacccagtagctgccaggagcccctgcacccctcaggccttg

SEQ ID NO: 130524 - DNA, 863 bp, Homo Sapiens
  misc_feature (801)..(801): n is a, c, g, or t
  misc_feature (813)..(813): n is a, c, g, or t
aaccatttgaaaacataagacccacttttcggctcatggggcgtgcacacacaggctgcaggcacagtttgctgacctatactcaagggaaatccctctaccctgaagcataaagaaaacaaatttccccctaaaaataagcattacagaaaatacagacacctttatttagattagtgcatatatttaatagtgtgatattagaaataccttgtcaacacatagggaaaaataatatattttaagcaataaaaccaagattaaaatagtccatgatagctttgtcacacaaaaaacaatggtagtcactctcctccccgcgcacaaaaggtggcatcactggcttgttgagtggtacattttcttaccttgctgcatgtttttcagatagttccttagtcatacacatgcttagccttgtaatgccatgggtatgaatcctccttcattgaatgtaaaccagcaactaaagtgcttgttagcctatgagccctacaaacacccactcccatattctagggcctgtttttctctgtccagagctcttagcgtgctttatctcccaaagatcctcaatgataagcagtccaccatgaagaatgctggttggtcattccatctcgtgctttgttctgatgagaaatggggtgacaagacaggactcactttctgatcactactgtgatgtttgatttcccagagattcaagatccttctgtgatggaaggatcagagaggccaggctgagatggccaaggacagaaaaggaggaggggcagaagaagtccactgtaaacctanagggaggggtgngccgggtgtgatcacaggagactatgcaggcatctctccctctgaccttg

SEQ ID NO: 130525 - DNA, 829 bp, Homo Sapiens
ctcttgttgtcgtcctccttcgggcttttgctttcgtcgtgatcgcttttttaaaggaaacaatacgtttgctagaaaaacctcaaaaaataatgattatatacaaaatggttatctgaatgtggattctgtactgcagcagaagcaacccagctccggaactctatttgcgcttcctcagtatcaggtacatcatgccgctgatgaaggtgcaggcgaaggccacccacgccaggatgtaggagtagccgtagctgccttctctggtcacgggatagaatttcgcgtttttgtcgtgaatgtcttcacgcctgtctgtataaatggaggccgcaatcatgacacacagacatgacattagctggatgatggaggttaggacaaacctctctccctgcttcaggcggaagagctggagcacgaagatgaagaaggcgatgcagcagagaatggtggagaggatcatggtggcctggaccgcctgcagcgtggagtactcttgaaagctgtcattgatgactgtgcaattcgtgttgttggtacatattctccagacatctgcaaaaaactcatctcctacccaccaggcattgtcgacggtggcaatgaacagcaaggctgcagaggtgatgtggaaggcgatgatgaaagcaagaagcaccaacattttcacagggcagggcgagtcgaggcgaggggtcacgtttaaagcccagagcgggatgtgccggcgctggcggctgcgctggcagctggatcgacggactggctgggggtcccccggccgtaatggccgaattcccgggcatatgtccggtaccgtcgactg

SEQ ID NO: 130526 - DNA, 934 bp, Homo Sapiens
  misc_feature (780)..(814): n is a, c, g, or t
ggcttttaaaggaaacaatacgttgttagataaccctccaaataatgattatatacaaatggttatctgaatgtggattctgtactgcagcagaagcaacccagctccggaactctatttgcgcttcctcagtatcaggtacatcatgccgctgatgaaggtgcaggcgaaggccacccacgccaggatgtaggagtagccgtagctgccttctctggtcacgggatagaatttcgcgtttttgtcgtgaatgtcttcacgcctgtctgtataaatggaggccgcaatcatgacacacagacatgacattagctggatgatggaggttaggacaaacctctctccctgcttcaggcggaagagctggagcacgaagatgaagaaggcgatgcagcagagaatggtggagaggatcatggtggcctggaccgcctgcagcgtggagtactcttgaaagctgtcattgatgactgtgcaattcgtgttgttggtacatattctccagacatctgcaaaaaactcatctcctacccaccaggcattgtcgacggtggcaatgaacagcaaggctgcagaggtgatgtggaaggcgatgatgaaagcaagaagcaccaacattttcacagggcagggcgagtcgaggcgaggggtcacgtttaaagcccagagcgggatgtgccggcgctggcggctgcgctggcagctggatcgacggactggctgggggtccccggccgtaatggccgaattcccgggcatatgtccggtaccgtcgactgnnnnnnnnnnnnnnnnnnnnnnnnnnnnnnnnnnncggccgcttcctcgctcactgatcgctgcgctcgtcgttcgctctgcaaaccgcccttaaaggctggcccctcccttaatttaaggttggaggtttccttaattatcccaaaggtccttg

SEQ ID NO: 130527 - DNA, 526 bp, Homo Sapiens
  misc_feature (513)..(513): n is a, c, g, or t
caggattggcatttattataggcacaaacttaatataactcaaatgattgtactaatgtgcttcttatattgtcctatttcacaaatgtaaacagagagcacaattttttgttttaatagcagcattccttgttataataaatattaaaataacaccataataaaatcactaaggatgtaacctaattgtgctgatttcacagagggtggaaaacatcagcccaggggtgggactactgtgtttatataatacaaacacctgaaggtggcagaaactagcagagacagaggatttcttagcatcagaattgatatgttgttatttatgatctcttaataatttagaggcatataataatgacaaggattctgatatttgttataaagtataattgtgttgattatatttaaaaccattaatagaaacaatataattatagaattaagtaaaactgtaagtggtatgctatggcatggtgtacggtatggtacggtatgaggaatgtggagtanagtgtggtgggga

SEQ ID NO: 130528 - DNA, 712 bp, Homo Sapiens
  misc_feature (384)..(384): n is a, c, g, or t
  misc_feature (642)..(642): n is a, c, g, or t
ttagccttgctgagacctgttttatttgtaaaacatctcttgggagttgctgtgaggataaaatgacaacatatataaagagccaggcttcttctagaagaatgtccttgggtagcatgtacatttccatccttccttttagagagtgggggtaataggataccccctcctccaggggtatcccctctttctagggacctacccaagctaggcctttcttccagtgaaacgtgcatcccgagggcttctaggatgaagtagtccactggaaggcaccagctcttccttttatctctccagagctggacagtgcaccaggggccggtactggttccccagctaggagacaccttgggcggggctttgctcgccggaagcacgcanagcgtggggaggagggccccctctgcctgtgtttgtgccaacagcacccgcgctgccgcgtcgggttccggcggccggagtcacacatgatgtcacagacaatgacacaagccggtgtctcattccgacacagcgtccgagctgcacaatgtcacacccgggtgccaaacacttggccccgcgcgacccggccctacgcctcctgccgccgctctccgcgtctccgggggagggtggcccggttcggccgggcagggngctggcgggcgagcccgcgggcgggctggcgagcgggtgatgtcacgggcagcggtgggtgggtcactcg

SEQ ID NO: 130529 - DNA, 560 bp, Homo Sapiens
caatattacttgacatttcttctgtaatttctttatttaaaaaagtaaatgtaacaagatacttaaaaaaggctagatacaaaagtagttaagctgctcacgaacatttaaaattttccaaaatgtatcttcaataatcatgatcttataaaacattttacagttatcagaaagtgcccaggctgagtttacataactgaaataccttagtacaaatgtctagttagaactgaagtgcagtaacctcttgagactgactgctcattgaaatagggatacaaagaaaaagttgattgtgataaaagtattgtgcattggccccatcatatgtacaaaaaaagtgccctcactcaaatgagcaaattacatgcaaaatattagtgatatcatttaatatcctagagctcaatgcagtcaaaccgcaataaaagtggtttttataggtaaaagtgatttcatctcttaagatctgaatgtcgagaacttttttacaagttccatatacatgatacacagttgcagccaaccacaaattaaacaccataaaaaaagcctcgtgc

SEQ ID NO: 130530 - DNA, 778 bp, Homo Sapiens
cacggtgccttcaagctttattgccacacacactcccccagcccttcctgaatggccctgtgcatgggaacaccagcttagagaagcaattcagggctaggcaagggccagaggactggatttgggactggggtgggtaggggggatctggagaaggaaagtgctaagaccaaagcccacccccaccccaggtttccctgagtggtgtccacccccagggtcttgggggctggcttgtgcattggggggagggggctcatcccaaatggatcctcccctggggtctccaggctcatggagggaagagaagccccactgagcccctcgcaccccccatgaagccctcaatgtgcagggagcaggaagaagagctgcacacaaacgcatacacatgcttgtctccaagagagctcctggcccctggggctgcccagccaggggctcaacagtccagaccgatggacacgagcaggtcctcgagtgcccgcagacgctgctgcgcctcctctatggcgctgtaggtctgcaccgtgctggccacgtggaagcggatgtcgtccaccagcgggatagagtccgtctcctgccgggctgccacagccgctgcctcctccttcaccgcctccacgaagtcctcccgctccaccagcttctcaatgaccttggccatgtactcagtgcactggtcctcaagccgcgccaggcggaagagcttggccacgcgccacacacccaccacagtgtcctcgtctagcatctgagccaggctgcggccgca

SEQ ID NO: 130531 - DNA, 988 bp, Homo Sapiens
  misc_feature (831)..(831): n is a, c, g, or t
gattcacaagacttttaaattttattagtaaaatacaaaatggcacagacgttggtgatgagggttggaaaagtctttccaaagtcttcctactctttccaaagtcttcctagatcatccttgtccatgtcctgcttggagaaactaacaaagtccatggaagggggaccaactggccccagcggcttcctcacaaaggaggcagggccccatcacagggtgtcccacccctgaaaggctctcccagcctggaagagccagaacaaagtgcattggacccactcccaccctctctgagctgccagagtgaccccacctgagccaggccctgagcttcctgaatatgctgcgccacacccagcaggggagtgcagaggccaggtgggcagggcagcacagcgtcttgctctctatggaccagagctgggtttccttcctccaagcacccatctgtgaaggagtgttcctagcacctgggtagaacccagcccataagaggcccctcaggtagacggcaagggtcggggacaatccaagggagaggtgagctgccaccagggaccctgaggggccaggccagccggtgcagccccatccaggcatgctcgagccttcagcagccaaaaaagggaacccctgactttatgcctacaacttcccctttcccatgtcccagcccccttcccgggtagcgtccctttcagaaacaacaggggactcatggaaaacatcatggaaatcctggtcctgtctgcggtggggacaaggtgaaggaaaaggtctggagggaaaaacatgtttcaaggagtgagagagtgggaaggagccagnctcagaagatctgggtgtgtgggtggacacaggtctgtggctgctgctgcagatcctgaaaacacagatgtgtgtctgagcttctgggtctggcattgtcgactcctcctctacggtatgaggaaaccggtgtccatacaactggcggctcagatgc

SEQ ID NO: 130532 - DNA, 862 bp, Homo Sapiens
ttctgatcctagttccaccatcaagccaccaacatactcccatctgtgaaaggaaagagggaggtaaggaatacctgtccccctgacaacactcattgacctgaggcccttctctccagcccctggatgcagcctcacagtccttaccagcagagcaccttagacagtccctgccaatggactaacttgtctttggaccctgaggcccagagggcctgcaagggagtgagtgatagcacagaccctgccctgtgggcccccaaatggaaatgggcagagcagagaccatccctgaaggccccgcccaggcttagtcactgagacagcccgggctctgcctcccatcacccgctaagagggagggagggctccagacacatgtccaagaagcccaggaaaggctccaggagcagccacattcctgatgcttcttcagagactcctgcaggcagccaggccacaagacccttgtggtcccaccccacacacgccagattctttcctgaggctgggctcccttcccacctctctcactccttgaaaacactgttctctgccctccaagaccttctccttcacctttgtccccactcgcagacaggaccagggatttccatgatgttttccatgagtcccctgtttgtttctgaaagggaccgctacccgggaagggggctgggacatgggaaaggggaagttgtaggcataaagtcaggggttcccttttttggctgctgaaggctccgaagcatgcctggatggggctggcaccggctggcctggcccctcagggtccctggttggcagctcacctctcccttggaattgttcccgaacctttgccgtctaactgagggggctc

SEQ ID NO: 130533 - DNA, 685 bp, Homo Sapiens
  misc_feature (613)..(613): n is a, c, g, or t
gcctgaggatatagaatttatgcacagaactcgtgcacctttccaagttgcattaatcatgaggtcagctctctgaactgagaaataggtcccctgaagaagaccaggccccatcactgtccttcttgcaagataaccccaaatcaccaacttacccatcttcctcagaccttcaccaatgcctttggaacaggccagtaatgagactgataggttgggagttttaactaactatacattgagtaattttgaatgctctaagggaggcttattgtttaaaacaactctgcaggaagtccttttgctgagggaaaatcatttcagtggggcaagtagtcacctctaatttcccagttacccaagtggaggtcttcccatgtgggatcttctttgaaaggggtatagtacctctcagatctaagtgacggcattcctttcgtgagctcagaatatttctgctgtgctatctcaccatccctataaggtaggtagggccagaggaaggagaaatggcagggaatcaatagctaagtcaggggcagtcagagaaaggcaggaaccagggcttcaccccaaccctccctaccagagctcctccctggatccagggtcnccccacatctattcacaagggtggactttctgtgggtatactccattgctggaggagagtatcatgttcagc

SEQ ID NO: 130534 - DNA, 650 bp, Homo Sapiens
  misc_feature (107)..(107): n is a, c, g, or t
  misc_feature (567)..(580): n is a, c, g, or t
aggcaaggcctaggtgtgggctgggcattgcctacacgtgaagagatcactccgcgtccctactgcacctgtcacaaagtgccttctgatatgcctggcaaaccaanatcggtgagcgccagcttgcttccctagaagacatttctaaatattcataacatgcttgctcaaatcaatcaccttattttacatccgctccagggagaaatgaagacatggtcctacgttgttctgtaattattttctatgtaaattttgttccttgttacaattatatatgtcttaggggaaaggaccatttcacatgtgtcacctcatgtgattctcaccacagccctgtgattgctcctgttttataaataatgacatagttccagttgatggccaaagccacagctaacgagaggcagagagagctcaggctcccaggagcttccactctcagaccttgcctcccgggctgccctgagtgaaacccctgcttagcatttggcacagccagaagcagcaagctagggtcacaacacagagaggggctgtgtaatactggctgcctctgtgctaagnnnnnnnnnnnnnntcactgtgtgtttgtttattttggtgcaggcccagtgttcttgcttagacttaatactacccttcatgtt

SEQ ID NO: 130535 - DNA, 602 bp, Homo Sapiens
tcctccaggtcattgaagaacagatgtgtatctgcaaggttgaagatcatctcttccatcataaggccaatgcgcacggacgtcgtggtgtccttcccgtatctggatgcaaatgtccccgtgagtaaggagtgaaaaataattattgtctcatccaagtcccacacgaacacacgctcaatctcattgtcccctgccggggacgggtcactgctcctcttagaccggcctcggagcttcccgtcggaggcccggtgcggcctgtctgtgtctccctctttcgctggtgtggaaggtccattgtgtgtgttgtattcaccgtgcatctggtaggtgtatgggctctgtccagtgggtgaggtgctgaagctggagccatagctgaggaatccactctggccaggggaatggttcaagctgtcttctgtcttgatgctgtaggaagggattccataggcttgtgctggaggtgggtaagctgtatagggggtagcctgctggatccccgcactgtactgcgtctggccgtaggctgccatggctgtggaaggctggcgggggaggacacgtgggcaagatctggagaagagctgcctcgtgcc

SEQ ID NO: 130536 - DNA, 2433 bp, Homo Sapiens
  misc_feature (852)..(853): n is a, c, g, or t
ttttaaatgtaaacgtggttttatttaatgccttttatccatcacaaagcacccattccttcccagcatccccctcttcctagaaaacaagatgtagcgtaaggcacgtgcactgtccacatgacgtcaagtaggtctttaaaaacaaaaataagcaatagtcttttcaacagcttgaactgccttcctctctaatgttcaaagaatgattgtccccacaaagcacaacttggagaatagagtgcttacattagaactgtgaaccaccctacataccagttcaaaaaaccaaaccaaaccaacgactaagaaacccagccacacaggtacaagagcataattccggagtaatgagactagtccataaattaaaaagaagacaagacaaacccatcccctcctcatcaccaggcaccccccaaatcagcaattccttgcttttgttctgtgagtcttacagaagagtctagactccgagccagcccttttccccaaagtcaaatactccgaagccaatgttgggtactttccttctcagaacccccatttggactgatggacggcttctgagatggtcactggacacgtcgtctcggctgtggggccccttcctggtgtccaacatctgggtctctggagttctcggtggggaggtggggaaggcgagggggtctgagggtgagatggcaggtggagatgctgctgatcctgctataaatactccagctccaggggcgtgctcagtgcctccaggtctgcgtggcaggatatccgccagaaaggcatgttgtgctttttcgctccttgctcctcttccacaccatcaccgatcaccacgtagacagcttttcnntgccgaatctctgcattatcctctcgaagcagctctccttccctgtcttggttgcactgtagatgttctcaataggaaacacagaccccaggccatatagcaggactttgggcagggcaggaattagttgagtggtggtgaccagcacattgacacagtttggccgggagttgatgaggtttagtgccttcagggagtgggtcagccagaggtctgtgagagcttccagctcagctcggagctgtagccaggtctcccttttgggagtgcctatcaacccacctacgttgttcttgtaggtattgtacatctccttcacccgccggtagcggaaggccagcttcctcatccagtccacgccgtccgtgcacgccagagcccaggcacaggttggctcctggggccgaactgtggaagccgtcagcggagaagttgtatgtgcttaaatcttggccattgtcatctgatgagacgtcatcaacgtggatctggtcacaatcctccaggtcattgaagaacagatgtgtatctgcaaggttgaagatcatctcttccatcataaggccaatgcgcacggacgtcgtggtgtccttcccgtatctggatgcaaatgtccccgtgagtaaggagtgaaaaataattattgtctcatccaagtcccacacgaacacacgctcaatctcattgtcccctgccggggacgggtcactgctcctcttagaccggcctcggagcttcccgtcggaggcccggtgcggcctgtctgtgtctccctctttcgctggtgtggaaggtccattgtgtgtgttgtattcaccagcaagtgactcggaactctggttggggacgttgtgagatgcctcctggaggacgtaggtggacgtggagaggggcgaagggcagatgctgctggccgggacgtagggagggttgtaggatgagccgtaatactgggggtactggctctgggggaagccggggtaggaaggatagtcctggtgcacactcccgaacccggctgcgttgcccagtccatttcctccttgatagaaccctgttgtgccgtgcatctggtaggtgtatgggctctgtccagtgggtgaggtgctgaaggaagggattccataggcttcgtgctggaggtgggtaagctgtatagggggtagcctgctggatccccgcactgtactgcgtctgtccgtagtctgccatggctgtggaaggctgtcgggggaggacacgtgggcaagatctcgcgagtagagctgggacactctcagggggtccgatttggtgatgccttgtctgtcactcagagtccacacagcagcgtcagcacggttaaacttcagtttatccagaccatcgctgtttacagtgaggctgggtgagatcactagttctaccatttccttgtatccgcgcgcagtggagagggcgccccgacgcggtgcgggcgggcgggcgggccggtgcgggtccgacgaggccgggctgactgcggcgggcacgttgctgtctctgccgttgccgctgcccctcgtgccgaattcaacacccagcctcgtacctagccttat

SEQ ID NO: 130537 - DNA, 998 bp, Homo Sapiens
  misc_feature (743)..(743): n is a, c, g, or t
  misc_feature (823)..(823): n is a, c, g, or t
  misc_feature (853)..(853): n is a, c, g, or t
  misc_feature (860)..(860): n is a, c, g, or t
  misc_feature (867)..(867): n is a, c, g, or t
  misc_feature (905)..(905): n is a, c, g, or t
ttttttttcagatcacgacaacaggtaacctttagtcagaactcaccacccactgtgttaagccttacatgacaatcaccatgaagatttacatacacatgttatatcatagtctcctcacaacatgtctaagaggtaggcacgtcattgttcccattttgcagatgaggaaactgaggttcagagagggcacttggcttgcccaaagtcacacagcggggagtggcagaggaagtcaggttgggtgaccccagtaactgctctcagaggctgggtgatgaccggcttcctggcttctctggaataaacctttgccaccacttcctgcatttcagcttcagtacaggcagagaatggggataggtgggggaatgaggtgagaggggagatgtttagaggtgtggagggcggcagaggtttgaacagtgcagacaaggggagagttcagccgactgggggaggaagaggatggacgatggagcctctgggcatctggatcagcaggagcataacatctggatcagctggagcgtagcatctggatcagttggagcgtatgactttattgatccaggacatgtatttgcagatctgggtgtagacagctggatgctgggcagagccacaggggtaaacaccccacgagaggatgccttggagggtctcgtcacagaccagggggcctccagagtcactctggcaagggtcctggcccccggtccagtccagcacatatcatgttngtttggtgccacgccaggggtagaagactcacactctttagggctcaagatagtgatgctggagcaggtcaggcctttgntgtacttcactctccggggcgggcgtggtngcccagncagcaanctggcactggtctccgggctgagacagcggtagggaanctgcagggccggacgcgggggcccacactacgggctgggcagcttcagcacatgagatctgctcatccgttcgcctgtgaggatggggctgac

SEQ ID NO: 130538 - DNA, 714 bp, Homo Sapiens
cagccaatcacaaaaaacagactttattgaagtatttagcactaaaccccacacaattccagctctgtagctgaggacacagccacttggcaatggcaccaggtgttatacaagaccaataagttaatgtaaaggacgcttaggtgtggagggccagtgctcagccgtctcctggctcagaacaaggcactctgggctccagttaggacactgagaggccagggaaaccaacatgccctggagaaaggggcttagagacaaaccggaaaagcacagcatccaagcagggtattcacgcatggggggcagagtaggcccaaaagttgggggttgctgatgcggtaagagcacagtgagagaaatgccaggtgcatcccttcagcctcctgcatcctcccccaggttcctttgatgggccatcctgggtcttcccttggcacccttgtgcaatcggctacatcgttttctttccagtagagagaactgtgcctcttctaggtcagacaccagagttcttggaaccttctgctatattcacagtctgttccagtccaggtaacatgggggcagagagttctgcacaggtgaagtcagaactcagctctccctacctctcctagcctcaattcagttgctttctcattgaagcaggtcccctgacctggaagcaaagaaggccctaggatgagaaccagggacagctgggtggtctta

SEQ ID NO: 130539 - DNA, 1392 bp, Homo Sapiens
  misc_feature (1119)..(1119): n is a, c, g, or t
  misc_feature (1122)..(1122): n is a, c, g, or t
  misc_feature (1128)..(1128): n is a, c, g, or t
  misc_feature (1146)..(1146): n is a, c, g, or t
  misc_feature (1148)..(1148): n is a, c, g, or t
  misc_feature (1169)..(1169): n is a, c, g, or t
  misc_feature (1197)..(1197): n is a, c, g, or t
  misc_feature (1203)..(1203): n is a, c, g, or t
  misc_feature (1225)..(1225): n is a, c, g, or t
  misc_feature (1229)..(1229): n is a, c, g, or t
  misc_feature (1236)..(1236): n is a, c, g, or t
  misc_feature (1244)..(1244): n is a, c, g, or t
  misc_feature (1257)..(1257): n is a, c, g, or t
  misc_feature (1312)..(1312): n is a, c, g, or t
  misc_feature (1327)..(1327): n is a, c, g, or t
cctgggtctgagggtttattggtcagggcccaggcagatgtcatgtgcccctgttgtccccacgcaggcccacagacatcacaggaaaatgatttacaagccacttggggcctgctggcagtgagggtttacccaccccccgccccagcttgctccagtgccgccgtttacgtcatgggtacgtggcctgcagttcacggatctccaggcccatcctgttgactgcatacccagtgaggcttcgagcctgccagaggtcaatacagcccagcagactaaagtcagttttccaaaaggactctggaattcagcaaaatgaatggaaggtcctttacagcgtactcactccaccattgtacagatggcagcactgaggcccggagaggctctggaacttgggagaaaggctcaggctaagagaagccagggactcctcacccccagcctgtgagctgctgcagattaaggggtcattgaagatgggctagtggccaagggaaaaccaccacatccagggccacacccgtcacccctcaccctcatcccagtcagggcagcagcagcatcttcctgtgcaaaacaaaatgctcatctcctccaagagctgcttctgagggcctgtcctgccccttgccttgggtaatgagggacaggctggcagtgccctgctcagctcttcagtctgtccaggaaaggccaggctaccagagctccctggagtgccagtggccaggtaagcggtgcagcctcatgtcttctttctggatgtgctcgtaacaggactccagggctgtgagcaggaagtcatacaggcctcctgtgtggttggggtccatcatgtcacggatcaggtggatctcggctcccaggtgctgaattcgggcgcgcgacaccacgtagatgagaagtggcagcaggtcgtccatgggcagcttgtactcccggcccaataccctcgacaccgtgccctcaatttccccgtatgtcctctccagcacctccagcttctcccgtgggtccaccgtggtcatgatcttctgcaggcactcggtggctgacaggaacacttgtccctgaccagggagtactctgattgctcgtcagcgtgaggtccttganggngcacangtgcttctgcacatccangnactcgagcaattgggtatcangaaagaggctcaagttggcatgccctgnctgtanaagctgtcctcccgctcatgangcancaggtanagcgtgangagctctgagtanaagctgggcagcatgaggggcagcaccatccatgcacctggaggtccctgatggngacaccggacaggtngggatgagcaggtggggtctgggatactacttgggtcccgtctcaagagtcctagttcacacaag

SEQ ID NO: 130540 - DNA, 573 bp, Homo Sapiens
  misc_feature (396)..(396): n is a, c, g, or t
ggcttcaacaggcagggtttattttcttacgcttggagctctccaggtaggcagctggagacactgggttagcagctgcccagtgtccaatcagggcctgtgacggctgcgcaaggtcctcacccccagggctgccccagtcgttcactaccaggactcctggtcacaggctactcctgaaccaatcactggattgactggctcaggctggtcaccgccctccttggagagaaagaggctgcaactccaagatcaagggacctttgcccagcactgaaaaatgggagcccattaggaaggaggtggctgtttggtagcaacgaacggtgtctgccacggggaggtgtctgaacgcccggaaggtgtgctcctctcacttggccaacactgagggangcacctggcgtgtgactggccacctgggcatgcacgtgggcctgacgtcagtgtgccatgctgcacagacacgggcaggtgctcagacagtccctccctgcagaggaggccaacaatggaggcagagcgttgccgttgaagggaacagccaggccaccccctaagactggggggaag

SEQ ID NO: 130541 - DNA, 453 bp, Homo Sapiens
  misc_feature (103)..(153): n is a, c, g, or t
  misc_feature (298)..(307): n is a, c, g, or t
aagtacttaagatttattgaatgagaactgcattgtacaatatggtgccactagacacgtctatttaattaaaattaaaatataaaactctaaaactagccannnnnnnnnnnnnnnnnnnnnnnnnnnnnnnnnnnnnnnnnnnnnnnnnnntttccatcacaaagttccatttatcagatcttatatagaaccttgaataaaatttaatagacaagtgattttgtatttaacatttcacctttattgaatgcctataaggccatttgaataacggatcatgtacaaagcaacaggnnnnnnnnnnctgcaagcagtaaaggttgtgcaggtgatattcagtaacactgcagtgtagccagagcaaggacataaaacttccttagctttgtaagtctgtggaaatcaaaacttctaaaagagaaaaccgaaatcagaattactgacacttta

SEQ ID NO: 130542 - DNA, 853 bp, Homo Sapiens
caaaaagcaagagggggactcactggaagcctgaggggctgttgctgagcctcagccccagaaatacaaaaagtctttatttcacagaaattagggccatttccatagttatggggaaggacgtgtgagcaggatgggaggtgctcagctgactgtcctctccagaaggctcttctgagctgagcaggagaccccagggccacagccgagccccaacctagacacggtctgagctccaaccttggctggctatacttcaagggcgggtagggccggcatggggctggagggagtcagcccactattgcagattccacacaaagaaggagggggcttgggtggtagcactggacatccatcccatgtgcctgggagtcttggggttggagccacagagaaggttacatcggggtgctgcggaccttgccttcctcctcgggcacattctcataggcattctcatgctcactggacctgaaactggccgccatcgaagagtaccttccatctgttcccaccaggactccatctgccttgtttccgacggtcaggatcatgtgtgcaggctccggctcctcctggcaccagaagtggttgactgcaaaggcgattgcaacgaggaccaggaacacggccaccgcgataaggccctgcatccagggctgaaggttccccaggccttgctgacagctggcaggtggcactgccgtgagcaggcccagaatgaggaggctgaggggcgacatggctgcagcagctcctagccttgcttctggccgccggtgtctgggctcctggagctgctgtggagtctattggtgtccgcctgaaatcaacctgggctcagtctccc

SEQ ID NO: 130543 - DNA, 1380 bp, Homo Sapiens
  misc_feature (95)..(219): n is a, c, g, or t
  misc_feature (236)..(247): n is a, c, g, or t
  misc_feature (259)..(410): n is a, c, g, or t
  misc_feature (415)..(475): n is a, c, g, or t
  misc_feature (492)..(612): n is a, c, g, or t
cccccacaaccccgggggagggtgttccccccctgttgtttttaaaacgggggccaaatagggaaactttttttgtccccccgtgttttcccccnnnnnnnnnnnnnnnnnnnnnnnnnnnnnnnnnnnnnnnnnnnnnnnnnnnnnnnnnnnnnnnnnnnnnnnnnnnnnnnnnnnnnnnnnnnnnnnnnnnnnnnnnnnnnnnnnnnnnnnnnnnnnttcccaaaaagtgcccnnnnnnnnnnnnaaattaaatttnnnnnnnnnnnnnnnnnnnnnnnnnnnnnnnnnnnnnnnnnnnnnnnnnnnnnnnnnnnnnnnnnnnnnnnnnnnnnnnnnnnnnnnnnnnnnnnnnnnnnnnnnnnnnnnnnnnnnnnnnnnnnnnnnnnnnnnnnnnnnnnnnnnnnnnncccannnnnnnnnnnnnnnnnnnnnnnnnnnnnnnnnnnnnnnnnnnnnnnnnnnnnnnnnnnnnggggggccccaaaaggnnnnnnnnnnnnnnnnnnnnnnnnnnnnnnnnnnnnnnnnnnnnnnnnnnnnnnnnnnnnnnnnnnnnnnnnnnnnnnnnnnnnnnnnnnnnnnnnnnnnnnnnnnnnnnnnnnnnnnnnnaaattgctaacacgtttattcatgaatgaagccaagaagaatttataaatgcattttaataccttgctgataaaatagtaacattccgtctttgcaatctgatacggaatacaggaagatactggtaaaggctttgatgtgcatatctatcataaccaggtaatgagaacacacacgaaccacctactttagtgttacaccataccaacttctcagaaaggtcagcttcaagctctactgggtagctgagtaaatagcgtccaatgtttaaagactggggaagcggggagaaagatgaaaggagtaagcagcacacacttcaaagcccacttttaagcacacgacattatgaatattaaaaataaaggatgcaaacaaaaaaggcaattcagcattttcagaaagagcatttggcaatattcaacgcataaggagactgtgcttggggccatccactctctccagcttctcaaagtgtttccgggcattgcgaatgttgatcagagtggccgcagaagggatcgacggatctgacatgaccaccatcacgtacgtatttgaggtgaagatgtcgatgaaagcagcgaagttggaattcctaacttccatgctctggaaggaagcggccaatttactgcagctcagcttgaactgtttgatgatgttgctgatcttctcaaaccggtggacgtcgcgctgctctttgcactggtagtgggaaataaccaagaatgtagctctttcgaacagcagaacttcatcggcctc

SEQ ID NO: 130544 - DNA, 1288 bp, Homo Sapiens
  misc_feature (17)..(17): n is a, c, g, or t
  misc_feature (173)..(173): n is a, c, g, or t
ttggccaatattcaacncattagggaagactgtgcttggggcccattcaactctcttccagctttcttcaaagtgtttccggggcattgcgaatgttgatcagattggccgcagaagggatcgacggatctgacatgaccaccatcacgtacgtatttgaggtgaagatgtcngatgaaagcagcgaagttggaattcctaacttccatgctctggaaggaagcgggccaatttactgcagctcagcttgaactgtttgatgatgttgctgatcttctcaaaccggtggactgttcgctgctctttgcactggtagtgggaaataaccaagaatgtagctctttcgaacagcagaacttcatcggcctcaatgatttgggcaaaattcctgaggttcatctccagctgctgaacgttgggaatcagctggtagacgatgctggaccaggctttgtagagcgtctcatcccagatggacgttcgaaaacaagcacactccacgggcgagacagacgcctcaggtcttcctctcgctctttaaaaatcaggtcacgctgatcctcctgaaccagatccattttgtgcaccaggcagaagattttggcgtcaggagagttctggaggatggcctccagacacgactggtaataatgcatgtccttttccagttcgcggctctccacgtcaaacacgtaaatcaaacttccacgttacggaagatattgtctcgctggctggtgaagtaattttccatgaaggtgtcctgaccgccacagtcccacaggttcagcaccaggttccctaggaatcggacgtgggagtgttccacgtcaatggtggcccccaggcgccgggtgtcgcgagcaatgtaattggcgaagattatcgacctcatgctggtcttccccgacccgctcttccccatcagcagcacctttttcttcatggctgtatttggcatcacccgccggggcaccgcggactgggcctgagggcgcggcctacacgcagcgccgagggaggggtcgggggctgccggggactcgcaggccgcgcctcgctccgctccgccgcgcagctgggcaggcaggagagtcgagagcgcgaacccggggctggagaggccgcggacgggctggctcttactcagatgggagcgcccgcggctgtcagtggcaacggctcgggagatacgctcgctttccgggagggagccgctgcgtccccgccacctcgtgccgaattcgccacccaggcctcgctaccttagaaccgttatagttactgg

SEQ ID NO: 130545 - DNA, 994 bp, Homo Sapiens
  misc_feature (651)..(651): n is a, c, g, or t
  misc_feature (782)..(782): n is a, c, g, or t
  misc_feature (788)..(790): n is a, c, g, or t
  misc_feature (813)..(813): n is a, c, g, or t
  misc_feature (815)..(815): n is a, c, g, or t
  misc_feature (817)..(898): n is a, c, g, or t
  misc_feature (903)..(904): n is a, c, g, or t
  misc_feature (940)..(940): n is a, c, g, or t
  misc_feature (945)..(945): n is a, c, g, or t
cattttaattaacactttacaaagtacaaaatatactgtcttttttgggggaacattaggtaattttttttctccaacatacagtacatgaatctcgagggttttgtgtttcttcaacaagaaaataagcttgagggccccgggggggtagggataagatggcaggttctccccttcacccagatcttgggagcgatggaacgccgctgctgttgctggtgacccgggcacgccaggtgagggttggagggggttgtgggcaggaagtcccctgcccccactacgatggtgggggctctgggcagggcagaggcccctcagtacaccatccatccactcacccccatctcaggataagggaaatgattttggcatagagaaagaggagggcttgggactgttatcagctccctactcttttagagggaactctgctcaactcttcctagactgtcttctgaatacaggtaaactgaggcattggaagggaaaccgcactggccttggcctgtcttgggacctgaacttggcctgctgttcaccctgccacctccaaagtttgggtgaggggcaggggtctccaattcttctggaccttcttccagaatgagccccagtagatgagggagtgccggcccccacaaactctcnctgtgaacaccatctgcaggatgggatgcctttgaagagtcagcacgggcagccccagccccttccaatcagagctgggctgtatcaaacagagcatggtggaggcaacggcgtgtgaattctgaggctanggatannnatacacgttggcttttaccctgngncnnnnnnnnnnnnnnnnnnnnnnnnnnnnnnnnnnnnnnnnnnnnnnnnnnnnnnnnnnnnnnnnnnnnnnnnnnnnnnnnnnctganngctctgctacagcagcctcgtgcgaattctggctcnagggncaatcctatatgagtcgattaatcgtatctgtcatactgttccgtgtga

SEQ ID NO: 130546 - DNA, 1005 bp, Homo Sapiens
  misc_feature (67)..(75): n is a, c, g, or t
  misc_feature (761)..(761): n is a, c, g, or t
  misc_feature (770)..(770): n is a, c, g, or t
  misc_feature (803)..(803): n is a, c, g, or t
tttgttttaaacactttatttataaaaaagtacatttttaatcctcagtacattttcaacccatcannnnnnnnnaatacaagtaaaagggggtgatgcaaacaccccccaggtcagaaccaggaggatctgctgggctgtccctggaccaaaggcggaaagggcgacaagacgccgaagcaaggtagcgcatcacgctgggaggggagggtggcagcttctcctggattcttttcatttatacaaaaaaggaaaaccaattttttcgaccaagaatcccattcctcacagcaggggtcagaagagcagcagcaccgagtgggacaggggctcctcctggcctcacaagctgggcagtgttggcagcagtggcagcagcagaggggcctgcctcctggcatccccggtactgggcagtgtgtgaagcctccctgtgggtgtggggacctggggcacacccacctgcccctcactaggagagggtttctgttggcagtcaggctttgggggtctctgtctggactcctgaggcctgggagcactaccctcctcccagaagaggggacatccgtgtctgcttggctcagcagagctgcccacacccacctaacacaattcccaatttctctgctctgaggaaggcagaaaagttattgcaccagtgacttgggcaagtgggggttggctggcaaaggaagcgcatgcccaggaaacagggcccctataaggctctctttgcagccgggcactgggaaattcgnttctccttnatggctttcagcaggatcagacaatccctctgncacatctgtgctgagtggcatctggctgtgcatgcatgcgtgtgtacatgcgtgtacacatgctgcgcgtgggtgtgttggaggtgtgagtgtgtccactgtgggacacgtactgggtctgaggtggcgcactttgcaggctgtgtcactactctgggtgctgctttcaaaccttccgataaaggggatcgctggtctataa

SEQ ID NO: 130547 - DNA, 922 bp, Homo Sapiens
gagcagacaaatctttattcctgaggctaaaatatgcaccagttccctccctataccgcgccactgccagcctgactgcatgcaggccctgtcccagacctggagcgctgaacttggagtcccagggcgctccttccctgagttgtgtgtgtgtacatggaggggactcctgggtagcacctggaggcggcctaggggtgaggggccttctcaagggtgccctgcacctccagaggtgcagtcttgggcaggatgtagcatgtttcagagtctggtgaccgaaacagggctgtcggggacaggcctcgggtgttggagggcaaaggtgacagcatcatggacagaggcaaagagatgcttcttggtgatggatgcatcgaagaagtgcccagcctcaagctggctgaccacagggctgtggcaggccgccatgtacacctccaccgtcaatcgtcccggaagtcatggaaaatattcttcaggctcttgaggcacacagtgtccacaaaggagagggcacccaggtccaggatgaggctgtggaagtctggctgaggcaggcccagggccttcagtgtggacccatctggggccttggagtcttcttgaccattggctgttgcatcttccatcttatctcctgagctcacctgctggggaggcagacatgctgccagggccacccatgagagagtgaaggcaggactggccgcacacagacacgcgagaacacgcaaggtcagatggggagcatgcatgggacacataaggacacaaacatgcgggagtcacataggtgtgcaaagacaggaatgacagatgtgtggggacatgcaggagggcacacccagatgtgcatatactgctctgctacctcctgggccgacgctgcacaggacacgagaagggagtccctgtccca

SEQ ID NO: 130548 - DNA, 1142 bp, Homo Sapiens
  misc_feature (687)..(687): n is a, c, g, or t
gagcagacaaatctttattcctgaggctaaaatatgcaccagttccctccctgtaccgcgccactgccagcctgactgcatgcaggccctgtcccagacctggagcgctgaacttggagtcccaggacctccttccctgagttgtgtgtgtgtacatggaggggactcctgggtagcacctggaggcggcctaggggtgaggggcttctcaagggtgccctgcacctccagaggtgcagtcttgggcaggatgtagcatgttcagagtctggtgaccgaaacagggctgtcggggacaggcctcgggtgttggagggcaaaggtgacagcatcatggacagaggcaaagagatgcttcttggtgatggatgcatcgaagaagtgcccagcctcaagctggctgaccacagggctgtggcaggccgccatgtacacctccacctcaatctcccggaagtcatggaaaatattcttcaggctcttgaggcacacagtgtccacaaaggagagggcacccaggtccaggatgaggctgtggaagtctggctgaggcaggcccagggccttcagtgtggacccatctggggccttggagtcttcttgaccattggctgttgcatcttccatcttatctcctgagctcacctgcatcatcttgcagtcctcaacgttgttgctcctcatgtncttcaaggctggtgttgacatttatggaaactgaggcgcccttgggggaggcagcctgtttccgaagcttctcctctttctgcagttgcttcagcttcagctgctcctgcttcttgagcagtttcttcttctgggagatgaggaagtcgacatccacaccacacctctgcttcagcgcatcactgtagaactcagcattggcaaagtacacggtggccgaggagcggaagaccttcaccccccggacttccttggcctctgagtactctgccacatctctgtaaatatccgtgtctggcacctgccccaggacagagtagtggggcatctgtgtccggaccaccacgagcagcagggagaagatgaccgcaaccaccaagccaaggtccaggttcagcaagatggtggccgtgaaggtcaccagccagataagcagatccgcccgattgccttcc

SEQ ID NO: 130549 - DNA, 738 bp, Homo Sapiens
atattaaaaggagtttattaaggagaattggctcacatgattacaaggcaaagtcctacggtgggccgtctgcaagctgaggaagaaagaagccagtagtggttcagtctgagtccaaaagcctcaagagtagggaagcccatagtgcagccttcagtctgtggcctaaggcccaaaagccccaggcaagccactggtgttaagtccaagagtccaaaggccaaacaacctggagtctgatgtccaaaggcaggaggaatggatggaggcatccagcacaggagagggatgaaagccagaactctgcaagccagcttagcccaccttctctctcctgctttgttgtagctaccctggcagccgactggatggtgccaacccacattgagggtgagtcttcctctcctggtccactgactcaaatgttaatctcctctggcaacaccctcacagacacacccagaaacaatacttagctttctaggcatcctttgatcctatcaagttgacacctaatattaaccatcacaccttaggatttagaattttcttaagaacactgaatgacccttgcccaggatcgtatctgtgctgtgtctgaagtcttagactccctcctggcctaaagaattttccttcaatgcaatgaaaaatgatattcccacaaactagaaaccaagacttgtgcaaaatcaaaacattgcaaaggtgggtgtggggaaatcaagctattatctt

SEQ ID NO: 130550 - DNA, 1065 bp, Homo Sapiens
aaaatagaaggggcagtatattcattatctatatttgtataacaaattaccacatatttagtggcttaaaacatcacagtttctgtgactcgggagcctggcacgttttaactgggtcctccactgagggtctcataaggcttaaaatcaagatattggcatcctctcttggagcctcagctagggagaaatcttgtttccaagtaccattggttgttggcagttgtaggacttgtggttgtaggactgaggtctggttttcttgttggctttcagcagggaactactcccagctcagagaggtcgctcttgggtccttgccatgtggctccctccggttcagcaatggagaagagtcctttcagtggatccctctctcgatttgaatctctttgacttctgcaaccagcaggagaaaactctctggttttaagaggcccgtgtgactaggttaggctaacctgggtaatcttcctttcttactgtcaactgatgagcaaacttaattccacctgccatcttagaattctacctaccacaggcagacttttgggtaatgatgctgaacaaggagcagttttggatgcctcgttttgaatagatgttgacacttaatggatatcttgtgggtttccaggccacagtctgcactgcttctccaacattatcgtgaggctggccatatttggctgttatctctgctgggtgtttgatcacatgactctgcatgtgtcagacatttccagattggctggacaggatgagggccaattcagttcagggtgatatttacattccatctgtacgaattctattcagaatcccattcaaggtgccagttctttaaatccataagtggcacaaactgttgtcaaattcctgtatgtatagagaagtttctaaatacaatgatatgtttcttctaccatacagggtcctgcagatctttgagcgttaagacaaaacctttgtcctgaaagacttcgtgagctggtcctgagagaccgtggccaatgccagtgtgttatctatttctgaaatccgaacttcagaatgaacggaagg

SEQ ID NO: 130551 - DNA, 1061 bp, Homo Sapiens
catttcagtggtttttaatatattcacaatgttgtgaagccatcacctctatccaattccagaagattttcatcatctgcaaaagaaaccctttaccaactaaagcagttgaaaacttttactttaaaagctggctaaacatgcaagctttgaaaaacttgttaaataaacatgcagattcccagagattctggttcagtaagcatgagatggggctctagaatctgcaactttaacaaattctcaggtgttcctgatgcaggtggtccccaaatcacattttgagaaactctcttctaaagataaagctattttaatagagcacaataaagtctaattttagaaaagacggacatgtagtaattggagtgatcccttgtaaatataacctagatctccttgagacctcaccatcatcttgtagcaaaggatgtctcattaacattaataactacacatttttctcttaaccctgctgcccattcaggaccctatctctttggcaaaaactctttagatatttctgaccatctgtgagggatgtatgacacctctttgttcctgtcttctcatttcaaagtcacttggagactcctcctagtgtcacaactcataatgccaataccaagaatgaatatcaagaacatcaaagtccatggaacggttgtgacttccaactatccctgtcttgaattggattccctgaaaacagactttgagttggagaactgtgtgtagaaggttctttggggagtgctcccaggagacaaaccagacatttccagattggctggacaggatgagggccaattcagttcagggtgatatttacattccatctgtacgaattctattcagaatcccattcaaggtgccagttctttaaatccataagtggcacaaactgttgtcaaattctctgccaggcagtgtgtgaggcactttggatatagtgctcagccagaccatccttctgaagcttaggctccattgaacacggtctcatcagttggcagcctgtggttgacccaagctcagctgctcagattggctaagactca

SEQ ID NO: 130552 - DNA, 689 bp, Homo Sapiens
  misc_feature (292)..(292): n is a, c, g, or t
  misc_feature (407)..(500): n is a, c, g, or t
ggaagatgatgatgaaacaggcaaatctctggaagaccagaatatgtgctttccgaagattgaggtcatctcgagcttgagtgatgacagtgaccctgaactggactacacgtcactccctgtgctggaaaacctccccacagacactctgtcaaatatatttgcagtctctaaagacacctcaaaggcggctcgggtgcccttcacagacatctttaaaaaagaagctaagagggacttggaaatccgaaaacaagacaccaagtccccaagacccctgatccaggagctnagcgacgaggacccctctggccaggtactgatgccccccacctgccaaagagatgctgcaccactcacttccagtggagacagggacagcgacttccttgcagcctcttctccgnnnnnnnnnnnnnnnnnnnnnnnnnnnnnnnnnnnnnnnnnnnnnnnnnnnnnnnnnnnnnnnnnnnnnnnnnnnnnnnnnnnnnnnnnnnnnntgccgactgagagcgccgccacacccccagagacgtgtgtcggagttgcccagcccagccaagctctgcccacgtgggacctcactgcattcccagcaccgaaagcatcatagttttccccagttatatgtagcataaatggtttaatcataaatgtctcccttaggcatgataaacattttaacaccc

SEQ ID NO: 130553 - DNA, 1187 bp, Homo Sapiens
  misc_feature (1113)..(1113): n is a, c, g, or t
gaatggtcacgttttttaggctggacagcgtcccgccacagctactacctgacactgagctcatgcagagagatgatggctgatgttccttctcccttgggacatgggtctggcacctgtgggctgtcgatagtgccctctgagcagagggtcacggtcatgtcagtttgggggaattctctgttgtgcctcacagactcccccctttctttcctccctccccttctcattttgatgtctaaagcatcaagtccctcttcctcggagtttctctagctgcagtggaagattctgttttcctgtggggaaaatgctcacttgagattttgcagggacccgggtctgtctggtttctgatgacatagtaagagaaaggtcttttttcaggttggctggtgaaaggaattgcatgtgactcacacaaacaggagctagcccaatcatacactgactcgcgtgggtgttaaaatgtttatcatgcctaagggagacatttatgattaaaccatttatgctacatataactggggaaaactatgatgctttcggtgctgggaatgcagtgaggtcccacgtgggcagagcttggctgggctgggcaactccgacacacgtctctgggggtgtggcggcgctctcagtcggcaccggagaagaggctgcaaggaagtcgctgtccctgtctccactggaagtgagtggtgcagcatctctttggcaggtggggggcatcagtagctggccagaggggtcctcgtcgctgagctcctggatcaggggtcttggggacttggtgtcttgttttcggatttccgagtccctcttagcttcttttttaaagatgtctgtgaagggcacccgagccgcctttgaggtgtctttagagactgcaaatatatttgacagagtgtctgtgggcaggttttccagcaccgggagtgacgtgtagtccagttcagggtgactgtcattacttcatctcgagatgacctccatcttcggaaagcacatattctatttacagaagaaaaggtgtctgaaagtttctgttttcacaacagaatcgctctacaatgcaccatgccagttctgctttttcacccaatgtcacanagtattctgttgccacatccaagaaaggcccaagggaacacaggactctgaaagttaggcctgggggtggcact

SEQ ID NO: 130554 - DNA, 952 bp, Homo Sapiens
ccaaaaaggtttcacaatttttaaaaaggagtctctcatctccctcacatcatgcaacctggcttgtcctttggcctggctacatcatggcagggatctctgaagacactgtgtccaggggctgccagtgacagtccatcagagcgtcatacagctcctcactctgttccatgaactccttgttggcctcagtcacatccagctgtggcatggggtcttccaatgcatcatctccaacttcttcatatgtctgcatggtgctctgggtatagccatactgggggtaactgtagctgtagctgcctgtgttctggtcatagccccactgagcatagtagttctggtactgctgataatactggttgtagctataactgtacatctgactatattccactggctttacacggctcgctttagggattgccacgctcagccgcacaggcttagaccccagtcccactgctccctggcactccgtcagggctcgcttctgttccagttcatctgtgaatttcacaaaaccataacccttagacacgcctgtctggtccaaaaccaccttgcctccccgacaggaggggtagactttgacgaagaattcatacagcatgccatcatccacgtccggggtcaggtcccccacaaagagggaatactcagggctgttatctggttgtttcccgtaagtggcatagttcagtttaaaacgtttcgcaggtgtggctcctggaaggggtttcccattaattttatgcaaacacttctcagctgtggccaaatctgcaaattctacaaagcagtagccagctgggatcccagtgaggcggtttcggataattttgacgctcattacggtctcccccatggtggcaaaggctctggagatgaagttctcatccatgtagggttccaggtcgcccatccacaggctggccgccatacccgcccc

SEQ ID NO: 130555 - DNA, 1135 bp, Homo Sapiens
  misc_feature (75)..(94): n is a, c, g, or t
  misc_feature (835)..(835): n is a, c, g, or t
  misc_feature (839)..(839): n is a, c, g, or t
  misc_feature (845)..(845): n is a, c, g, or t
  misc_feature (888)..(888): n is a, c, g, or t
  misc_feature (916)..(916): n is a, c, g, or t
  misc_feature (950)..(950): n is a, c, g, or t
  misc_feature (954)..(954): n is a, c, g, or t
  misc_feature (961)..(961): n is a, c, g, or t
  misc_feature (1033)..(1033): n is a, c, g, or t
  misc_feature (1076)..(1076): n is a, c, g, or t
acacgcacggcacacttgctatgctcaaaattaaccctcactaagagggaataagcttgcggccgcctgtcaggnnnnnnnnnnnnnnnnnnnngatgatctgacttgctttaatctgcacactgcgggggtgggggtgggcatgctcctcagcagtgcattctgggacacgggcgggcgggggctggcacgggaggacgagagcacctgcagggcagcgcctggcgggcgggcgggcgggcgggcgatgtgtcagctgcagttcttgggcaggcggtagacgccggccgagtagacgagctgctggtcccgcaccttcttctgcaggtagccctgcagctcctgcaggtcaatctcggccagtgcaggcccagtcaccacaaacatgcggagcatgttgtagatacgatccagtgagaggctctccaggttggtcagcatggcctggatgtacgtccagaagagcagcagctcctcctccttctggtcggcctgggaggccatgccggagtcgctctcgtcgtcactgtcaatgagcaccatgttgtcccggtcctgaggccgctcctcctcaatgacagagaaggtgccggggggctcctcacgcagcacaccctgctgcagccacacggacatccgccgccgcagcagcgccacgggcatcttcaccgccttgctcagttcctccagggtccagctggcttggtcctgacaatacagcaagatcaccgcctgtactggggtgaccgccacagacagcgtgcggtcggccagctccacgtccatggtcaccaggcccagggtgtgcttccaactgagggtccgcatggcctangganggtcanggtcagcacgggcagctcggctgcagggcgctcaggcccgtgngctctgccaccctggtacagtgagaaanggctcccagagccactgccccacccacctggcangcangtgacancgagacacagactgggtgggtcccactgctcagcacatggagggcatggggcagcatctaggtgtgtccganaggtacagggctctgaccccatgcttggatgtggcaattgcancaggtgtgcaatgtacgagtgtctaccactgcgggtcttctaaaagaatagaacagcag

SEQ ID NO: 130556 - DNA, 1365 bp, Homo Sapiens
tctgctggacgccataaagggtgcccactatcttgatgtacctaccttggcgctatctacgcatgtcggcctgccccccaaactgcggcctgtgtgtagagcagctcacgagatgtcttctccacgttgggctacctcgcttgaggttacccaaaaatactcaacctcttccccctttctggcggccttggaagccaacctcggttctgcttctcgtctgtcactcgtcattgatcacccagtgttgttccccggttcctgaggccgctcctccccattgacgaggacgtgcccggggggctcctcactcaggcacacacttgctggcagccacatcgactatccgcccgccgccagcagccgcccacggcaatctttcaccgccttgctcagttcactccagggtccagcctggctggtcctgaaatacagccagatcaccgcctgtactggggtgaccgccacagacagcgtgcggtcggcccagctccaggtccatggtcaccaggcccagggtgtgcttccaactgagggtccgcatggccttgagctgctcatatttcttgcagtaagcctccagggctgccctgatatcctcggggacctccagcttctcgtccttgaagggcggccagaactcactggacaggatgacagcgtagaccccgaacggtggctgctcctctgctggccggttctcatcctcctcccggatgttggcattgatgcggcgggagtccgccatgtccttcagcatgacttcacagaagtgcattggggcctcgccaaagcgcagcttcagcagctccacgttgcggatctcccgctcggggctgaagctgaactggtgcagcaggcggtcggccagcagcgagcggtactcattgatgaagaggtccttgctgccgtagatgctgaccagcaggctgatgatgtccgatgaacgccgcttggagctcgacttccctggatcggcatccacagggtccgggacccagtcctctggctcgcctgagtcatcctcactgtcctggcctgtctccaggctcgccgggtcggtcttggacagctcaacagccaggtcccctgtcccgtccgagtcccccgtcagcccagccacaatctgccgcactgtgtcctcccgcgtcctcaggtagcggcggataggctcacaggccacctccaggatgaccatggaagggtccagcacgcgcagcgccttgatggcagagatatagagggtgatgatgtcacacgtgttgacgcctggatgcaggagccgagtctccagggcagccttgagggacacgagcagctgctgcctctggtccgtcccggacgcgtggtcgacgatatcccgggaat

SEQ ID NO: 130557 - DNA, 1185 bp, Homo Sapiens
tttttttgaagcagaaaaaaacagctgttttattcaactattcacaatagagaatatttataatctagtcactgaaacacgcatttcttaggccactcctagaatatgggaatagctgttacataaaatactgttttataattatattaataagaaaaagcattttacctgttccaagaggggaaaaaagctcctcattgagtatcctttgtctctagatcagaatggtaaagtcttgggcctggttcttctaccctggagcaattcttccccagtcaccctccagggaatgtcagaaaacgtgaagaactttagagactagaatcatattcaaactttccttgaaagtagctataataaacactaacaccttttttaaaaggccaaattaggtaacttctttaggtggatcatccagcaaaagccaatgaacctgaatacaagctatttttttcttttctcaaatatcttcataaaaatatattaactcaaatttagaatgcttctcatttccatccacagtattgaaataaaaatatttaaagagtatttagttataaaaagtagctaaatggtaaaatgtcttctcatggtcttgatttttctgtgctctatgccctaattttaatatagcaactgcacttcagtaagatccagtccaaagatttttttaaaaaactataatgtacgtgaagcttttaaaaggcagcatcatcaagaaagtaatttccaaatactggggagaaaaaaaggcttttgatctccttgatggaatgacatattcagaataggggcagaaccctgtgccatgcaaagggtcattcttcctcttcttcctagacattcttaggaagctttccttgtataaaaagaaaagatcctaagttaacaactcatctttatgtacatctgcacacacaaatatacaagaaagtccactgacttcattcctctactagtgtagtgatgttttcaaatatttcgtgaaatccagaggcgattcagtagcaacttcactggagtatcttttgattagctgatttaaatcttcattcaaaaatgaatccccttgtaaaaatttaccctttattttggggtttgaagattcaacaggaggattgaatgtcatttctgccatgctatatgcctcaaaaagttcagtagcagatcttcgactcaactccc

SEQ ID NO: 130558 - DNA, 710 bp, Homo Sapiens
  misc_feature (245)..(292): n is a, c, g, or t
gacccatttacatttataggagaaacagtggaccagggagcgacacactcagcttccctacttcaggcaactggccgactccgaccaacagagaaatcgggaacatcatcatacggcttttcggtcacctctgcggacgctcagtcccactccccctccccctcagcgtcgtcctcgtgcggcgcctccaggtcgttgaggtggaagttggccatcatgtcgcgcacagccagcatcagcctgtnnnnnnnnnnnnnnnnnnnnnnnnnnnnnnnnnnnnnnnnnnnnnnnntctccccctccatggtatagtttggcaacagtgaccggaagaagagagcaatggtgtttccatggctgataggacttagcctctctggcctgacgtaggagtagattgtgtccgaaggaggcagaggatcaaaccccatcacagactgcgtggtcacgtccgggggcagggcagcgacggcttccttgatctcagagaggatcacatggcggtggatattcctgggtgcacgctggtagagcaccttccgccggttctcacaggcttccacggctgggtccccggcgtccactgcttgcagaacctcgtggacgttctcctccagccagctcatggtggcgggctctttccagagaaagtgtgacctcccaaggtacaggttcaccagctggctcagggcagggggctggcttatttc

SEQ ID NO: 130559 - DNA, 555 bp, Homo Sapiens
  misc_feature (17)..(17): n is a, c, g, or t
  misc_feature (24)..(24): n is a, c, g, or t
  misc_feature (33)..(33): n is a, c, g, or t
  misc_feature (74)..(74): n is a, c, g, or t
  misc_feature (98)..(98): n is a, c, g, or t
  misc_feature (116)..(116): n is a, c, g, or t
  misc_feature (131)..(131): n is a, c, g, or t
cggacatcatcatacgnttttcgncacctctgngacgtcagtccactcccctccccctcagcgtcgtcctcgtnggcgcctccaggtcgttgaggtgnagtggccatcatgtcgcnacagccagcatcatnctgttcaggccctggttgcggttcagacccccagccacttgcatgagactgctctgagggcactgtctcggtgtcatctccatccgtcttgctctctgtgtttccacgctgaccccttcctttgttccctggtgccacagcgtctgtgagcgcacagccagacctctccccgttcaccacagggtcatcctcaagatcgtcaatgtttatccaaaagctgtgattttcattagttttagggtctcaaatggggaacatttcacaaggttcttgtccacgactgatcttctttaggataaagctcgatcagcatttcagttaataaccaggaaggagttttatctttttttagggggagaggaaaatgtccatttttccagctcgaagcggttgttgactcggacgccctccttccctgcgcccc

SEQ ID NO: 130560 - DNA, 419 bp, Homo Sapiens
  misc_feature (21)..(21): n is a, c, g, or t
  misc_feature (119)..(166): n is a, c, g, or t
ccttcggacacaatctactcntacgtcaggccagagaggctaagtcctatcagccatggaaacaccattgctctcttcttccggtcactgttgccaaactataccatggagggggagannnnnnnnnnnnnnnnnnnnnnnnnnnnnnnnnnnnnnnnnnnnnnnnacaggctgatgctggctgtgcgcgacatgatggccaacttccacctcaacgacctggaggcgccgcacgaggacgacgctgagggggagggggagtgggactgagcgtccgcagaggtgaccgaaaagccgtatgatgatgttcccgatttctctgttggtcggagtcggccagttgcctgaagtagggaagctgagtgtgtcgctccctggtccactgtttctcctataaatgtaaatgggtcacgctcaaa

SEQ ID NO: 130561 - DNA, 1161 bp, Homo Sapiens
ctcggccccccggcaactgtttcggatggagctcgcttggcctagagcctccgaacacatttccttctggtcacagggccagaccgccctgcagagactggcacccttcctgttgggaagggcaggaggcagcatgcctcccccagccaccagggaagcaggcggcccagggcagtggtggctacatggcccctgctcctgtcaggggctgcagggaccacgcaccacgatgttgttcggctccatagactccacggccaccaggaacttgtgctgagcctgctggtactcctcactgtgctcaaacgcaaagaaggagaggcctttttttgattccagcagccgcatggacagacctggtttgctgtagcggggccaggtgcttttaggggtggtcagccatgtgcacttggggtacacacgttgtctctgccgtggcctttgctccccccaggattgcccgggcaccaaaataccttttcagttctgtgtctggattcaagtgtctgtgctccacgtagagaacgtgcttcctggagctcaggggagctgggccgggacggttcaacccagtgctgtcctcaatcctctctaggatgcgatcgatatcttctagtccgttttccgatgcttctcccgtgctgcttttcttgtttcctctgctttgtttttgcttcttccggagtttgccacttgcatgagactgctctgagggcactgtctcggtgtcatctccatccgtcttgctctctgtgtttccacgctgaccccttcctttgttccctggtgccacagcgtctgtgagcgcacagccagacctctccccgttcaccacagggtcatcctcaagatcgtcaatgtttatcagctcgaagcggttgttgactcggacgccctccttccctgcgcccccgggacgccggacaccaagctcccgcttgggcccttcttcttccgcgtcatcgtcatcacggagatcgaaatgcaaggcgccgggcccgaggggctcctggccgcgctgttcccccctcagcctccggagggcccggcgcgacataggaccgaacgaccacgacgtctggagagagggagaaggaagcgcagaaaactcggctgtcggcgcgcctgcgcactcttcgcgcggggtcgggggcggggccc

SEQ ID NO: 130562 - DNA, 1976 bp, Homo Sapiens
  misc_feature (1384)..(1384): n is a, c, g, or t
  misc_feature (1550)..(1574): n is a, c, g, or t
ttttttttgacccatttacatttataggagaaacagtggaccagggagcgacacactcagcttccctacttcaggcaactggccgactccgaccaacagagaaatcgggaacatcatcatacggcttttcggtcacctctgcggacgctcagtcccactccccctccccctcagcgtcgtcctcgtgcggcgcctccaggtcgttgaggtggaagttggccatcatgtcgcgcacagccagcatcagcctgttcaggccctggttgcggttcagacccccagccactccttcctcgggcctctccccctccatggtatagtttggcaacagtgaccggaagaagagagcaatggtgtttccatggctgataggacttagcctctctggcctgacgtaggagtagattgtgtccgaaggaggcagaggatcaaaccccatcacagactgcgtggtcacgtccgggggcaggggcagcgacggcttccttgatctcagagagggatcacatggcggtggatattcctgggtgcacgctggtagagcactttccgccggttctcacaggcttccacggctggttccccggcgtccactgcttgcagaacctcgtggacgttctcctccagccagctcatggtggcgggctctttccagagaaagtgtgacctcccaaggtacaggttcaccagctggctcagggcagggggctggcttatttcagcattgggtccaaagaagcggtgactggaaacgctggcgtcgggccgcacactgcaagactcgagcaggggcaggaggactccagggaacatggtgagcgcctgctgtatcaggagagaggccttctgcctggcagagctctgctcacactcagggaggtctgtctgctggctcagcaggaaatacgccagtggaacagagaaggcaaaattagggagctgggacaggttccgatgagcctcccactcctggaagaggcggatcaggtactcgtagttccgggcccgcaaggccaggtggtcgatgagcagcagcatgcagagggggtcctcatccggctcgagactcaggatgagcttgcagtactccagcgccgtgcgcgggcagcctcgcttctccaggaagctcatctgcttgtagagggccaggtagaagctcctgttttccggttctgcggtaatccagcgggcaggcccccactggtgaggctgaacagggggtggaacgcacattccatgctgtacagcgctctctctacgaggtctcgagccatctcctgatcctcttgaaagcggcaggcatcgctgagcacgatgttgttcggctccatagactccacggccaccaggaacttgtgctgagcctgctggtactcctcacttntcagttctgtgtctggattcaagtgtctgtgctccacgtagagaacgtgcttcctggagctcaggggagctgggccgggacggttcaacccagtgctgtcctcaatcctctctaggatgcgatcgatatcttctagtccgttttccgatgcttctcccgtgctgcnnnnnnnnnnnnnnnnnnnnnnnnncttcttccggagtttgccacttgcatgagactgctctgagggcactgtctcggtgtcatctccatccgtcttgctctctgtgtttccacgctgaccccttcctttgttccctggtgccacagcgtctgtgagcgcacagccagacctctccccgttcaccacagggtcatcctcaagatcgtcaatgtttatcagctcgaagcggttgttgactcggacgccctccttccctgcgcccccgggacgccggacaccaagctcccgcttgggcccttcttcttccgcgtcatcgtcatcacggagatcgaaatgcaaggcgccgggcccgaggggctcctggccgcgctgttcccccctcagcctccggagggcccggcgcgacatcccgggaattccggaccc

SEQ ID NO: 130563 - DNA, 212 bp, Homo Sapiens
gcggccgcccactactactatacggctgcgagaagacgacagaagggggagggggagtgggactgagcgtccgcagaggtgaccgaaaagccgtatgatgatgttcccgatttctctgttggtcggagtcggccagttgcctgaagtagggaagctgagtgtgtcgctccctggtccactgtttctcctataaatgtaaatgggtcacgcat

SEQ ID NO: 130564 - DNA, 624 bp, Homo Sapiens
tcccgttctgaaggacgtgaccacgcagtctgtgatgggctttgatcctctgcctccttcggacacaatctactcctacgtcaggcaagagaggtacctccctccttccagttcccacctcccagctgccactctactgaggagagtcagaagctcacagccccagacaaagccagccatgccggtcataagggcccgcagagcagctgaagttaaaccaggaggcattaagctgtccccagtggacggtccacggtcctgcgaccctctgacttgctggttttctcactcgttctatcttatcccttaacaacagtacaaactccttaggttttgagacagaaacggcacctccagcacaggaggcgtcagagcaggactacaccccacgactacagagaatcccccagcagccgcaccacgcgctcacaagaccacggatggagcagctcaccacggtgacgactcagcttgtgctctgagccccaaaggatttctctctcaaaacaacaagcatccgaacccgggctgccaggaaaggaggagccctctgcactagaccctgcccctgccgtggcggggctgggctgctgagggagcccgcaccacgcacgcctgcatgtg

SEQ ID NO: 130565 - DNA, 1664 bp, Homo Sapiens
  misc_feature (12)..(20): n is a, c, g, or t
  misc_feature (479)..(502): n is a, c, g, or t
  misc_feature (744)..(782): n is a, c, g, or t
  misc_feature (1103)..(1129): n is a, c, g, or t
aactcttaagannnnnnnnnaataagtgctctgtaaggaattgtgtgaggacctaaggagaaagattgcaacaaatagagttaagtgttaccaaacagcacaaagagatttgtcccaaagtcctgcttgtacctaggcaattaagtctattaacctaatgcccccaaaatactgacagttaatatgatggggcactagggttctcagaaagttaacagacattcctaactacatacctctaaccatataatcaaggaaatttcagtggagaaatcaaagtgaaatgttgcattgtttcatttagaagtgagactctcaaaaacctttggacagacagagaagtgatacattctttttggcttctctgaacactgaggcctgagggatatggaaggaaattagaaaagcaatagctttctaaagatgtttaatcaagtgttgcttctaagttaaaaagcccaattcaggtggggtctggnnnnnnnnnnnnnnnnnnnnnnnncaaatatatactcaattcaacctctgtatgtcacaaacccagaaagtttcttgtgagttgtgagacggaagaactttaaaattccaggcaagcaaaatggacatttaaaaaaggggactagagaggggaatctggccctaaggcgacaagtggttacacaaggccattgaacacacagcagaactttaaaacctgtaaaacaaactggagccttttttccctttaatcaaccttatatgtcnnnnnnnnnnnnnnnnnnnnnnnnnnnnnnnnnnnnnnnacaaaaacacagacttttttcacttcagttatgtggtatgttgcattttccagtttgttcaatgctttaaagctcaaggatgcctctgctttcaattgtacatgggcctgaagcatcctagcttttggcaagcaggcaggagactcaacaaaaatcaaaataggaacaaggcagactaaatgcagggcacatctgtaaacatattatacatttgaaaattacaatatcagtcaaagtgatacagtttacaggtgaaatgaaactatctggaactggcctaccacaagtttctgaacctggactgatacaataagttatttnnnnnnnnnnnnnnnnnnnnnnnnnnnaaaaaaagttttgtttacatcaagtggaattggcaatccatgcttatacttttaaaatctaagcagggcagaaatccagactaaaaagatagttactctactctatgttgagtccaacagcttctttcatgaactacttgttttaaaagcctcaaataatcaacaaaacaaaaaaacccatccatactacagtcactcaaaactggacatttctaggggtagagccaaagtagttactttctccccaaataccccaggggatccagtctacttttatcagaagactacaactctttatataaatgccctgatattttaacctgtatttgacatacatggatatactaatttctgtgtgtgtgatgtgatgctgtgtcaggccagacaacttgttattatgttactaacatcacccaatctcaattggacccttaatttctgcacacacacacaaaaatttattttagcatgctatacacaagctgcagtgcaacaggatggcaatgtaatgataagacagggctaatgctcttct

SEQ ID NO: 130566 - DNA, 397 bp, Homo Sapiens
  misc_feature (300)..(324): n is a, c, g, or t
acttcagttatgtggtatgttgcattttccagtttgttcaatgctttaaagctcaaggatgcctctgctttcaattgtacatgggcctgaagcatcctagcttttggcaagcaggcaggagactcaacaaaaatcaaaataggaacaaggcagactaaatgcagggcacatctgtaaacatattatacatttgaaaattacaatatcagtcaaagtgatacagtttacaggtgaaatgaaactatctggaactggcctaccacaagtttctgaacctggactgatacaataagttatttnnnnnnnnnnnnnnnnnnnnnnnnnaaaaaaagttttgtttacatcaagtggaattggcaatccatgcttatacttttaaaatctaagcagggcagaa

SEQ ID NO: 130567 - DNA, 2788 bp, Homo Sapiens
  misc_feature (58)..(87): n is a, c, g, or t
gtgccaagctaaaattaccctcactaaagggaataagcttgcggccgcctgctcaggnnnnnnnnnnnnnnnnnnnnnnnnnnnnnngtctcttcccacactttatttttcaggaaggagagaaaaagaatgtcatgtctaacatatagtagatggttttagttacaaacagaggtgaaatccttactgatcaagttgccatgaaaaaccagggacctcatctttggaaagtcttaatatatgatttcaaatatgtgcagcgactgtacaaaaatttggaaatatacacaagagtgtcactcagcatcatgcctggtatataaaaagcactaactaaatgtccatggaataaatgaatatatgaatatcattccttcactcagccaagcaaagtaggttgtcaccaaaatactcccacccatttatgagagtagtattttttctgagtctagcaagtgtgcacatcataccacaggcttgggcctgttattgttccatcaggagttcatgagtgtgtattgaagtgggattcagttagcttggaacatgatcttagaaactggactacattggctttatgcatacagttacatggaaagctgaaagtatcccgcctcttcttgcagttaacctgggttaggctctaatcaatagtagcttctctccttactctcgggacacagtgtttctatcctactagttacctaagactttataagtgaaacataaaaaataatgaaaagaagccttgctaagttgcttttatcagtttcacaacatggctgaagctgcctgcagtataatccctctccccatctctaaaatgacatttaacctataaaaaattcaacttccccaaaccacaatatctatttaacaataatctttaggaaaaaaaggttaatagccactccagcacatctcacatcaatggcactgaaaagtgagcttcagaaacaaggtcgaaatttaagaaactcctttaaattcttggtttttgagtagcggatccttttcctggtttcccgggaagaacacggcttttgcacggttgagaaagacactcaggcctttgcttctgaccacattcccaggactattttctattgggttgtattccttgtgttttttgtacaccaagagggagatcacagtgacaaatatggccaagcagccaacggagatcagggcactgtttgccatccttaaaggcgaggctgggtctctgtcaggaacagaaatcagggtgctcgtgagagccaggcttgtgtcatcccccagggtgaggttcacacagtacgtcccagacccattgaaggttcgtctcacagtcagcagacacatctcatccacatccacagggctgcagactgtgttctgggtgatctcgcaggtggggtcagaaatgatggtacagacctccgtgggaatgctcccttggcaggtcacgacaaagtctattagggagctttcaggccatggcaccggcatcaggacgtctgtcatctggatgatgttaacctctaagattccctctacaattgtgatggtggcttgaaagtggccatatctgttaatctggcagttttcaatcaggaatcctactcacgctccagggcggttgtcaccagcaggtcctggggtgtttgaatcataagattttagagtagttgctaaagaaggggtgggttttgaaggtctgggtggtggtggcggtggcggacaaggtcctggtgctgcagctttcacagtgaggttaaggctgaaggttccattgagcacatacgtgtgattcacagtatgattggtggaaacaaacaggccagtattatccccgaagctccacttgtagttaatggtagaataattgaggaagtggctaggatcatgaatcaggacatcaaacataatggggagatctttgaggaaggtttcgtcggatgaatttcgatcgttcttctggaacatagtcacaaacacaggaatctgatctgttaccacgtacacatctttcacttgtgcgatgggaacatatgcccgtccatgtcttctgtagacagtcacttccatgagttgaggcccaagtgtcacattggctgtgttcacagaaactctcactgaacatcgtcccaatttctggaaatactgaccaagtgtgtggaagacgtagatgaaattccatcttctccatccggggtggtgaggaaaaggtttcccatcagggaagacgttatgatggctttggccggtgccattttccccgtcactgtcctctgaccatgctgtccagttgtaaacatacggatcagcagataaaccagcctcatttctgcagttcttctcatagactatgttgccattggcatcttccttttggcatctagggaatatcaggttcaccgcaaatgttatatttgagcccacgagggctggtgagtcactggtcaggaccgcctgcacacggcctcccttccaggagtttttccacctcatgtctccccgcttccacactgggtagagtttttcattccagtcattttcatcagaagaccagccatttaattgattgtgctccctcatgtaagcagaaggtctttcattgcccagcacatcatgaaatcgtttggcggcatcaagtggcaatcttgcagccaggagcagaaatcccaggaaatagtagagacattccatgctgaattctcacggacgcaggcactcaaggtttaactctgaattcctctgggcccgtccaccaagcgcaacagtgttcttctggcatctccagtag

SEQ ID NO: 130568 - DNA, 713 bp, Homo Sapiens
gaaaaagagcttaatctttttgtttttctctctttttaactcttcggtgtcctggagatttggcaaggttaaccaagatttcatttttatctctcactgttcactcatgctaaggaaagttagcagggtgactgttattaactctctgtgttatcattctcaattatagagtaagaaaagagaaggttgaaattttaaggaaaggtaaagaagaagcttaggggtttgtaaaagccaaccaagtgtgtggaagacgtagatgaaattccatcttctccatccggggtggtgaggaaaaggtttcccatcagggaagacgttatgatggctttggccggtgccattttccccgtcactgtcctctgaccatgctgtccagttgtaaacatacggatcagcagataaaccagcctcatttctgcagttcttctcatagactatgttgccattggcatcttccttttggcatctagggaatatcaggttcaccgcaaatgttatatttgagcccacgagggctggtgagtcactggtcaggaccgcctgcacacggcctcccttccaggagtttttccacctcatgtctccccgcttccacactgggtagagtttttcattccagtcattttcatcagaagaccagccatttaattgattgtgctccctcatgtaagcagaaggtctttcattgcccagcacatcatgaaatcgtt

SEQ ID NO: 130569 - DNA, 1015 bp, Homo Sapiens
  misc_feature (827)..(827): n is a, c, g, or t
  misc_feature (833)..(833): n is a, c, g, or t
  misc_feature (969)..(969): n is a, c, g, or t
tttatttgcttactttaattctacagcaacattcgaggtggcttactgcaacaaacccagtgtaataaatacatacgaattactttaaaatcaacgctaaggaaaatatacattttaaaagattaaggctggggtaaagctggaacattactaggcaggaaggaacatctgaaacatttgctgaaatggagttgaccctttacctagccatagatttgttgcctcacgatttcattgcatctgagcaccagggagggtggtggcagttcaggtcaccagtcccttgtttcctgattcaggaacagcgtcctgttctacacttacagtcaaagcaaattacatcattataagatgtttaatgatgaagtcaaagtccacagagtcagcaagcaagtgtaaaaacctcaggagtctaaggacagtctacatttctccccagaaatggcctccctatgtactgttgaagggagagggtcctttcaaggggctccaagacgcagaagcaactgggctgcagctcgaaataaagatgtcctttctacctgcaggttccacgaagcctcacaggcaactttggtgatctcacctgagctaggaattcggttttttgatgtgggttctctttgagccattgtgtgagctttaaaatgtgatgtggagattttgctatactggtgtttccttgccggaatttgacatccatggtggctctggcttccctgtctggtccaagaggaaatggagtgtcctgcactttttttcagcttcgctttgtgtacgaaggatcaagagacctggagtcagggcttcttcaatctcactctccntcatanacagtgtctcctaagcttttctggggtgagggccttgaccacgtgctgttctgatgaatatactgtcccagctccttgaataaagcacaggggacatatacgactgttgacgcatgcctagttgggatgttcctangcgcagtttacgacctgacctgtatgtcacaacagggcagcattgg

SEQ ID NO: 130570 - DNA, 1273 bp, Homo Sapiens
  misc_feature (235)..(244): n is a, c, g, or t
ggcacgagggttaaaggtgagagggaaaactaggttgcagactagcagctgttttgcatctcacaagaacaaaggccttaacaaaccgtatactttatgcaaacaaagtgatgcctcactgacttaggagacaagtcacatgccatcagtgtgtcagaaaatttctttcttcagtgatagttaaggtaacctcgccagctactttccagagacagctccagggcaatactggggnnnnnnnnnntcagagacataggacctcaatagagccctgtgcaacaaaaagatgctagataacaaaactcaaagcaaaactaagatcattccaatttaggggaaagtttttttattcagtgtttaagattaaaaactacaagattttgcttgcagctgatgagtaaaaagagaagttaaacataaattctcatctgagtggctagttaaaatgctctgacaccgagtcaagttactcagtgacataccagttactttgggcttaagagtcttggagcaaagtagctctaaacaaaacgtgtcatctgaagcatagggctaatgggcatatgaaatactaaataagaagctgatggaggcaggctgtggcagatttttggttcttttagggttctagcagtggttgccatataagcaaggacctagcagagagttatttcctgtctttacttttctgagttaaacaccttcaacccacacccactaagcaggaataaagagacattttatagaccagttggaaaatataaagcagtcccacttctccagtagaattttagttgaattaaatcataagagaaacaatgattattgcacatattatacttgtcacactacatctgttgagtggaatttccattccaagtgttgttttcatcttcaccatcatcttgagtccttaatctataaattttcccctcctttttaaagtcgtctccacgtttttccagcactctttttctcactggttcccttttttctgatttgctagatgatgcagggtttgggggttctgacgatgttactctcactgaagtctgtgtgggaggcggattactaaacaagaaattgctaattaatctccagatggcaaggaatggataaagcactgttcccaacaaggtccaaatgtctccgctggaagagtgtacaatggatgcagttggtcttcctgctggcaacagtaccaccgaagcgcttggggcaagttccaaatccagtaacttctttttataatcttctttggtaaattccctcc

SEQ ID NO: 130571 - DNA, 907 bp, Homo Sapiens
  misc_feature (229)..(251): n is a, c, g, or t
cgggcatcaaccacaccctttgaacccacccggccagctttcccttagacccaacaggtgtataaacccggccttcccagaggcctaccacttctgaaggaaaacccagccaagtgtcggcttaatactctactgttggaataaggaaaaattgagggggaatggaatccaagaccaccaaacccccccggggcttaaaccggcccgactgagaactattgttagggtnnnnnnnnnnnnnnnnnnnnnnnggaagaagaaataaaagaaaataaaaggtatcccaggccaggagcagcaggttgaaggcacagaggcaagaaacagcaaggatggtgtacacggaataccaagaggtccaggcgagaagcaggggtggcaggcaataagcaggatgtgggagcactacacaaaccctacgtggggagaggggtctcccagaagaggctggtcctgcctggctacagcgttacccacgagagaatccttgctgcttgctggcagcaagccatactggggggcctgggccttcagtatcaaaaatatctcaacctaggggagggccttgttgactgtttgaacatggaaacccttggtccaacatgatttcccgtggtccactgaggaggtttaggccataatggggtaggtgcttagagaggattcaagcccagtgaacccttggcctcccagctctgaggagggccacagagccagtattccctacccccacccacagaaatgtatagcagtctctgactgttgctttcacacaccatcacggttgctgttctgtaggtgctgctcagggaaggtgggaaggacagcaggctatttcttgacctcaaataggatacactccaaagacgggatggcctggcacagaggcccagccctgattcggaaa

SEQ ID NO: 130572 - DNA, 543 bp, Homo Sapiens
ccgttttcagctctgttttgcaaacactgagcaccgactccgtaccaaacctggtagtgacgatgggggcagggaggcacggaacaaagccacctcctggaaggcattcacacactcctggtcatttgcacctcacccaccctgcccaagggtcaagagggccatcacagcctgtcagcaatgaaaggacccaaaagacacaagtgaatatacctggccctcctgcaaactttgcaggccaggtggtaagaatgaaggcaaaaatatgcacgtgactaaaaaggtaatgtttgctgacttgccagcaagaaagatggccggaaagaccagctgtcccgagcctagcgcggtggcccatgctaagcagccactcagtcaatatgtgatggctgaatggagttcgccaggcatttcagccctgaaactggacaagagcctgcccttccaaagtcatttcctgcaattagcagcctgcagtctttaggttcttggggctgcctcttctgcccttcataaatattgcctttcccaaggacactgctg

SEQ ID NO: 130573 - DNA, 511 bp, Homo Sapiens
ttttttttggcaaaaagccctttatttcgacattaaagatttggaggtacagtttgctgtacagaagttttcacccctccataatttcaccagatatagagtgtgcatccctgacactgaaactgaaggctttatggtttcatcttctaagatagattcccaaagagagttggttcacctgagtcccagggggctgacaggggacagtttaaaacattgatgaatctttattactacaaaagggttcgatttaggctagccaacatgtaggtctttttatgtcctagaacccagtgacttcccgtctgtctgtaatggcatgaaggcaggtgactgtagaagatcctctcgcactagcgcacacagaatgttttcttgcacccgggccctgcctgatggcctgcaccactgagcgaaaaaacctctccgtccccaccagggtgccttgagtcaactagtgctggcccctcacccccttctacttacccccaaccccggaggctgtcgacgc

SEQ ID NO: 130574 - DNA, 1164 bp, Homo Sapiens
ctttagacatatccccaattttattccctttgtccaacattccgagagggaaggggcaaatgagtcaatgttgcccctcaaaaccatcaagtaggggcctttgggggtcttcagttgatcaaccagggtgatagacccctaccccttcctcatggtcctggcttgtcacaattaatgggggaaagttttccagaaggggattccgggcttctcaccgctcatcagggcaccttcccaaaacgttctcagcaaaaagtctgcacttctcagagttaaatacaggagaggggagactccttgaggagccagaagtgggtatgttctcaggggtcaagagaagggcgtctcaggctctccctgtccaccgggggtcgtcctggctccccgtaccttcgggcaagtagctcttggcttgacactgtccagcccgccagcgtcccaggccgccccaagccctcatgggggaggagcaccgacctgtctccaagcatcggaaaaggcgggcctcccttgccgtccatcacggggctctctaggccccctgcgtcgccaaggaggagtctctgacatccccaattcgtcaagctagtctcttaagacctctcaccttaggcgggttccccagtccccccatgcagtcaggcgagcctcctggctccaccacgccatcgagcgagttcggctcttcgcctgtcaccgtccgtcggggcgggtctccggtgcccccgtgctgtcgtgggggttccttggactgtcgccgtcgtcaggctgggaacccacgccgccaggctccccggtcggggcccgcgggcgtacgaaggcgcccatggcggtggcgtggcccgagcgtagcagctgcagctggcgccgcccgcggcggtacaggtactcgatgcgcagcacgtcggaccgcggcaggcccgcatgctgccggaactctgcccgcactcgcgcctcggcgcccggcttcccacgcccggcgcgcagcagatcgcggtacaggctcagaacctgcctctgcagccggctgtgccggctcatgaccgcggctaagcagagacgctcagcgaacgacctgcgaaccgcggagccgccacacagccagcaaaggcccctcgtgccgaattcgccacccaggcctcgctaccttaaaccgttatagtt

SEQ ID NO: 130575 - DNA, 1052 bp, Homo Sapiens
  misc_feature (910)..(910): n is a, c, g, or t
  misc_feature (913)..(913): n is a, c, g, or t
  misc_feature (916)..(916): n is a, c, g, or t
  misc_feature (934)..(934): n is a, c, g, or t
  misc_feature (994)..(994): n is a, c, g, or t
  misc_feature (1018)..(1018): n is a, c, g, or t
tttttgccgtacagagatcaatatatataaagtgccggtacaacgctctgaaaaatagttttgtcccaaaatccagcgcctagggtgctccgggcctagcctttgccagtgaggtccaacggctgcaggaatgggggcagcggcagctcgtccagggcctcggggaagcggcctggagagatggcggtgaccagcacctgcatggcgcgcgcgaagagcgagggcggcgccaggcccgccagccactggaacttgtcctcacccagcagccgctgccagcgcggccggtcgcccagcagctcctggcgggccgagccggcggcacccacgggggtgtacagcgccaggaggtccagcagcagcaggcggcgctggcgcggctccccgggagctgaggcgggggctccggcggcggagggagtggccccggcgtcgcggcccagctggcgcagcagcagctcgagaggcgtgaggccgccgccgtcccgcagaccgggcgaggcgccgtggcccagcagcaggaagaggcactcggggcgcgccagctcacaggccacgtgcagcgacgtgccaccgccctccacgcggctgcagccacgccggtccagcacgcgcgcccgctcctcggccgggaagtcgcgcaaggtgcgcaggatgcggcgcagaatgcccacgcggttgtagcgcactgccagcgccacgtgcggcccgggagccgcgcagcagcggaagccggcactgggcggtgcgagcgcgcgccgcgggaacgtggccagcaggtaatgcgcgtacgcttggtggtcgtgcacgagcgcgtagagcagcgcctcagagggcgagtaggcggcggcgcgccgcgctcgtcccagtggaaggctcgctggagcgcatatctccagcagcacacggntancangtcgcgcaccgctggtanaagggaacgacgactgcgggatgctctgcgccgcgagcgcgcgcgcccgagctcgggccngcgtctgcgcaccccaaggcgcgngcgtcctatggatgctggggtgggtgtccttggc

SEQ ID NO: 130576 - DNA, 1168 bp, Homo Sapiens
  misc_feature (1052)..(1077): n is a, c, g, or t
gcggccgctccaagaaagagatggtgttacaggaacccactgaaagccatatcccattaaatgaggaactaattttggctgggccttcttgtaatgtcctcgcaggtgtgttgtgaagattaatgcagggtagtatgtttgtagattgacacctagtctaaacttgaggtaattggtgctctgtgaatactcagtcgtgttcttttatagccttaatcatgatttgaattagtcccttgctttttaaatgactgaatgaagtccttcgtggtaagggagtacgttgataacttagtttactatatgggtttgtggtcgcatcccagtcatcagctgctatcattttccttcttcatcccttatactgagatttgggttacagctttttattcttcgaaggatcacaaagcagtgtacagacacctgccttctttaatgatgaaaggaagataaagtggtctttttttgtttacttatttgtttcacctcttgtttgagtaacttctaaggtgctattctctctctctttttgctaccccatgagctcttgtcacagccatggaaaccagcctcgtttagaaagggaacttagttcagaaggggttaaaagccttccagaatttttctttagctgctgaagtttttacatgtggttacatgactttaagttttatgcattacgctcttaattctattacaaaatgtggactcaccaattgctttgtgttttccatgtgacctgttacttcaggctacttggggaacatcttagtcctctgtagctcctgaacccagcactggtgcttcaagagagaaggtagcacgtctttgttcaaaacaaaacaaaacgacacttttggaggccacatcctgaatatgaatgttctactaagtcactcagttatggttctaaagggaaactgtaagaagacccacaaggagtggaccaagactattatttaattgcacaacttgaaactttgctgccagaagaggcagctccattcctttgactccagtgttgggctgttaactgctgcacctcattgccnnnnnnnnnnnnnnnnnnnnnnnnnnaggagggtaggcactgttgggccatatgcacaaatattgtaactcttggtatctttactgcatcatagtcaataaacttctttgtaccctt

SEQ ID NO: 130577 - DNA, 764 bp, Homo Sapiens
tactttttctgctaaggtagatttattgttacacatggttagttttcataacgtaatcccctgccccagagcaactcaggactccatggagcaggaagcctgctcttggtcatagctcataccacagcaggcaggtcacgggggcatgctgtgctgccaagtcctccaaaggaagtcacaaaggtttgcatttggacatttaaatccacaaaatcaggagaaacaataaatgcacaagggctggtgcatatactttggttacagtgacgccaccacacacggtcacgactgtgcaaaaatgctttcaaatcattaaataaaaaagaactcacacaagctataaaaatgttgccacaaaaagcaaaactttcctctaagaaatattaactgactttgactatgaactaactccagatttgctaaagtacaagaattgtaccataaataattatattttgttcataagtaacattctataaatcttgaagacctagctcacaggcatcttgaaacatggcactgtcctacatccatgggacatttaaaggaagtaagtttgcacaccactaactgggcttttctctcattcttttttttaatcttctggcaggtctcttctagccattacaattactttgattcttttcatgtgaaatattaaaaacaatattaattcctacccccggtactggttccagtgtttattgcactacaaacaagtgaccttctatttgacacaccaccatgttataatcatttttgtt

SEQ ID NO: 130578 - DNA, 782 bp, Homo Sapiens
ctcaggggtctcttttattaggccactaattccactcatgaaggctcctcccccacaatctactcacctcccaaaagcctcgcttcctaatactgttggaccggggattaggatttcaacacatgaactagggggatataaacattcagtcaatagtagaaggttctgcctgttcagcccagaactctcaaggtctaaacttaatctctcctttcccatgaggaccccggtccacagcctctgaggctgtgtcagcttctagagcccattactctcagaagataaagcccccagcagggacactcataaaaaggaatccgaatctggagtgcttaggagattgcctgctctgtccatcccctgaaatgaaagaatgatggagccggcccatgggtctcacccactagatggcgctgtgaggtgcagtgggaagagtagctggaggcaaacctttgagattcagattttggacaaatatttaacttcctggaggctcagattcctccttgagatacacttggcctgtatcccccacaacacaggtatgtagatcatacgggataacgtgtaagaaagcactttcaagtataacacgtggtgacatacttgagcctgtggactgttgtcactgaccactccaccctgtgtaccagaggctggggctgtcagagtctagtgtcccaggaccttccccaggcttctctatgatctcttcactcctaccttcaccacgtgtgaccaagtcccctggtttcccagctaggagagattgccagaaagga

SEQ ID NO: 130579 - DNA, 883 bp, Homo Sapiens
  misc_feature (857)..(857): n is a, c, g, or t
gttgctgatctagacttattaaatttatttcatgtcattgtggtcacttttacagctgtttagacttattttcaatcacattactcttcacagaattcacagaattcattaactaactagtatgttacatccaagggttcttagtagcacattgaaatagaaaagaggcccacgagttgttgcttgtgtgtggaacctgagtctgattacttagacagatgtctagaacattattgctttattaggcctatttttaaaaataataaattattcctaggaaacccaccctgccaggtgctcattctgcgactgctgtgggttcactcagaacatacctgactggtgggtgctgaatgaacctcccacccatgtatcctgctgctccggacgctctgagggctggagcaatgcccctccatgcgtgtaaacattttctacagcttgccactttcctccctggtcttgcagccaatgggctgcagtcatacatgggtctctatgtaaaacttaaattagacctaaacaacagggttcagcgaatgaggactaatgctcctataaaagccactgcccatgcaagggaatacacctgatgcaacaaaaatatcttgagtctccaactataaggaatgtctcaaagaaaatgtccttgatttaattatggtccaaggtggctgctttgcacaagcttctcagtgacatgaacttgaagacttcatggtagatttcatggctggggtttcttattttgttccatatgagtttctattttgtgaaaaatatcttggaggttttcgcgtggtccccaaagctctggggaaccgtggataccagggataagggacgggcttcctcanggtcactggcgctccgaccgcatttg

SEQ ID NO: 130580 - DNA, 1166 bp, Homo Sapiens
  misc_feature (583)..(583): n is a, c, g, or t
gtgtttgaacgttttatttgaaatatctgcaagccatccaaggggaggtgctaagtgggtggctgaatgcaggactctggagttcaaagagtggtcagggtgggagggcagggagtcattagcacacagatggtggttaaatccttgcaactcaatgagacctccaggggagagaccagtggcccatccaccttcattctttcctcacgctgagttctctgcccatgcaatgcgcttctctaactctctacactcatccacgctgctgcgtttgtgtggaatgatgtccattccttgtgggcctgcagatcgctcactcttcaggacttcatgagggatgatgtgactctcattccccaactccatgttggtcatttctgcttccactgtttcctgtagttctgttgttgttggttgcatgtgtcgatgtgaagtgaagggacacctttgcactcttcagccgtgtctgtccccagtacgttatggcttgcaattccacaacatagtcacagtctggctggagtttctccaggatcacagaattttgaaacccatccgtagtctttctccgcttcttctttgnttggggcaagagacttactgctgaccatccagctccaaaagaccttgtaatgatgcacagggatgtccggctcctcggggagatcccaaactatagtgacggtcacactcccatcactgttgacggtggagttggccagccggaggttagccggtgctggtggggcagatggatctttggaagaacggaagtgtttgctgggggcagtgaagcctcgagttccatgcacattcacagcagccactcgaaactggtaccatcggctgggtcttatgtcagtcagttgaactcgctcgtctgtggtctgggccactgtctgccagtgagtggcgtcatcttcgctaggatggattccataattccatcttctttgtaccacatagatcacaggctcaatagaaatattgaatttcgaggaccacttaacctccagctgtccagactgcagttctgtaaatcgtaactcttttctgggcttcagggggacacctttgtacagagtcttgggtacttgacaggtgtgtccacacccattcgaacaacatttcttcaccccagagcactcattgtcaacttcgcagct

SEQ ID NO: 130581 - DNA, 1142 bp, Homo Sapiens
aacgttacggctaggtacgaggctgggtgttaatcggcacgagggtgaagctgcagcgcgtggagtgcaacatgctgtaatgggaggaaacccagcggcgtcggagcgcccgggaccgccgcggtcgttctgagcgcagtggcgccgagcagcccctcccgcagccggtgtgacctgtcccttcaggctccaaccaggaatggagacgccattggatgttttgtccagggcagcatctctggtgcatgctgatgacgaaaaacgcgaagctgctctcaggggagaacccagaatgcagaccctgccggtggcctctgccctcagcagtcaccgcaccggccctcccccaatcagccccagcaagaggaagttcagcatggagccaggtgacgaggacctagactgtgacaacgaccacgtctccaaaatgagtcgcatcttcaacccccatctgaacaagactgccaatggagactgccgcagagacccccgggagcggagccgcagccccatcgagcgcgctgtggcccccaccatgagcctgcacggcagccacctgtacacctccctccccagccttggcctggagcagcccctcgcactgaccaagaacagcctggacgccagcaggccagccggcctctcgcccacactgaccccgggggagcggcagcagaaccggccctccgtgatcacctgtgcctcggctggcgcccgcaactgcaacctctcgcactgccccatcgcgcacagcggctgtgccgcgcccgggcctgccagctaccggaggccaccgagcgctgccaccacctgtgaccccgtggtggaggagcatttccgcaggagcctgggcaagaattacaaggagcccgagccggcacccaactccgtgtccatcacgggctccgtggacgaccactttgccaaagctctgggtgacacgtggctccagatcaaagcggccaaggacggagcatccagcagccctgagtccgcctctcgcaggggccagcccgccagcccctctgcccacatggtcagccacagtcactccccctctgtggtctcctgaagggagcgcctcctccaacaacacgtggatctgcatggtttgcctgagctttgaacagtcagtacttaaa

SEQ ID NO: 130582 - DNA, 1656 bp, Homo Sapiens
  misc_feature (441)..(478): n is a, c, g, or t
tgttctgtttttgtacttgcctggtatccgtacaagggggccctcaaacatgatagcaggaactacgcgtggaacatctgtctaatgtagcatccttacttcctgcctcagttaccaaagaaacctctgatgcaggtctgctgccccgacggggccaggactccacagcgctttctcagtcacaagccatgatgaattggtgactcagacgctttgtgctttttcctttgcttcttgagaccggggtgtgtgtggctcagcttccacggcgtgtttggttcggtccatgtgtgtgcgtgtgtatacttgaagagaactgtcgtgtctgatttgcactattgggggaggactaaagttgcctgacaactttatgtgttatgccagaactctgagggcaaactggtgaaaaacaaagggtttaaggatgacatttctgaccannnnnnnnnnnnnnnnnnnnnnnnnnnnnnnnnnnnnnaatgtagacaatacagctttggaaggggaagtctcatacaggttataggtctttctctctctagatttcaggtgcttgcaactggactgcagactctaccaatcacgggcattttatcttctctgaacactgcagtttgttagactagagctgaggttggaggattccatagtgctttaaacgtgatgcatgttttaatggagaaaaaatagctggtttctattaattatatagacagtaaacaaaaaccttaatacttactatcttcttttcagaattagtttatttttgtcagttacagtcctagatatacttactgctggtacagttgtactctaagattggtatttgatattcactttactcacaagtagtgcgggaggccagctcctggcaggccctcgcgatgagcagtgggtcagctgcggtgtgggatgctggagtttggctgcaggctgacatcatttatttttgcatccctgtctgctttgttacaagctcccaggggaggtggggtttgtgtcttccaacttccctacatgcagaaactgctccctttgaactctcttggctgaacagcagattactgacagacaatctgtgatatggtgttttatacgcttcctcgtacgctggggccaaggcagtatacattcctctgactttatactgttattactgcatttattatttgctatattaatagctactaactagaaattagatgaagcaagcatgacagacacagctgtggaggtcacagctgctcctttttggtcaatgagcgtttctatcccctccccctggggtgtgctgtgtcccacctggcccaccagaggctcacgacgatggcacctgaccaggtgacgtgggcgtggtcacctcacctgcaaggctttgtggactctgcacaccgtatgacccccggttttacagtttttagctgttgaattttggaaattggcactgggtgaaaaggtcggaggactggctcttgtagtcacagagtggctgcaggcctttgaaaagtggaggaaagaaaagcccttctccttgccccgcacacatttcactcgcactgtactgggcttccaagctttggcattcaggcccctatattttctgtaggaaaaatcgttgagaaacttttctatatgggtgattttgagacatcgtta

SEQ ID NO: 130583 - DNA, 636 bp, Homo Sapiens
  misc_feature (133)..(133): n is a, c, g, or t
ctccccccattcctttattttgtgttattcctgactcacttgacactctctgatgcctgagagattcctgtttgggatttaatatccagggctgtgtttacagtaaaaaaagcaggcagtcccttttagtttntcctttttaaatttttttgagattcttcatttcaggatttaaaactatagcagtccatcttaaggaaagtgtaactgccatggccacaagtctgctagttgcacttgaatgctctatcagggttgtttattaccctttctacgttctggactccttgccgagactgtttaacttgaagattaaagaaactattgcaaatgccagtgcatcagaacctaagagtggtcaaatattatgtgcaatttttttgtaaagaaattttaatttataataaagtttaacagtttaaagaacagttaatatttgaactgctttgtattgaaatactactttgtagtattgaaattgtttatatacttttttaatataagttaactttctaaaaactcttgctgtctttattcacttttcacactggtgggaaagggttgaagtcggagatacggatattcaccataacttatagcaatacttttttatcttgaaactgctaaaccattaaa

SEQ ID NO: 130584 - DNA, 536 bp, Homo Sapiens
agtttcagtcggcaatttcttggccatggatgtagaacctacagataaggtgagccaactgcattaggaaataactctaataattctgttaattcttagagaggaaaactttcaaaatcttcctcaggtatttattacaactgcctttaccattttagttgtaacacagtttaaattgttatgataacaagtaaataagagcaaagaatttatttcttaattcaaaactatacgtttgaattcaatatggtataacttaaagtggtataatacatacaatgcatgaatcataatggattcttttataagttattaatttttatggtttaatcagtctaattgttttgactgttatagaaaccaaatattttactgtttcttttaaggactaatattgtcaaaaactgctgttattaacttcacttgagttgtttaacttccttctgttttaagattgtaattaaaaattactattttgttatatggaatggttaatttttacctaataaaaacatagatgaaatacattgtatttt

SEQ ID NO: 130585 - DNA, 619 bp, Homo Sapiens
  misc_feature (60)..(225): n is a, c, g, or t
ttatttgtatgccttttctttttcttgccttattgcactgactagggactctagtcttcnnnnnnnnnnnnnnnnnnnnnnnnnnnnnnnnnnnnnnnnnnnnnnnnnnnnnnnnnnnnnnnnnnnnnnnnnnnnnnnnnnnnnnnnnnnnnnnnnnnnnnnnnnnnnnnnnnnnnnnnnnnnnnnnnnnnnnnnnnnnnnnnnnnnnnnnnnnnnnnnnnnnnntaaatgctgagttttatctgatgctttttctgtatctagagattatcaaaaggtttttcttgcaaaatgtattaatatggcgaattacattggctatcaaattttgaatgttgattttgtttttgaatgttgatgttccaaatattgcatttttgggataaacctacttggtcatggtatattatcctttttacatgttgttggatttgacttgctaatattttgccaagaattttgtcttttcatgagtgacactggtatgtaatttccttttcttgtaattcatttgtctgtttcttatgttaactcttttgcttttcaaaagaggatatctagaaatcatattgatgtaatatgtattatactggtatattaaagaagtatggtataattt

SEQ ID NO: 130586 - DNA, 2593 bp, Homo Sapiens
  misc_feature (254)..(254): n is a, c, g, or t
  misc_feature (500)..(545): n is a, c, g, or t
  misc_feature (1747)..(1801): n is a, c, g, or t
catcttatatactagcacaagcccctcgtataataatacttttcctaacagatcaaacatcccccgctctagctccaacaacttctactaacccactgcgcatccaaaattctcccttcgtgtttacaccccctcattataccacctccaatttctgtaatatattcccttctagtacgccttatataaactcccctctaggatatgtgttgttccccacactaatttgtcgccccctcccgctagcagtagangggggttctcctcctccccaagagattccccaccctcatccacagctgtgtttttcccctctgcccgcccggttgttgttaaaacgccgcgcgcctccgggcctctgccgtcttttatataacgcgcgctctccccctttagggggccccccctttgaccaaaaaatcgggggcgcgcgcgctaaaactgtggggccccccccgggggtagattctttgggaggcgcccccgcccccctcctttgnnnnnnnnnnnnnnnnnnnnnnnnnnnnnnnnnnnnnnnnnnnnnnagtgtgcattgcatttattcttataaatgtacagagctgtagaagtgcaagccaagagttctatagagtagtacataaacaccatatggtaccactcctgctgggaggtaagcctggatacacccctctcctcaggaaactgtcacctgcagaacacacagcactcagaattaaggcagtttggccctgggcacattggtggtattttggtatgtggccactggccctaaacaactgaccatttctaccctgcctcactgcactgtcccaccaggtccctccagctttttctacaaggtaacaccctcctacatggggtcagccagctcagaaacctcttcttcagggacagttgcagctgaatatgccagagctgattattacaacaacgatgcagagggccttggttttggggtcctgccaccctcacccctagaagctgctaaacacccaggccattctgccctgaccacctccccaacagagatgtaggtctatacttaccttccacagccacctcccagcacacactgggtccctctacctgtgttgctgtctttctttacactgtgctacatttgatccctttccacatgtgcacttcacctctgcagacacaagaaaggcctggacatggtctctgcagatggggaaggggttctggatggagatgttcttgagctctacaagcatttgcacaaagtgctccagaattttggccactgcatagagctgcagagtcccattccagaacagagtaaccatctgccttctcttcccaagaccctcagctggcatgactctggtctctgtcctatctctctgctgtgatgctcctagctagtagagtaagtcagcccccagatactgtatattcctctcaaccttccatggtttgagaaaaacacaaagatagatgtccatcaggcactcacaggattaccatcgtaaggatggttgtcagacaaataacaaataaggccgtatctttttattagacttgctcatcttctagtcaccccttgtggtagagcgaaaagagtgtgttgtccctctcatgcctctggtggtcacaggacactgagtaaagcaagagactggatactttcccatgtagaacctataccccaatcccgactattgggctgggaaccctgtctatgcccattcaaagctcaccatgtgggaggactgcttgggcnnnnnnnnnnnnnnnnnnnnnnnnnnnnnnnnnnnnnnnnnnnnnnnnnnnnnnntgacagagaccctgtctccaacaaaacaaagcagaacgctcaccatggttctgagttaagccaaaaaacaaaacaaaacctgttggaaaaattctagaaagaggcttggtatagagtatagcaagatatactctccaatttgtgggtagggggtgtcacagcagaaattatgcctatttctgctgtttgggctgggggctgaaagaggctgtgtcacacccagaggtctgcttaaagcccaatcctgagtatccagtaaggcccatgctgtgaccagaagaatctggcaatagaatggtccatgctggagtgaagggaggccctctacactggtggactgatttcctcaggcaagggtctaggagctggcttaggtctctcttacccttcctgtctgtaagcctcagtctaggacaaagcccacacagctgtatacccactctcacgagtccattgctacttctcaaaagtttaaaaagtaaacaataggaaggcaccggactgctccctgtagctccctctgctggtaataataaaaactgcaggcttctggggccagccccagtaccttcgacctaatctttagctcaaagactgggtgaagaaactcacccagaccaaggaaatacaaataaataaatatgaacatgtcagagcagtttttctctaactagggaagggcaaaccagaatcactaaactcacccggacggttggaccagttggggatgccccaggtccagggattctggaagccaggatcctgctgtatcattaagcaacctgctatgat

SEQ ID NO: 130587 - DNA, 751 bp, Homo Sapiens
  misc_feature (612)..(675): n is a, c, g, or t
tttttgcaacatacgtttttattactcaaggacaacctggacgtcaccaatgcccagcttcacgggggcatgtagtgtgactcacggctgaacacaaaatcactgtgaagcctgtgctacagccctgggctacttttggacacgcaagaggacactcggttacatgaaacctgacttgcttctgaagacatgtgatacatgtcttttccctgaaaatgtttcccttccctgtctgccatgctcccaacttttctgccttccaggggcttctcactgtctgggtaactaggtcttgggcctagctagaccttgggtagtggcccctctgccacaatcagtgcctgggcctgaggctgagcttgtggcctccgaagcctgacctggctcggagctcgtctgtggcgcccagggatggcctggcttgcaggccaccacattaggccagctcgcaggtccccagtaaagcctgaagacactggcccgaggttggaggtgggtgctgctcgactttctggaggatctcagaattctcgcttcttgctaggactgaaccatgagacttacagccatacttcacttttcccagggtttttctttttgaaacagggtctnnnnnnnnnnnnnnnnnnnnnnnnnnnnnnnnnnnnnnnnnnnnnnnnnnnnnnnnnnnnnnnnagcataaatgatcctcctacttcagcctccccagcagctgggacacaggcgtgcgctacacgccaggctatagttt

SEQ ID NO: 130588 - DNA, 542 bp, Homo Sapiens
caacatacgtttttattactcaaggacaacctggacgtcaccaatgcccagcttcacgggggcatgtagtgtgactcacggctgaacacaaaatcactgtgaagcctgtgctacagccctgggctacttttggacacgcaagaggacactcggttacatgaaacctgacttgctcgggctgtacccagaaggatgtccagtcgctgaggccaggagagaggtgggcaggcctgggtctggcagtggagacggtcctccagggagccgttgggcaggaagccgtacaccaggcagtagaagccgttctgagcacagtagccagaaaagtccacaatgtttgggtgacgaaacctggacagctgctccacctcggtcaggaagctctgcttcactgcagtccactccaggtcagcgttctccttcagcctctttacagcatacaccgtgttcctcatgagccggccgtacacgcacgccaaagcaccctcgccgatcttgagctactgcgagaagtggtggtgcgcgcgggaatctacaagagg

SEQ ID NO: 130589 - DNA, 1386 bp, Homo Sapiens
ggcctgggtggcgatttcggcacgaggacggcttcctgcccaacggcttcctggaggaccgtctccactgccagacccaggcctgcccacctctctcctggcctcagcgactggacatccttctgggtacagcccgggcaattcagtttctacatcaggacagccccagcctcatccatggagacatcaagagttccaacgtccttctggatgagaggctgacacccaagctgggagactttggcctggcccggttcagccgctttgccgggtccagccccagccagagcagcatggtggcccggacacagacagtgcggggcaccctggcctacctgcccgaggagtacatcaagacgggaaggctggctgtggacacggacaccttcagctttggggtggtagtgctagagaccttggctggtcagagggctgtgaagacgcacggtgccaggaccaagtatctgaaagacctggtggaagaggaggctgaggaggctggagtggctttgagaagcacccagagcacactgcaagcaggtctggctgcagatgcctgggctgctcccatcgccatgcagatctacaagaagcacctggaccccaggcccgggccctgcccacctgagctgggcctgggcctgggccagctggcctgctgctgcctgcaccgccgggccaaaaggaggcctcctatgacccaggtgtacgagaggctagagaagctgcaggcagtggtggcgggggtgcccgggcattcggaggccgccagctgcatccccccttccccgcaggagaactcctacgtgtccagcactggcagagcccacagtggggctgctccatggcagcccctggcagcgccatcaggagccagtgcccaggcagcagagcagctgcagagaggccccaaccagcccgtggagagtgacgagagcctaggcggcctctctgctgccctgcgctcctggcacttgactccaagctgccctctggacccagcacccctcagggaggccggctgtcctcagggggacacggcaggagaatcgagctgggggagtggcccaggatcccggcccacagccgtggaaggactggcccttggcagctctgcatcatcgtcgtcagagccaccgagattatcatcaacccgtgcccgacagaagatggtccagaagctggccctgtacggaggattggggccctggacagcctggagctgctgtcgtccagctccctcccaggctttgggctggtaacaggacacggcacgggcccgaaaaaggtgattgacttcacgagctgatgtgttcacctggtgaagtccccaaaatccggagttcaaggtctcatggtcagaagtctcatggtgccgatctccga

SEQ ID NO: 130590 - DNA, 3126 bp, Homo Sapiens
  misc_feature (320)..(621): n is a, c, g, or t
ccgcccggagagagagcgaccggggaaagaaaccgcaggcctgcggcgcacccatccgcggctccggggaaaggggccaaaaccggggcgccccccccacagcggccgagcgaactggctcgaaccgacggccgaactctccggcgcccaggagggctgcttcagccaccaacatagccagctcccagtcccagtaaagccgaagacacggcccgagttgaagtggtctgctcgactttctggaggatctcagaattctcgcttcttgctaggactgaaccatgagacttacagccatacttcacttttcccagggtttnnnnnnnnnnnnnnnnnnnnnnnnnnnnnnnnnnnnnnnnnnnnnnnnnnnnnnnnnnnnnnnnnnnnnnnnnnnnnnnnnnnnnnnnnnnnnnnnnnnnnnnnnnnnnnnnnnnnnnnnnnnnnnnnnnnnnnnnnnnnnnnnnnnnnnnnnnnnnnnnnnnnnnnnnnnnnnnnnnnnnnnnnnnnnnnnnnnnnnnnnnnnnnnnnnnnnnnnnnnnnnnnnnnnnnnnnnnnnnnnnnnnnnnnnnnnnnnnnnnnnnnnnnnnnnnnnnnnnnnnnnnnnnnnnnnnnnnnnnnnnnccaaattgtaagcaggtaggagggccctaggcctcgtcggccccattgtgcagggtggccactgtccaaagagatgggcaaagagctgctgccagaggcctgggctgcagacgccctgcatggctctcaggggagccagctccctactccacacccctgcacagcagcccctctcctcccctcacgggtctgtgcagccagcagcctcccaacatgcgccagcctcctcactggatgatgccagccttccttgcccccagatgctggcatggaggcagggttccactctgcctgcctatgcccacagagcctagaacagcagggccacctccttctctcccccgcgggcatgggcccccacccccactgccggcagagtgctgaggactcgtgcaccatgagaacttctgaccatgagaactttgacttccggatttgggggatctgcccaggtgaacacatcagctctgaaattcatcactttcttcgggcccctgcctgtcctgttccaggcccaagcctgggagggagctggacgacagcagctgcaggctgtccagggccccatcctcgtacagggccagcttctggaccatcttctgtcgggcagggttgatgataatctgcggtggctctgacgacgatgatgcagagctgccaagggccagtccttccacggctgtgggccgggatcctgggccactcccccagctcgattctcctgccgtgtccccctgaggacagccggcctccctgaggggtgctgggtccagagggcagcttggagtcaagtgccaggagcgcagggcagcagagaggccgcctaggctctcgtcactctccacgggctggttggggcctctctgcagctgctctgctgcctgggcactggctcctgatggcgctgccaggggctgccatggagcagccccactgtgggctctgccagtgctggacacgtaggagttctcctgcggggaaggggggatgcagctggcggcctccgaatgcccgggcacccccgccaccactgcctgcagcttctctagcctctcgtacacctgggtcataggaggcctccttttggcccggcggtgcaggcagcagcaggccagctggcccaggtgcttcttgtagatctgcatggcgatgggagcagcccaggcatctgcagccagacctgcttgcagtgtgctctgggtgcttctcaaagccactccagcctcctcagcctcctcttccaccaggtctttcagatacttggtcctggcaccgtgcgtcttcacagccctctgaccagccaaggtctctagcactaccaccccaaagctgaaggtgtccgtgtccacagccagccttcccgtcttgatgtactcctcgggcaggtaggccagggtgccccgcactgtctgtgtccgggccaccatgctgctctggctggggctggacccggcaaagcggctgaaccgggccaggccaaagtctcccagcttgggtgtcagcctctcatccagaaggacgttggaactcttgatgtctccatggatgaggctggggctgtcctgatgtagaaactgaattgcccgggctgtacccagaaggatgtccagtcgctgaggccaggagagaggtgggcaggcctgggtctggcagtggagacggtcctccagggagccgttgggcaggaagccgtacaccaggcagtagaagccgttctgagcacagtagccagcaaagtccacaatgtttgggtgacgaaacctggacagctgctccacctcggtcaggaagctctgcttcactgcagtccactccaggtcagcgttctccttcagcctcttcacagcatacaccgtgttcctcatcaccgcccggtacacgcacccaaagccaccctccccgatcttgagctcctccgagaagttgtgggtgccccgggaaatctcacagaggggccagcaaaacggagaggggcgggctccctgcaggagggacactgagctctctgggcctggcttggtagaagaaggggctggagatggcggtggaggccacagggaagcagggcttggaaccaggccgagctcaggccctgaatgggtctgggagcctggaaaagctggggagaggaaggtggaggctgaggatggcaacttccgggggctccaggcctcggcctcggcgggtgcagggatgctgctgggcctcggggcagtggtgcctggggacggaagcggggcgggagggtgccaggctgtgatgatgtcccgcgcacggagcagctgcaggtgcgtgaggatgtgcacgaggtcggccacacgggcgttgcggttgatccagggccacaggacgctggccgtgcgctgcccggagcgctcgcacagccgcagctcggtctggtcgcgcacgatcagggcggcgaactggcaccagtcggcgggctccagggcgtccatcactttcctcgtgccgaattcggcgcgccgtcgacttcatactctctcc

SEQ ID NO: 130591 - DNA, 1540 bp, Homo Sapiens
gcaaccacacctttgcgggtgttccaggggccccttcccttgtacaagggcccagttttgtggaccatcatctgtcgggccagggttgatgatatttgcggtgggtcggacgccgatgatgcagagttgccaggggccagtccttcccacgttggtgggccgggatcctgggccctccccccaggctcgattctcctgccgtgtcccccgtgaggacagccggcctcccctgaggggttgctgggtccagagggcagcttggagtcaagtgccaggagcgcaggtcatcagagaggccgcctaggctctcgtcactctccacgggctggttggggcctctctgcagctgctctgctgcctgggcactggctcctgatggcgctgccaggggctgccatggagcagccccactgtgggctctgccagtgctggacacgtaggagttctcctgggtcataggaggcctccttttggcccggcggtgcaggcagcagcaggccagctggcccaggcccaggcccagctcaggtgggcagggcccgggcctggggtccaggtgcttcttgtagatctgcatggcgatgggagcagcccaggcatctgcagccagacctgcttgcagtgtgctctgggtgcttctcaaagccactccagcctcctcagcctcctcttccaccaggtctttcagatacttggtcctggcaccgtgcgtcttcacagccctctgaccagccaaggtctctagcactaccaccccaaagctgaaggtgtccgtgtccacagccagccttcccgtcttgatgtactcctcgggcaggtaggccagggtgccccgcactgtctgtgtccgggccaccatgctgctctggctggggctggacccggcaaagcggctgaaccgggccaggccaaagtctcccagcttgggtgtcagcctctcatccagaaggacgttggaactcttgatgtctccatggatgaggctggggctgtcctgatgtagaaactgaattgcccgggctgtacccagaaggatgtccagtcgctgaggccaggagagaggtgggcaggcctgggtctggcagtggagacggtcctccagggagccgttgggcaggaagccgtacaccaggcagtagaagccgttctgagcacagtagccagcaaagtccacaatgtttgggtgacgaaacctggacagctgctccacctcggtcaggaagctctgcttcactgcagtccactccaggtcagcgttctccttcagcctcttcacagcatacaccgtgttcctcatcaccgcccggtacacgcacccaaagccaccctccccgatcttgagctcctccgagaagttgtgggtgccccgggaaatctcacagagggccagcaaacggagaggggcgggctccctgcaggagggacactgagctctctgggcctggcttggtagaagaaggggctggagattgcggtggaggccacaggcctcgtgccgaattcgccacccagcctcgctaccttaaaccgttatattact

SEQ ID NO: 130592 - DNA, 714 bp, Homo Sapiens
  misc_feature (82)..(82): n is a, c, g, or t
tttgggaagctgaagctttccgatgaagaggtgtacacagccgcccgggaagcgaatgctcacgagttcatcaccagcttcnccgagggctacaacacggtcgtcggtgaacggggcactaccctgtctgggggccagaagcagcgcctggccatcgcccgagcccttatcaagcagcccacggtgctgatactggatgaagctaccagcgcgctggatgcagagtccgagcgggttgtacaggaggccctggaccgggccagtgcaggccgcacggtgctggtaattgcccagcggctcagcactgtccgtggggcccactgcattgtcgtcatggccgatggccgtgtctgggaggctgggacacatgaagagctcctgaagaaaggcgggctatacgccgagctcatccggaggcaggccctggatgccccgaggacagcggccccaccgcccaaaaagccagaaggccccaggagccaccagcacaagtcctgagaagggccccctgaggtgtggtcgctgccaagcatcagtgttagggctggggctcagcctgggggagcctactggggactgagcccccaggagggccagcatgtggagagtcgctgcggctgctcctgctcacaataaagccggggccgagcagctggcaggggaggccaatccctccctcccctccccagtcctgccggctgcctccctcccaaa

SEQ ID NO: 130593 - DNA, 606 bp, Homo Sapiens
  misc_feature (493)..(542): n is a, c, g, or t
ataaatgaacaattgggaaatggttaaagaagtgatggtgcattgtgtggtagaatattatgcatatgtttaaagaatcatattttctaagattatttggaagcatgtttggtaatgtcaagtggagtaccccagatacattttagacatttatcgtcatcatctgctctgagtggaaggccgttcagagaggctagaggttcttattctggctataaattatgtgagtaaaattgtgctaaccagttaaaagtactgtacacccatgctcaatatatagtcctggaaatagcaattgaaacatgtcttctcacaagagaaaatgacagttttaatgatgtatttgatgaatttaaactttaagtcaggtgctgcaaattggaaagaagacttgtggtgttttaagttgctgtggacacttttaagaaacttagaacccatggaacccttgtttatcgccatgcaaattacaatcttgaatgagtgttttttnnnnnnnnnnnnnnnnnnnnnnnnnnnnnnnnnnnnnnnnnnnnnnnnnnggaattctccattaactgtggattttactaaatagaattactggtgaagcagatttatccatcg

SEQ ID NO: 130594 - DNA, 997 bp, Homo Sapiens
  misc_feature (691)..(691): n is a, c, g, or t
  misc_feature (703)..(704): n is a, c, g, or t
  misc_feature (740)..(740): n is a, c, g, or t
  misc_feature (754)..(938): n is a, c, g, or t
ttttacacaaggacaattttaatcctgcattttcctggagtaacatccactgctggctatctatggattgtaactgcatttgctaagaactgtgaacacaaagaaactttacatgaagtcacatgttgatacaggcacacagacatctttcagcagcaacagactacatacataacgcataccagatagtctcgatggataaatctgcttcaccagtaattctatttagtaaaatccacagttaatggagaattccattttttaattttacatctttactacacatttttctaatactttatttttaaaaaacactcattcaagattgtaatttgcatggcgataaacaagggttccatgggttctaagtttcttaaaagtgtccacagcaacttaaaacaccacaagtcttctttccaatttgcagcacctgacttaaagtttaaattcatcaaatacatcattaaaactgtcattttctcttgtgagaagacatgtttcaattgctatttccaggactatatattgagcatgggtgtacagtacttttaactggttagcacaattttactcacataatttatagccagaataagaacctctagcctctctgaacgggccttccactcagagcagatgatgacgataaatgtctaaaatgtatctggggtactccacttgacattaccanacatgcttccannatatcttagaaaatatcctcgtgcccgattcttggnctcgagggcccaannnnnnnnnnnnnnnnnnnnnnnnnnnnnnnnnnnnnnnnnnnnnnnnnnnnnnnnnnnnnnnnnnnnnnnnnnnnnnnnnnnnnnnnnnnnnnnnnnnnnnnnnnnnnnnnnnnnnnnnnnnnnnnnnnnnnnnnnnnnnnnnnnnnnnnnnnnnnnnnnnnnnnnnnnnnnnnnnnnnnnnnngcactgcattatgatccgcaacgcgcgggacagcggttgcgtatgggcgcctccgctcc

SEQ ID NO: 130595 - DNA, 1526 bp, Homo Sapiens
  misc_feature (135)..(197): n is a, c, g, or t
ttcagattaaattgatcattctatttttcagtcagcattctcaccaccaaatggcacctatcccctttaccctgtgttccttttgctttttgccataactcttattgtcctccaataaactgtgtaatctatcannnnnnnnnnnnnnnnnnnnnnnnnnnnnnnnnnnnnnnnnnnnnnnnnnnnnnnnnnnnnnnataacaattgtcccatttatgtctttatcttttaagactattcatcttcaaataagacataaataaggttttattatagcaatatgctataatttttaagtgacaactcaagcacttgttttaaaagtatgcattttttctaaatgctttataaaagcaaagtcttttctaaggaccatataattatggtctctatatacacaacttatatacaatttagagagaagtcacagcccccagtgccctggaagaacatcgtagctgcaaaaaatgaagaatctgattctgaaatgccagtcctggagaaggtgttctcagggtggcaaactgcagtccaaacacactccaggtccctgggtctggccacacattctctaagaagtcagcactttcctggactgggcacttgtggctagaagggtatgcactacttgctaatttctaaaacctcaaaccttaattttcccccatcttaaaatgggaatcagcttctggaaaagctaataactgtttacaattgtcagacttctaaaaagtgctaatttgttcccttaacagagcaaatgatgagagacaccattttcctgcagattaaaaacaatatataaacatatgattcaacgatgtcaacagctttcagtctatgaatcttgtccaggtcactttgggtcacttggttctttcatcagaacatgttcaagatttctgacattcctttttccgaactttcgattttggtgcatttggattttcttgtttgtagaaggtctttaacatttccactgcttcctcagcccgatatccagggatacactgaaatggtctcccagtgtttggtaggtcagcagaggcaatatttagaacagagccacaaccaccaaatcgttcattctgacagccatatacaaccagcgggattttcatcaggcggagagcagctgcacacataatgcacggctccacagtgacatacaacacagtgtgttcaaatacttcagagggactcttgccactttgacgacaccaatcgaggacctgatcgatggccaccatttctgcatgtcgagtagcatttttggtttggttaacttcatttctccccttccctacaacttcattgttgtagaccataagacagccaacaggaacttcagtattttcgagggcttctttggccatgtgcatcgcctcctccatccacttttcggtctcctctgccgacaccgagcacgcgccgcttgcagctggcttgggtgccgccttcgcctccatacccagcccctcgtgccgaatttaaccacccaggcctcgtacctagcctacgttttt

SEQ ID NO: 130596 - DNA, 1110 bp, Homo Sapiens
  misc_feature (99)..(134): n is a, c, g, or t
  misc_feature (329)..(357): n is a, c, g, or t
gcacgaggtgaatagtaaagttcacacttcagtcctcagacaacattcaggtaaatgttttacatatgagacacctgcctgtaatgtgatgacatgagnnnnnnnnnnnnnnnnnnnnnnnnnnnnnnnnnnnntttgaaccactgtgatttactagtctattaaaatgccattacacatttaaaaactgaacaattacaacaatgcaatcttcaagcaattaaaaacaaagaattgttgagccaacatgggagatctgctgagtaatctggcctttcaagtaatgtctagtggaaaccctgttttctccttccatctgaagatcatcnnnnnnnnnnnnnnnnnnnnnnnnnnnnnccacctgctctgagtgaaagtcaggattcagcccacatgactcagggacacactccccagcggttgctggaggcaccatcactccaacatgtgcaggagcagcgaggggtccacctccacagcccgcagcccgttgtgcaggctctggaaggtggcctgcttcccgaagcgctgccgccaacggatgaaggcctccaccacctgcgactgcacgttgtgggggtggttggccttacagcggtagatatccgtctgggacagtcccagagacagcaccatgggctcccactcagggcccagcctctgggccagctggttaatctgccggtctgatggggagctgttgaggatgtgcgaggggatcccagtcaatctgtcacctgcaggcaggtcggtcatggcctcttcccttgccttcttcagcttctccctgacccagggaaactcctgtagggaatctaggaatgtatcaaatgctttagggcccctggaaggtaggatatccagcaggagcattgttttccggaggcctgtggtttgagcattgatttcttgaatatggttttccgtcaagattccttcctggtagaggtactgaagaaccagtccctccaccaatacctctgcacccagctccaggcgaagtgagcggagtacttgtttgtctctggcctccatttctccgtctgcaaccacgtatctttggggcgggggagaaaaactgcaaccggaatcctgactgttagggaacct

SEQ ID NO: 130597 - DNA, 1388 bp, Homo Sapiens
ctttacaatttcacttagtctgtacttcatcattttgacagcatcttcctccctcctttaattaatggaatcttctgaattttccctgaatgtttaaagatcatgacatatgacttgatcttctgggagcaggaacaatgactactttttctggtgtgttaacatgtcgctagccagtgctccaggcacccagctttgtctgtgggttagtattggtgtatgtatgagtatctgtatgtatatatacacggtatttatagagagagactatcctggagaagcctcgttttgatgccattcttccttgcaaggttaagcaaggtgggtggaaactaagacacctgaaccctccagggcctcccgcatcaaggtcagcatgaggacagaccacagagctgtcacttttgctccgaagctacttctccactgtcccgttcagtctgaatgctgccacaaccagccaggcaggtccacagagagggagagcagagaaagaagtcctttctctttattgagttcgaggactacaaccaatttacactgccatctgatgccgtgatcctgagccaaggaggtgaggagcagagcaggcaatttcaccaccaaatgccaagaaaagggctgacattttctttcatgggcaccaacctgcatttgtatgtgtcccgaatccacagtcgtactgattctaatggggacacagatcatggtagagaatctctccctcctcagtaaatgtacaactgcacctgtcatcatggaggtcatacatgcatacaaagaggtgtacaggtaccatcttgtatacacatatatacccacatgtacagacatacatttatgcacattcacgctgtttgtttcatatatacaggcataaaatagagtaaatacaggtagttttaaaagtacccttttgtgtgaattgactaccgttgtttgcaaacccgaaaataaaagacgttcattatgtatgaaaagtaactgatttgtattctgtgagcatgtaaaagcggaaagttagtgcttgttctaagattaccttcttgttgataaaccataaatgaatcatcaaagctcacaccaaatttttctatcaaataaaactagtgacagcttgtggctttttattagagctcgccacgaactagggtaaggtgagtgtcttagcatattttaatgcagttgcttactaaaggttttaaccgcacatgcacacacacacgctttcttatgcaatctatgtttgcacttgtgctttcagttagccttctgtaggaagtagaagtcatatgttgtctttgttgtagtgaaattatacagatagagttccatatattgtatttgtttcaatggtaaatccttttggaacatatagaatgcagaga

SEQ ID NO: 130598 - DNA, 676 bp, Homo Sapiens
ttttgctgttttgaaggacaatcctttattttacttgagaccttacatctttgttctagctgacagtaaatctctgggtttctgttacgaactctaagagggctgaaacttctgatattcaggtggatcacctgaattctctcagctgtcaatggcttggagaacatctcatgggcccaagtcatcaaataacctgttcctctctgtaagggcagtgtgagggactgctgtgcagacccaagcaatcccaacctggtgctaggtcatttcacttttctgaaaacctcacatcaggctgcatcctcttctgtccctggcaccaggctttgtttacacttggagccaccttggtgtgggtcaccgggacagtgtactcctctcctgccagcctccccttccccgaggtgtggtggctgcagtctcaggaagagcttggtacttgtggggacttctgttttctccctgtggagatcagtgaagactgggaggaaagctgcttcaacctgagtccggctcttcagcaggctgcacaagtggaagcaactaattctggtgctcaggctgggctctccacccaagttaggcctgctctggcctaatggatcttactgtatgagcaggacggctgcattggattgtacaactgttttgtgatgcccccagacactgtcatcct

SEQ ID NO: 130599 - DNA, 669 bp, Homo Sapiens
ttaggaaattaaacagctaaataatgtggttatttattaaagatacattaataattcttgtaattgatgcaggttttcttttttctacagactactattattttattcttgtctctctggaaaatgaaaaatccattagtttttctcttttgcttttacccagaaattaaaggttggtaagtggtaattagcgtagctcctgtcaaagccagttgcctcatgaggaccgacatttgacttaagctgaaataatggaatatggctaatgtaaagttcattagtcccagctgctttctttgacattcttttcttctaccacaagaacgggcatgccctgccctctctcactcctatttttagacgtattgctgcgctcctatgtgtctattctacaaggctggaggcacagtggttatagggaaggtaaatggtaatgggacaatatgtctgtgaccacgttcattacacatctgggatagagctctgactctttgatagaggactccagcaccccatctgtctgcccctgagaaacgaaagagaaccactctccactgtctactatatgttaggtactaggatttttctcattatagcacttcattcctttcttgggggggactggattatttattttgagacagggctcactctgtccaccaggatgga

SEQ ID NO: 130600 - DNA, 1346 bp, Homo Sapiens
  misc_feature (69)..(95): n is a, c, g, or t
  misc_feature (107)..(107): n is a, c, g, or t
  misc_feature (109)..(109): n is a, c, g, or t
  misc_feature (123)..(210): n is a, c, g, or t
ccgggccggccaaacgaaatgggttctagaaaagcttctcggagggccgaagggcgcccggacatgttnnnnnnnnnnnnnnnnnnnnnnnnnnnagggaggaactntnattatcacaagtcnnnnnnnnnnnnnnnnnnnnnnnnnnnnnnnnnnnnnnnnnnnnnnnnnnnnnnnnnnnnnnnnnnnnnnnnnnnnnnnnnnnnnnnncccaccctcactttccagtgtgtgtgagggggtcaggaacagagggaggactattgtaagcggagccccaggcactgtagggtcctggagaaataagggggcagtggtgccaggagctcaacaggggtgtccctggccctggtgcctgggagaaggagccgatgtaggtggaggtgcaagggcagctgggcagcctgggagggggtcaggtggaggcgtctgaggagggcttcatccaggacctgtctttggggcttgttgttctcagctggcagcagaaatcgctggcccaggacagtgcccacacgggcagagtacatgtggtccccaagcacagggcagagctgtagtaccatgtgcacctgtagttgactggagaacactgtcagtggctgcagctggaccagggcacagccagagcctgtggctaccacacgaaagtgactgagagtcttcttgacaccttccaggatgtcctttcgggatggggccttcactggaactgtgagattgaccccatcaatgtgttccagtttcagggcagcctggatcttcccctcagaagcagctgggatcccatcagtgacagcacagtaggtggctgtgggcctttgggctctccgtgcatgggtgaagtacttctggaggcgactagctgtctggggacagctggagaggagtacaagcccagagctttctttcccagatgctcggacaacctgaagctcctgctccctgagccctagggactggctcagctctggcagcactgagaacaacgtcagctctcctggttttcctgtcactggtagaccctgtggcttgttcaacgtcactagaggtcctttccggtccaccacggctgcccgcagcgcatcaaccagctcctcccgactgaggttttttggcagcagccccgcgaagggctggtccccgaggggccccgaccgttggcaggagccgcggggttgcctctgatgccgggcttcggtgccaaagcctgcgtcctcgggcactgggcggacacccaggccccgccgccagccactccagaaccggcccaaaacacggcggccgtccatctcccgagcggacgcgtgggtcgacgatatcccgggaattccggaccggtccac

SEQ ID NO: 130601 - DNA, 685 bp, Homo Sapiens
tttttctcatatagtcagttaaactttattatttacaagttaaattacacagcagctttacacagcatgagatggaaaggaaggaaggagagaaacgaggagaggaagctggctcctgagattcttggctgcctccacctccttctcttgggcgtagcagtcttcagtgctgcctccactccaaggtcaaggatcagggcttggaacacaggtttaagtcaggttctggctctgacagccccagggccaccagggctcccactagcagcttcttcacaggcgttggaggtgagtgtgaaggcatcagtttatctagacgatggcgacaaatgaggccactggaattcaggtagaaagtggagtaggcatcataggtccggtaatgctcgtctttgtcacgcttgtagaaccgcaaaaagagcaagtggacgggcagccccacaagccgccaccgggcttgcagggtccagttctcagggtggcgggtcagctgtaaaacctccaaacgaaggtgtgcaaaataattccaggccaggaaacggcagagggtcagtgaaagaatgtaccatgtccggcccttggtacgtatgttgaggattctattgatgaattccacatccaaggaatacagactgtagtcgtgggactgaaagaagagcttgggaagctctttgctcagtctctc

SEQ ID NO: 130602 - DNA, 697 bp, Homo Sapiens
  misc_feature (612)..(612): n is a, c, g, or t
tttcctagttctaaggtacatttattcaccaagtccaaactgggagccaaacactcttgctcctgcttctacaaagaaaaagggaaagggtgattttctccaataaggcagatttcctacaaatatgtagtttttggattgtttttcctttttcaaatcactgcttgttctttggtagtcaccagttaagaagctacagtttcctggggatggggtgacagaactcaagctgtaatcccaaaggcatcacctcacgttcccaccaccggtccacgggatgagcctgctgctcacacggttgcggtgctatggcagagcgccgacagtcttctctcaatactacatttatatttatgcacattttcaatatctgcagggtcctgtagaatcctacttaggccttccaaaagaagggctgccttatgatagcgataaacaatatcttcggtctgctgaaacatctcatccagggctgcagactgaaccatttctacagcacaattatagatgagtttctctgcagtcacactgttgatttcatcaataaacctctgtttgtcagagaagaatcgattcagcttttctgtaagtttcttgcacatggtgatgcanaatttatatcgttcgttcagattcttgacaacttgtttcacagctgtggatgggctcagtttcccggacttgatctgggctttgg

SEQ ID NO: 130603 - DNA, 1208 bp, Homo Sapiens
  misc_feature (71)..(145): n is a, c, g, or t
  misc_feature (154)..(339): n is a, c, g, or t
gtggggggggaaaaaaaccccctcttattttcctccgggggttttttcaaagaaaaaaagatttacccccnnnnnnnnnnnnnnnnnnnnnnnnnnnnnnnnnnnnnnnnnnnnnnnnnnnnnnnnnnnnnnnnnnnnnnnnnnncccaaaacnnnnnnnnnnnnnnnnnnnnnnnnnnnnnnnnnnnnnnnnnnnnnnnnnnnnnnnnnnnnnnnnnnnnnnnnnnnnnnnnnnnnnnnnnnnnnnnnnnnnnnnnnnnnnnnnnnnnnnnnnnnnnnnnnnnnnnnnnnnnnnnnnnnnnnnnnnnnnnnnnnnnnnnnnnnnnnnnnnnnnnnnnnaaaattaataaaaatattttattgaatttcaggaacttggtacttttttaaaacttcaaatctttgcacacaaatcaccactatactttctagaatagtggaagttaggacttcaagattgtcacttatctccttgtgtcacacagcacagaaaccccaagtcctcacactgcccccaccccccttctggccatgactaccaactactctgttattctagcggaggacaatgacggaagtgggtagacgactgaaggagatcagctgtccaccgcgtactctactaaagtgagaggaggagcaaccgaggatcatgccgcacacactctgagtgcaccacgtgacgtgggtcatacgggagttcccttttgttttctcgtttggttcagggcaaagctactgaaattgttcctagtccctgaggagctcagaagttgggcaaaggtcacagcagacttcctgaaaagcagacactgaggaacacagtggagagcgggagttcacagcgacgcagctgaggacgacgcaggacctctcccaaaggtgctgcagctccagcaccaggggccagggctgcggcgacagcagctcagcaacccttgctgtgctcaagttcttggggattcagagctaagttcaaaatttagaaacagtgccttaaagacgggcaagaaaacccggtgtgggagtctgctcatctatggtttgttactgctctcgcttcgatattcttaaattcctaggtaccaatgaaaaagccaagtgaacgtggcagagtgaggaggagacaggagcgtgtgcaccttccatctgtgagaggcacacttcagtctgggttcaagatgcagaatggtgcctacggcaaaaaa

SEQ ID NO: 130604 - DNA, 1805 bp, Homo Sapiens
  misc_feature (47)..(65): n is a, c, g, or t
  misc_feature (833)..(833): n is a, c, g, or t
attaaccctcaactaaagggaataagcttgcggccgcctgctcaggnnnnnnnnnnnnnnnnnnnctcacaataaactctttattgtttagctagccccagtgactttatgcatcttataaccaagaagccttcagtagagcaagtctgagccagaggttttatcacactttgtcctcagggtccaccaggaaccaggtcttggctcacagccaggctggaaacagtcttcacagttctgagcctggagtttgagatctgcctcccctttcaaggaagatccagaggtcacctgcgcttgtagagacatggctgaagctgcaggcctgaaagctgagccttgggccctaccagagggggcccagtcttttggaaatcaaacaagaagaaatggctgttggtcaggtccttggagacaatcttgaagcctagcttggtcacagcccgcagaaaggttcgaacatcctcaaagcggctgctgacctcagccactttcaggagaccccctggcttcagtactctatttgcctcctctaggaagtccctgatgttggttcccatcagtgaaaggcaaaacacagccacatccacagactcatcctccagaggaacctgggccatgtcacacacagtgaccctagggtccagagaagccaagtcaaagcaatgcacagggttccggatacttgaagccaagcggcaatccccacagccgaagtcagccaccactagggatgcaggccgctggcgaagatccctggcgatgcggtccactggctgcagtggccacttcttcacttggctctggaagccgcggtggtagagaagaaaagncctcagggtcttcctggaagagacgctgtgcaggactgctgggccctgagtacaactgttcattgaggtagcgaaatcgggccccatgcagccgctgtgccatgcgggctcgcaaagcccctgcccgagcctcatggctgtctgtcctgggaacaggagacacctctgtcttctctgtgggggcctcagctggggcctggtctggcacctgaggtggctgaaacttgttcttacatcttctcttgttctgtttgccggttccgccactgcttgcggcttaatgtatgaggggttttaggggaagtggacccagggctttgctttggtggatcatttgtagtactacccttccaggctttgggacctgtttggtcaacattgtccaggtgctgggctgaatttataggggcatgtttctggcatttcctctgtcttttctcatcttcagcagagtcactgccaacaagagcctgtttgtggcatttcttcttcctttctacttcttcctcagagtcactgcaaggtgggccctgtttttgacatttcttcttccctttcttccctacttcagcagaggcactggcaaatgatgcctttttggggcatttcttcttcctttcctcctcctcctcctcagagtcacttatacataggctggggggatgctgggaaagagatgctgcctctagggcccgtaatgtggccaagagctggcggcgcttggagccctggaggaaaacaggggatgacagtgggcctaaagagaatggatgaggccttgttttgcgaggaggccgcaggcggaggtcgtgagattacgggcccaaggcccgcggctactggggccgcctcggcccactcaggctcttcgaacatgagggtcgggagggcagggtcgccgagtccccgctcttcgtccacgtgcacagcgctcctctggaagtcggagcgctcagacctgccagaaccgac

SEQ ID NO: 130605 - DNA, 1787 bp, Homo Sapiens
  misc_feature (32)..(32): n is a, c, g, or t
  misc_feature (182)..(182): n is a, c, g, or t
  misc_feature (225)..(225): n is a, c, g, or t
  misc_feature (268)..(269): n is a, c, g, or t
  misc_feature (287)..(287): n is a, c, g, or t
  misc_feature (868)..(876): n is a, c, g, or t
  misc_feature (1004)..(1012): n is a, c, g, or t
  misc_feature (1025)..(1037): n is a, c, g, or t
tatacgaccacgcacgagcagcggcgggattntctttgttcgtggcaaacggcgggtgtgtttcatgtgtagcgctcacgacgtactaatatatatactacgtgcatcgcagcgtacatgataggcgagccggtattcatgtactcacatctcggtcgtgagagagaagtcaacagcagagngcgcgcacattcagtttgtggtcgctcacttatagtgcgaggnagcggggtggtggttttcctgtccgcgcgagcagaacgagagnngtggtgtcggcgcgacgnacgcgcgcgagggaccccaaatataacacgcctcggggcggggggtgaggggtgtctctcgccacgccgacatctctctggtagacttatgaaaacaccggggcgcggcgcaacgagtctggtgcggacgcgggccgttcttgttttttttacgcgcgccgcccgcgtgtcgtcttcagccccacgcgggggcgcgcagagtattaattgttattgcacgccgccaaggcggcgcgcggcccacgcgcgtggagcgctagtaagatccacgcgcacgggcgcgcgcggcgttctccgaggagtgctattcggcaaaatcaccgccgcgttctgcgcgagaaggggcgtttccccccacttggcgggcggagaaaagcatgcgtgtaaagaaggtatcccccacccccctctctttggggcgaaagaagcgcccaacggcgcggggcgcggcgttaattttggatttgaggacccccgcggctgacgcccccccgttctgaaaacacccccaacaacggccctcacaaaactcccccccggcggtgttgttctcaacgcgccgggggttcgccccggggggnnnnnnnnnggggggaaacccaaacccctgttctccccccgggttttccttttgggacaagtcgttggccgggtttccttttctttttgggcccccgccccaaagaaaggttttaaaaaatttttttgggggcaggnnnnnnnnnaaccactctttcnnnnnnnnnnnnnggcgtgacgtgtgtttgctcgtgttgttgttcgggcccggtgggggcccgcgcggcgttgttagggggcgttctcggcttgctttgttgcggctgttcaggctctgagtatttatttcagttaatagtagtctcccagggaagactgggggaaatataggtgtttctgtcaactccaggaaaatcacagcatcatatgagagtactcagacctgctgcccactgaggagggggctattctcaccaatgggacaagagcagaagatgcggggtagacgcagccagtgactgctgctatgtggcaactggggtacggagaagtcttgcttcataagtctgcgcctatatatcagagatgcaaggaccacagccatcaacaccagcaagatgcccacgatcagcggaacctgcccaaggcctgcttcttgacctgtgagaagaatcccaggcacaggcatgataagctgggtgctgaccactgccaggctgttggtatcagccagagacacattgaggcagtatgtccccgagccacccttcagtatctggtgcagaaccagctggcaggctgggctgggtagcacaggctggcacagccgctgggcagggggctggcaccctggcgatgagatctccatgcaggcttccttgggcagcccgccttggcaggacacagtcagctcaaatgcatccccctcaccggacggcacagcctgcaggatctcggcactttcaataccctggacaatgt

SEQ ID NO: 130606 - DNA, 854 bp, Homo Sapiens
  misc_feature (127)..(127): n is a, c, g, or t
  misc_feature (673)..(673): n is a, c, g, or t
  misc_feature (675)..(675): n is a, c, g, or t
  misc_feature (680)..(681): n is a, c, g, or t
  misc_feature (687)..(687): n is a, c, g, or t
  misc_feature (689)..(692): n is a, c, g, or t
  misc_feature (694)..(703): n is a, c, g, or t
  misc_feature (799)..(799): n is a, c, g, or t
ggtcgatatggttccttttccgtcaccctggacattgtccagggtattgaaagtgccgagatcctgcaggctgtgccgtccggtgagggggatgcatttgagctaactgtgccctgccacggttttngcggccaaggaagcctgcatggagatctcatcgccagggtgccagccccctgcccagcggctgtgccagcctgtgctacccagcccagcctgccagctggttctgcaccagatactgaagggtggctcggggacatactgcctcaatgtgtctctggctgataccaacagcctggcagtggtcagcacccagcttatcatgcctggtcaagaagcaggccttgggccaggttccgctgatcgtgggcatcttgctggtgttgatggctgtggtccttgcatctctgatatataggcgcatacttatgaagcaagaccttctccgtaccccagttgccacatagcagcagtcactggcgctgcgtctaccccgcatcttctgctcttgtccccttggtgagaatagccccctcctcagtgggcagcaggtctgagtactctcatatgatgctgtgattttcctggagttgacagaaacacctatatttcccccagtcttccctgggagactactatttaactggaaataaatactcaggaccctggncnaaaannaaacanannnntnnnnnnnnnntcttgttgggccgccctcggccccttcgagaagctttttctaaacccattcgttttgggggccccgggccccatataggtaaatgggaactggggncataagctggttcccctaggaagaaccctgggccattgaccaggggcctggcacc

SEQ ID NO: 130607 - DNA, 735 bp, Homo Sapiens
  misc_feature (645)..(681): n is a, c, g, or t
ggggggggaattcccaagccctctgttccatggccccgggtttcccctagggaaaccagcctagggcccaatttcacctttacctaccgtggccccgcggcccccaaacggaaatggttttgggaagttttttcgaggggccgaggcggcccgacaatttttcctctccgctctgttcgttctcccccaattaaaggatgtttatttagaaaagaaaaattagctttgacaagagacacctgcacatttgtgtagccaaggagatgtcagtgagagcagaaggtgaatccttcatggagactgaacacaggtggccagctgtggcagcgacagtgaacacatgtcagtgtcggcctgggggcagagtggttgaatgctttaagtctggtggagagcctgccttgctcagccctgttactacatggaagtcactgtaggccacacatgtgcaacttacaactctcgggtttcctgaatgtgttttggatgcactggccagtgggccgcaaatgcttggaagctaccatgatgcttcacagatgatgatcattttggtaactcaaaatataaatgcgggcttggtgcggtgacccatgcctgtaatcccagcactctgggaggcttgagcccaggactataagaccnnnnnnnnnnnnnnnnnnnnnnnnnnnnnnnnnnnnntatacagtagttcgcctggagccacagctacctgggaggctgagtttgggagcc

SEQ ID NO: 130608 - DNA, 1352 bp, Homo Sapiens
agcattagtgtaataattttattaataaaacgaacccatagggttcaaacaagcatacaaagtaattttttttcctgtgggttaaattgttacatttttaataataaaaataagaaagctttcatagttaacttaccaaaaacataacgcttgcctattgtttcttactgtgcaaaacaaaaacaaagttttgcccacagaaggattttgtgcaccaaaacatgcacattttcaatttcaaaatttctgcatcaaaatgaaaattccaaggccacgtttttgttttttcaaactaaagaagagcaagaggggaatcaccaagcaaataacagcagctacatttttaatcttcattcccaggtattttctgtttcaatgtagaattctccacattcataaaatgatatcttcaacctactgcttacagtcagatatgccagtatcagttcaataaggcaagtcacaccttttagctattctcttaagtcctacagagatagtttcacttcaatttcacagggacacttcatgatttatctaataaaggtgataagacaatcctagtgaaggattcctttaagttgttgcttttctagatggaaccaaataattaaactttctcttctccatactggagtttgtttctttcattatgttttagtatcatggagtcgaacaatgccttggcagggcatgaactatataactcagaagtcaataaacagttgaagatgatcttttctaaagtaaaaatcaactgtttagacaacacttaaatacacattacctgtttaaagacacacacacgaaagcaaaatttaaaaacctaatcaaggaataacgttttgtgacaatttcagtagcacaattactggtctaacagttttgcattgtgggaatttaaatagcggcttacaatgaaagaactatgcacgatgcttccaggattgcagaggagaggggtaagcccagaggatgaaaagcatacatttgcctaatgtgtgtagaaaattccctgatcaaatggccaactaacttttaaatacaaaatttaaccttagaagaacttttctatttttggtgaacatgctgattgaaagaaaaatcaatcattctgttaaatgaagtacagtattctgcaggggaagcaccagggtttctggatcaaacccttaggacatgaagaaaaccaaagtactctgctggttcaaaatctgtatcacaggaatccctggctcccttccatgtgtccagagatgctctcagctcacaaaaccaacagatggaaggaaaagcaagtgaacatgtgaccatgtgggaggggggctggggacggtaaaacactgctcaga

SEQ ID NO: 130609 - DNA, 1251 bp, Homo Sapiens
  misc_feature (1161)..(1195): n is a, c, g, or t
cacagttactattttaagatgttgatgaaaggcttgtgtggaatgcgaccccagacagagggaagggggccagccaggcaggctggagggggcggattgccactgccttgttcaaactacaagttccataaagccagcccctaagggtgtacccagagtggagtcttcctccaacccctaggctgtggctcaaccaatgactggagactgaatgagaaaacatttattccgtctccaaacagcatcccaggccgggcatctcccccacgattttataatacactcggcacagacagagtctgggagccatggggcacccctgccctccccaggcttcctaagtaacaactgcagaatatttacataaagctgggtgttgtcaggcaaagcccttccctgctgccaggggtgggagcaaggaggaagtgccatgagcaccagccccgccctcacaccacgggaggcagcccagaggccaccggcacagggtggtggcccccagatcatacagcagtgggcacaggggaagcaaacctgagtgaggacacaagagcctggtccggctccgctgcacagggcaggtgtgatggcccccacgagtctttggcagagaacgcagataatagcggctcccacggcctgacccgggccggggggaagctgaggcacttgtcagtagcacatgggcacctgctggcttctagccactgcaggcggggctgaggtcattaaaagcgaggaaaaacactagctaaaaaccctttcctaaaagtgccctggaggagtgagcggctgactgaagccctctgggcacaggcacttggggtgtggctctgccagcccccgccaggctatgaggctccttagctgtgtgtcagctgcacaggatggaacaggtgaaagagaggggctggcagttccaggaggctcatgggaaagtccagggcagaggggagggccctctctgtcccccttcccacgctaaccgccgctcagtacacagggggcggctggtagccctcggtggtctccgcgttctgggtgaagggtggctgttggtagttgtccacagatgcacctgggtaggaggcgtaggcagtgttggggtcccccggccgtaatggccgaattcccgggcatatgtccggtaccgtcgactgnnnnnnnnnnnnnnnnnnnnnnnnnnnnnnnnnnncggccgcttcctcgctcactgacttcgctgcgcttccgggtttcggtttttccggg

SEQ ID NO: 130610 - DNA, 1175 bp, Homo Sapiens
ccggagaccgcagataatagggggtttccccgggccttgaccccgggccggggggaaacttgaggccattttcagtagcccattgggcacctggtggcttttagcccattccaggcgggggttgagttcattaaaagcgaggaaaaacccttagcttaaaaaccttttcttaaaaggtggcctgaggagtgagcggctgactgaagccctctgggcacaggcacttgggggttgggctttgccagccccccgccaggctatgaggctccttagctgtgtgtcagctgcacaggatggaacaggtgaaagagaggggctggcagttccaggaggctcatgggaaagtccagggcagaggggagggccctctctgtcccccttcccacgctaaccgccgctcagtacacagggggcggctggtagccctcggtggtctccgcgttctgggtgaagggtggctgttggtagttgtccacagatgcacctgggtaggaggcgtaggcagtgttggggtccggagtggggtcaacgtaattctggatgaagtcgtccacgccagccttgtagcgctggtaggccagggaggccagcacaccccaggagaagatggaaaagaagctgaaggtgatggctgccctcacagagtcggcccccaccagcacgtccttcgggttggtgactgcccactggttggtgaggaagcagaaaccaacaaaccacaggaaggtccagagagctgagaagagcaggtcaccaatgaccaggtacttgcggtcagtggcgttgctgatctgggggaaatacgcgtcgaccaccaagaagaaggccgaggccaggaaggccagcaccccgatggcactgccatagcggcaggcatcctcgttgcggttgaacacgcagtacatctgcttagactcgtgggcattgctgtagccctcaccatagatgcaggagaacacgatcaaggcgaagaccaagcacacggcgcgcgccaccacctgcggctgcgtcaggaagcgccgcaggtcgaaggagccgcccgccttggccgcgccgtaggccccgctctccatgtcgccgtcgccccgctgccccgccgcggaacgcagaggaacccctcgtgccgattcgccacccaggcctcgctaccttagtaccgcttatagtatcatcgg

SEQ ID NO: 130611 - DNA, 1165 bp, Homo Sapiens
  misc_feature (860)..(868): n is a, c, g, or t
  misc_feature (871)..(872): n is a, c, g, or t
  misc_feature (875)..(875): n is a, c, g, or t
  misc_feature (878)..(878): n is a, c, g, or t
  misc_feature (882)..(882): n is a, c, g, or t
  misc_feature (914)..(916): n is a, c, g, or t
  misc_feature (918)..(918): n is a, c, g, or t
  misc_feature (934)..(936): n is a, c, g, or t
  misc_feature (938)..(938): n is a, c, g, or t
  misc_feature (945)..(945): n is a, c, g, or t
  misc_feature (953)..(953): n is a, c, g, or t
  misc_feature (959)..(959): n is a, c, g, or t
  misc_feature (968)..(968): n is a, c, g, or t
  misc_feature (979)..(979): n is a, c, g, or t
  misc_feature (981)..(981): n is a, c, g, or t
  misc_feature (991)..(991): n is a, c, g, or t
  misc_feature (1007)..(1008): n is a, c, g, or t
  misc_feature (1010)..(1010): n is a, c, g, or t
  misc_feature (1054)..(1054): n is a, c, g, or t
  misc_feature (1059)..(1059): n is a, c, g, or t
  misc_feature (1061)..(1061): n is a, c, g, or t
  misc_feature (1068)..(1068): n is a, c, g, or t
  misc_feature (1070)..(1071): n is a, c, g, or t
  misc_feature (1073)..(1073): n is a, c, g, or t
  misc_feature (1076)..(1076): n is a, c, g, or t
  misc_feature (1079)..(1080): n is a, c, g, or t
  misc_feature (1085)..(1086): n is a, c, g, or t
tggccccccagattcattacagccagtgggccacagggggaagcaaaacttgagtgagggacacaagagccctggtcccggctccgctgcacagggcaggtgtgatggccccccacgagtctttggcagagaacgcagataatagcggctccccacggcctgaccccgggccggggggaagctgaggcacttgtcagtagcacatgggcacctgctggcttctagccactgcaggcggggctgaggtcattaaaagcgaggaaaaacactagctaaaaaccctttcctaaaagtgccctggaggagtgagcggctgactgaagccctctgggcacaggcacttggggtgtggctctgccagcccccgccaggctatgaggctccttagctgtgtgtcagctgcacaggatggaacaggtgaaagagaggggctggcagttccaggaggctcatgggaaagtccagggcagaggggagggccctctctgtcccccttcccacgctaaccgccgctcagtacacagggggcggctggtagccctcggtggtctccgcgttctgggtgaagggtggctgttggtagttgtccacagatgcacctgggtaggaggcgtaggcagtgttggggtccggagtggggtcaacgtaattctggatgaagtcgtccacgccagccttgtagcgctggtaggccagggaggccagcacaccccaggagaagatggaaaagaagctgaaggtgatggctgccctcacagagtcggcccccaccagcacgtccttcgggttggtgactgcccactggttggtgaggaagcagataccttcaaaccacaggcaggtcccgcgtgctgtgaagnnnnnnnnnccnntgnccnggtncttgcggtcagtggcgttgctgatctgggggnnntncgcgtgggccgcccgnnngngggccgnggcccggngggccngccccccgntggccctgccntngcggccggcntcctcgttgcggttgnncncgctgtccttctgcttggggtcgtgggccttgctgtcgccctcnccctngntacaggngnncncgntcnngacgnngttcaaacactcggtgcggtctacaaactgcggctgcgtcaggaagcgccgcaggtcgaaggagccgcccgctttggaa

SEQ ID NO: 130612 - DNA, 1086 bp, Homo Sapiens
  misc_feature (390)..(401): n is a, c, g, or t
  misc_feature (424)..(467): n is a, c, g, or t
gcggtccagcctccttttctttacataaggaatttaatcttgcaacagctcactaatgctcagctgtggggcaggcagctgatggaggacgctaaaattatctggggagtaataacagtgtctcaaatttttctagggccagaaaacagagttcctgagccatgactcttgcttgtatgccctcaaatagagcaaagggaatgctgagccaaaaagggaaaacagaaactcccaaggtttaagcaatgtattttcttctggaaaaatttcaccactaaaatgttacagagaagcgaaagaagaggaagttaaccaggctgacttgaaggtcaatttttttcttattgaaggaagaatagtcacagaaaactaaatatgaacgctctttgnnnnnnnnnnnnaagataggttctcactctgtcannnnnnnnnnnnnnnnnnnnnnnnnnnnnnnnnnnnnnnnnnnntgagcttctggactcaagtgatcctctctacccggcctcctcctgtttcctggaactaggaatgggtaaagttataacaaaaacaggagaagctgtgataaggtagaggcatgctggcagggggttaggttagggatcttcatgctgtgatcatcaattctaccatcttggtgtatgaccttcagtcataattgctaatcctcaagctcctaatctgtcaaaggaatagggcaaatgctagccagaccagtggtttcaagctctgctagctgcagaaccctctcttcaaatgctgtcttacgcagaacctaacctttacaagggatcaaagcaggattgctggaatggaaaatctaaagagctgggcctgggatctgggactgggatctgggcctgggatctgggcttgggtttagcccttagggtgttccagttgttggagaactggccctgagattcctctgaagacttcaattaagatagtttaaaaactaccaggctagattctctttaattccaaaaatgtatgagtcaaacaaattccacccaaagagtcaactgttatcaaatgaaggatcatattatgctgaagtcagtggtgagtgaaacccaaagctag

SEQ ID NO: 130613 - DNA, 2394 bp, Homo Sapiens
  misc_feature (87)..(104): n is a, c, g, or t
tttatattttttcccaagttaaatctctttaatatcccaatacaaagtactgatgcaaaaagacaatgtagaaaacccaggaagttnnnnnnnnnnnnnnnnnnagaggttttataaataaaaaaccccgagcagcttttcagaggcagaggagctaagagaagcagcagtccaaagtgaggaagggagtgtgtggctcctgggacctgccccttgtcccctcactcacagctgctcgtaaacacccctttcaaaaggggctgcaccctttggatatctgcttctttctcttggtccctgggacgcaactagctctggcttcaatcccctacaaaaattcctgagatctcggggaccccagccagcccttcccctgcagtaccccttggtggggagggctggggagccggtgagagttcatagcgtatccaggagcataggtcaggagcacaggggagcctctgagtcccctgcccgctccaaaagcacacaaaggggaaggctgccgtagagcttggggtccgtgaggggctggagcagaagcaggaagagtcccacacccagggcatagcctgccagcaggggccgcctctgtgggtgctccaaggccgcgcacacagctgggaaacccatgtaattgcagaaggaatggcagagaaccggcccaatcaggtgtcctgtgcggatgaagaggaaagcagtgtaggcaccgaagacagctgtgtaggagaactggaacgcagcagacaagaagatgttccccacgctgctctggcgggaaacgcagctgctcaataatatggtgaaaatgggcaactccaaaaaagagcgggcaggtgaacacagcagggcccaggcccatgcacggtgctaacatgggcagcatacaggcccggaacaccagctcctctgtcagcggggcgatcacttggttccgcagccaacgcatgtctgtgaggcagcgggcccaggagcggggggccaggacaaccttcagcccatctgccaggtcacaagggcaatccatagagagctgcatcagtgggcccaggaaaagaatcatggtcagcaacaggggcagcagcgccgctgggaaaatgccctccagcctgaagcccatcagggtgagcagggatgtgcctggctggatgcctgtgagttccctccagagcagcacgcacaggggtgagagactggacaccaccaggacgctggtgaagcgtcgcttgatgaccgcgggatggtccctgggcagttcgctcttccagacgtagaggctgcccacgtaggagcaggcgaggctgaggcaggagaacactgacacccagcagcacagcccggggcccaggccgcccagcgccgctgactcgggcggccgctccggccgcgacaccgacagcagtcgcagcccatccccgcccagcgccgccattgcgccctgacccgcggcgcgcaccagtgacgcagtcccagggaggtgtgggtgacgtcaggccgcggcgcggctccacgccccgccccgccccgcccgggcccgacgcggaagcagacgcggaagaggacttggtgagcgcgcggcagctttattaaaccacgggataacggctgcccgcagcctccggatcggtgggcgcttgcggaaggggacccggctcagggcccagggctgggactcagccactctgacaggttggagacctcctgcagccacagcacgtcctccaggcggcttccgaggctcgccctgcccggcgccagggccctgccgtgagcctcgcggtgctcccttcctctaggagtgaggggggccgcggtggcttccgggcggcgcggggcggcctctgacgggctcggggccctggcagagcgcagagctcgcatctcctctatgcgggggctgcccctcttgagcctcttgttttctgcttgcccgctggtatctgctaggagctccaggctgctgttatcaggtgcgtcctcagtgccctgggctgagtcctttttttctagggttagctgctgcttcacctcacatgagcagtggtgaagaaattggtgttgggtgatctcacgaaatactttgtgcagtttggtcctgaactcttgtgtgtcagctgcttgaagggtctggagacacatctttcggaagctgctcctagtgcttccagtcagaatactcatgatggagttcacagccactgagagtgaggcctgtagtttctgctgagccttggcagcctggtgatgttgctccaagaccttgtccacagtgaattggatggaaccttgcactacactgtggctctccacaaggatggcattgagatgagttgtgagcaaagtatagactccccagatttccatttgctggactggaaatgcactgtggaaatc

SEQ ID NO: 130614 - DNA, 444 bp, Homo Sapiens
tattctgcccatgttagcaccgtgcatgggcttgggcccttctgtgttcacctgcccgctcttttttggagttggtgagtctggccagattagtcctggtgtgttttcagcatgagagctcagaagggggcttgaggtgaggggcagtcctagaagggaggctgggaggaatgcctgtgatgtgattgtcacctttttcccagcccattttcaccatattattgagcagctgcgtttccgccagagcagcgtggggaacatcttcttgtctgctggtgagtcctggctagctggcctgggttagggtgtatgatgatgtcgctaatggccactttggagaaggaattgggaactgagggccacagtattggagaggccactgcccgtgggaagttggggtgcaggacagctgtaggtggtggggcaggcagctactgccccggg

SEQ ID NO: 130615 - DNA, 738 bp, Homo Sapiens
  misc_feature (650)..(650): n is a, c, g, or t
aagggcaaaagttttatacatatataatgaatagcataaaacaagtacatatttatgtggagagatctaggtcccagtaatttgctgatttgaccttaaaattcccagtttaagtgtacaaatgagattcaacttgtgttctgtctggaaacttcatcagttgcctctgcgctgggtaactaagaagtcagttcttggtggcagtcactttttcagaaaaacagggcacttccaaactcaaatcattcggaatccctgtatatagacgtctaggacggagggcaagaaaatttagactgcaagtcgggataggaaggcgggaagttgggatacgaaggcgggaagttgggataggaaggcggggcagtttcgagtcttagtcttctgtcctgggggcagcaatcagcacggaagaaaggcagggactggcagggggggtgggtggggccctcatcgtattctcattggccttgttgctgccttgagttttcattagggagcaggggcttggtttggcgcaaggtaaactcttgaggaagagcagcagcccttctagatcggattgtaccagatcttagcctcagtttacaagtgaaacataatgtcccactccattctctgtggagagcctgctactgagcctttttgtncctggaggcgctggggtctatccagagtcctgattgctactgttcgagcctggaggagttactgcttcttcacacgtgtatttctgtg

SEQ ID NO: 130616 - DNA, 883 bp, Homo Sapiens
  misc_feature (574)..(637): n is a, c, g, or t
  misc_feature (700)..(700): n is a, c, g, or t
  misc_feature (724)..(724): n is a, c, g, or t
  misc_feature (746)..(746): n is a, c, g, or t
  misc_feature (762)..(762): n is a, c, g, or t
aagagcacccttttaaacattttattttgaaacaatttcagatgtacacaaaagttgtaaaaataggccacagtgctcccattttgtccttatatcagatttcccatttgtgagtgattctgaacaataagttgcagacatcttgacccactactccttactattccagtgtctatttcctatatacaaagggaatctaccaggtaaccatagtacaacaatcaaaacctggatgttaatactgatccaatatgaatataggatcctcaggtgccattcaacattttgcctcttctcctttatattttaaaattatatatgactacttacatttttctagaagaaaaaatagaacaataaatcacaaaaatgcctctacctctgcactactcccaaaatccaaatcccttgtccagagttatcacttaggcctttatcattcagatactttttctgtgcaacaacacagggctatacccccctccattttttgtttcaatcccaactggcttgtctctaataaaaatacgatctcttttggagctccttgtgtgtcaataataatcctatcaannnnnnnnnnnnnnnnnnnnnnnnnnnnnnnnnnnnnnnnnnnnnnnnnnnnnnnnnnnnnnnntttttctggctctaaaaagaatccacacagagaactccacagatgcaacataacctagactancaattctgtgacctcgtgcgtgtnctgggctcaggcaatccctaangagtctataaatcgancatgcaagcgttccggggaatgtatcgccacatcaacacaagagcggacaaagggtagctgggggcttgaggagcaccacatatggtggccatgcgcccatcggactgcggcatgatatac

SEQ ID NO: 130617 - DNA, 1196 bp, Homo Sapiens
  misc_feature (648)..(733): n is a, c, g, or t
  misc_feature (929)..(1032): n is a, c, g, or t
  misc_feature (1088)..(1088): n is a, c, g, or t
ccagtactatcatcttggacttccagcctccaaaactaagacaatctatctctgttttttaagccacccagtttgtgacactttgttacagcagccacagtaaacgaccagattttggtaccaggaagggccaggaggggtgctgcctataccttacacctagaactgtggcagcagctttggaactggttgatggggataggtctggaagaactggtgaggcctgcacgactgctggtagaaaggcatgaagacaagcctggaaatggctggaagaggagagctgccgccgtcttggagaatgcacacagcatcacagactggatgtcggcagcaatgccgacccaacaggtgcttccagtgaggtctcagatggaaatgaccgtgctactgggaaccggaggaggcagcagagagcttggctggctgctgctctgctgttgggtgcgaagtgggacctgcagctgatgagcctggacatcaagctgagatttccaagcagtgtggaaggtgccacctggcttctccttgctacttatagcagaatgcaagagggaaacaatcagtgaggcagggaccattaagcaaaaaggcaccagcccttggggatctgaaaaatgctctatccaggcagctctgagacgtggnnnnnnnnnnnnnnnnnnnnnnnnnnnnnnnnnnnnnnnnnnnnnnnnnnnnnnnnnnnnnnnnnnnnnnnnnnnnnnnnnnnnnngtggggcctccgggaaagggctgcggacccgcctgtctgaaggcttcggcactggtgagctgcataagccaacaaggtgtgagaattttacacccgcagaagtgctgccaggctggagtgaaaggaaggcaggctccaagagcagagccgccgaggccgaggctgacggagcagggggccaaagaggattcgcagnnnnnnnnnnnnnnnnnnnnnnnnnnnnnnnnnnnnnnnnnnnnnnnnnnnnnnnnnnnnnnnnnnnnnnnnnnnnnnnnnnnnnnnnnnnnnnnnnnnnnnnntgtcttacggctgaacttttgaaacagatcatctgttggctgatttcacggcgtcncagctggaggaatggcgcgcactccagcctcacctgtaccttgtttagatctatttacgtagaggaatggcgcacactccagcctcacctggacctcgttaagatgca

SEQ ID NO: 130618 - DNA, 742 bp, Homo Sapiens
  misc_feature (672)..(685): n is a, c, g, or t
caacgtactcagatttcataggattttatttttctactaacacagacagacagggaaacctacaaaaggaaacggagtcaattgtaaatggctgtagttactggttacacggagttgacaacacaaaggatgcctggtgcttgcgtgcagaggctgcagcccagggcgggggcagagctgagccctcaggaggtggtttcgtgtgcagaactgagcggccctcagaagcagggctgttttccagccaccaaccaacgttcagagccagcaccatgtggccgctgtgcctctagcctgctctcctccaggtgcaggggacacaggacctgccggccccatccagacatggaggagcgttttgctgcttaactcatgcttagccaaggcaggcagaggctgtgggaactgctgagccccgctgtgatgtctgggacacgctctgggcagcagccgtcactctacagcaatgccagccctagtctggctcctcagaaacatctgggggcacaagtgcagcctctgccccgatttgaactttgttgatggggctgattcccttgggagaccatgcaagccagacgtagcccaaggcctggccatctggggcctctagtatatagaagcaacctctttatggacaaccttgttaccacgtaactccctggggtgttnnnnnnnnnnnnnngaccgcgtatgcggccgcaagcttattccctttagtgagggtaatttagcttgccac

SEQ ID NO: 130619 - DNA, 1714 bp, Homo Sapiens
  misc_feature (98)..(98): n is a, c, g, or t
  misc_feature (274)..(274): n is a, c, g, or t
  misc_feature (491)..(491): n is a, c, g, or t
  misc_feature (545)..(545): n is a, c, g, or t
  misc_feature (811)..(861): n is a, c, g, or t
  misc_feature (954)..(1018): n is a, c, g, or t
aaaagctcggtgggcgggagcgattgagagactgtagcaacactcaagacagaaacaattacatacatctccgccagtgcgtctactgtcagtccagncggcggcacatcctccgcgagtgacgcgggtcaccgcaccatagacggccgttcctggcactgggccgcctcaaccatgcgcgccgtggggggcgtccttcacccaatctcattatcacaccggcccggcggggggcgcgcgtcggcgccgccgacgctcagatgggtggggaggngggggtacaaatactcagcaccgggcgggaccttcagcgcatggcgttacactggcggcggcggtggaacataagaacacatatatggtgcacactcacgacccgcgccgggaaggccgccggcgggcgcacctggacaccccacctcctacaattccgcgtgtagccgttccgcccacgtcagatctccgttacaatgccccgcccgtaggtatangtcttgcgtgccgacaaaacagaagagacgcgggggcgttgctagttcgcgcancacacgtagatggtcagcgcgcgcggacacacacgttcgacgcggtgcgctaccaatggggagctaacaatctgcaggctgtgcggtgcgagacgagcgtcggtgactggcgccgctctcagcgcgggcgccgcgtgagattcattatagtgggcggcaggccgttcctgctacaccttcccggcggtgccagtgcgggataatactcggccacggcggcaagcggcttcgaaatcggaccccgtgcggggggtctgctttctcannnnnnnnnnnnnnnnnnnnnnnnnnnnnnnnnnnnnnnnnnnnnnnnnnnaaaccaaaaggcgaaagggtacaaggggcctcccgcctttgctcctaaagcaccactgcccccaggggacggcggcccacaacaatcttggcnnnnnnnnnnnnnnnnnnnnnnnnnnnnnnnnnnnnnnnnnnnnnnnnnnnnnnnnnnnnnnnnnaaaggcggcaaaaagggatagcaaagcacgagacacccgacattcgggtttcctagaaggtggggtcgggggggatccggcacagcggcaggggaggggaaggggatagggcttccaggagataaaaaacatttattttaatgcacaactatagcattcatatgcctcagcccagggcaggggttgggagttaggtaagaagggatgcatttagtttgccctgtccccaaagagcgggtaaatagctaagccactcttcactcccagcacagaccttcagaagccccagatatcaggatgtaatggtagggctcactgctctaaaacagctcaaacaacctgctcccaggaaggcaagccttctgctccttggtctcctgcctaccattaggacacaatgttcttcgtctggccagacatctgttgaaaggctggatacaggacaacgtacccatctttccatctatatcaactatcctaggtctctgataccccattttggagcactgttgaagtcagtctctggaggtagtgctgacgcagagggggcaactgagaatagagctcaaagccctctgggagcgtggaattgggaagcttatagtgcaggaggtgctgccggagaccctcatctgcagcagccatgttttctgcagcatactcctgcgggcagctttgacctcatctgagctctgt

SEQ ID NO: 130620 - DNA, 596 bp, Homo Sapiens
  misc_feature (112)..(112): n is a, c, g, or t
gacagtgacaacagaggcggagccaatggcgttggtggcataccattcatactcgccagggtcttccgtgatctgcaggttcacaatgttcaactcagtgtaattttccttngttgatgatgaagaagcggccagaggtattgacaatgtccatgggcatcccgttctccttcttgcgccatatccagtctgggtgggggtagccaactgacttgcaatacataagtggcatcctgcccttcattcttgttctcactccgtttatggccagtgatgtcaggagcggctttcacttcaatggtggcgtttgctttaggagcgctgacaaagtgatatacgcagtggtattcgcctgaatcctcagctctcggcttattgatcctgtactccatgttgctggcattcttacgagtggcactcagttccaccccattctttgtccagtagctgtatgtaagggtgtgagagctggaggtgaggttacacgttctgagcggcgcctggccctgggaggagggagccagagaccagcaacagcgagagggccagggcgctgggcagcgacgaacccgacatcctcccgagcaggcggccgc

SEQ ID NO: 130621 - DNA, 844 bp, Homo Sapiens
  misc_feature (43)..(44): n is a, c, g, or t
  misc_feature (209)..(209): n is a, c, g, or t
catgggtcccagctgggtccatcatcgtcagggaccctccatnnggccctcttcccttttctcataccccaccaatgatccccccaagggatgatattccagcccagattccccagaaagcccagagtggggccaggtggctccgccccctgaggccagtgccaccagaggcggagccaatggcgttggtggcattccattcatactcngccagggtcttcggtgatctgcaggttcccaatgttcaacctccagtgtaattttccttgttgatgatgaagaagcggccagaggtattgacaatgtccatgggcatcccgttctccttcttgcgccatatccagtctgggtgggggtagccaactgccttgcaatacatagtggcatcctgcccttcattcttgttctcactccgtttatggccagtgatgtcaggagcggctttcacttcaatggtggcgtttgctttaggagcgctgacaaagtgatatacgcagtggtattcgcctgaatcctcagctctcggcttattgatcctgtactccatgttgctggcattcttacgagtggcactcagttccaccccattctttgtccagtagctgtatgtaagggtgtgagagctggaggtgaggttacactgcagggtgacagggagaacagggctgtctcgaataatgacctcttcactggtgacaatccttggctcgttctgagcggcgcctggccctgggaggagggagccagagaccagcaacagcgagagggccagggcgctgggcagcgacgaacccgacatcctccctagcagaagacccaacagcgaatgggccggggccagagt

SEQ ID NO: 130622 - DNA, 667 bp, Homo Sapiens
cagcagcatgaacagcatatttaatgcattgctggaggtcgggagtctgtgacgggtctcactgggctaagacctagggccggctcctcctggaggatccagggcagaatctgttcctcgcctttctcagcttccaggggctgtcctcatttctaggcccatgggcccttcctccctcttcaaagccaatgacgttggatcaggtcctcactgccacacttctggctgctagttcccttttaagaacactgtgaggactctgggcctgcgggatcccccaggatctcctccttaggttaagggtggtgttcaccaatccagttccacctgcaaccccaactcccctctgcatgtgatatgatgcactcacggcgaatagggctagggtggaggcatcttggtggaatggtggggtcttcactctgcctgccacacaggaaacaggtggcatccaggacattccaagcccccacgcttcctagaataagacccaaactctacccagggccatgatggcactgcaaggttacaggcccgatggcccctctgccccaacctgggtccctgggggactggaaggagccgagctcttccccactcaggtctcctttccgctgtcctctgtgggggctctgctgctcctcctccggtttcaggcctcgctcct

SEQ ID NO: 130623 - DNA, 658 bp, Homo Sapiens
  misc_feature (277)..(285): n is a, c, g, or t
tttatagaaaataattctttatagggtagttttgtaacaggattttaccgtagcaaatgtggaataaagaaaaggtttaggtttaggaacacccattagggttttttcgttacttcaacataaagtaccctttaatacacgaagtacatcctttaaacagccaagagaaaggaggttgtacaatagagacgtcatgtttgctttctaaacatttgtttgactcctgacacaatggttttgctttggggtaacatgaaggttgccaaacttcaaagtnnnnnnnnngatattttctgacaaagcaaatgttcagttcagagttgcctgatgctgtcagcattccaagcaaactcaataggaagaggtgaagtcttcttcactgtataaccatcggcgtggctgtggtctactgcttcacatcccattctccagggaaaggaaaagtgctcgctatgatgcattgtttaaccaatgagtggtgagatgtgcctctttacctgagggcttccagactatagttcagccaccttgctctctgggtcatatgtagtcctgaagcatgtaccatgttatggaaagccaagtttcaagaattaaaaatgcagagtcagtcacaatcctgggtgctgtgaggaaggctataaggcattcgaacaaa

SEQ ID NO: 130624 - DNA, 1309 bp, Homo Sapiens
tttcagatttgctagatttgtttatttctctttatttcaatcatacagagtccgggatcccttatcatcctccctcctcagtctctgcccccaggggttaaataattttaaaaaatatttaaaaagctgtaacaaaataacatcaaaggaaatgggaaggatgggaggggtcaggaatcatgaaggagggtagagaagagggcctcttccccactccccactcttggattccagcctgggcagtagggagaactaccccctatctctccaggtacatcccagctgtaggtgaggtcagaggtcagggtatgaaagtgccggtgtgtgtgaatggggagctgggcagaggcaggctgttcagaagatgccccctcctccccactcaaccaggtactgcacagagccatcaggccgtactctccgagcaaggacccggacagggtcccctcgggacaggtaaccaaccccacctcggactcctcccccagtcccaggagacaaactacggcacaggggagaagggggtgctgagcgtctaggaagacctggggatggggatgaaactgaggaagatgaggcagtcatcgagtggggggcacttttagggatgtctgtggggaaaccaatgtgaagttccaggggtgacctgtctgggggtccactgtccccagaggtccctgcggtgctggcagaagggtggaaggaagcaaacatccggatggggctgctgggcaggcagcgggcatctgtgggccggaagttgtagccgctgctgccctggtaactctggttagggctgggggatggtggagacactgaggcctgcagtgccctctgcagatgagcccgctccctctgctcctggggctcgggctgattgcgcactgctgagggtggccccagctcctccactttccccttctgcctcctcctcaggggctctggctccggcctccggcgcttccccaggggacgtgagacccctcccccagggccctgccctgaagggaagctggtgagtgctccatctccagtagggggctccacagggggaggcatccgagcatggagaccaaacaaacatttcctcttcttaatctctctccctgaaatgaaacggtccttgtggctgttaagagcagagaggagcttggaagaacgttctcctttgggggtgtctgaaagctcccccaggagcaaactgtcccaattctcagaagtgaaggggaggatctcacgatcaaaatcaaagtattcttcttacagcaaaccctcgtgccgaattcgccacccaggcctcgctaccttg

SEQ ID NO: 130625 - DNA, 1143 bp, Homo Sapiens
  misc_feature (268)..(307): n is a, c, g, or t
gagaatgggacagttgctcctgggggagctttcagacacccccaaaggagaacgttcttccaagctcctctctgctcttaacagccacaaggaccgtttcatttcagggagagagattaagaagaggaaatgtttgtttggtctccatgctcggatgcctccccctgtggagccccctactggagatggagcactcaccaggtcactggtccaggggggatgggggaaattctcagggtgttagtcctggggggtatatgtatagagnnnnnnnnnnnnnnnnnnnnnnnnnnnnnnnnnnnnnnnnataaggaggcctcttacagcttcccttcagggcagggccctgggggaggggtctcacgtcccctggggaagcgccggaggccggagccagagcccctgaggaggaggcagaaggggaaagtggaggagctggggccaccctcagcagtgcgcaatcagcccgagccccaggagcagagggagcgggctcatctgcagagggcactgcaggcctcagtgtctccaccatcccccagccctaaccagagttaccagggcagcagcggctacaacttccggcccacagatgcccgctgtctgcccagcagccccatccggatgttagcttccttccacccttctgccagcaccgcagggacctctggggacaagtggacccccagaacaggtcaccccgtggaacttcacatttggtttccccacgagacatccctaaaagtggccccactcgatgactgcctcatcttgctcagtttcatccccatccccaggtcttcctagacgctcagagccccttctccctgtgccgtagtatgctcctgggacttgggacagagtccgaggagggagtaggtaactgtcccgatggggacctgtacgcggccttgataggagagtaccgggacggaatggacactgcgaagaaacccggttgaattggcgcacagcgcgaaaacttggacaggctgcctctccgaaccccatacagacacacggcactgtcaatccggaccatggaccagctcacaaggagataagtgaagaaagggggaacacctcgccacgggaacccaaggcaaggaaagacccatcgcccagattgtcgaccaccacacg

SEQ ID NO: 130626 - DNA, 332 bp, Homo Sapiens
gggctgctgggcaggcagcgggcatctgtgggccggaagttgtagccgctgctgccctggtaactctggttagggctgggggatggtggagacactgaggcctgcagtgccctctgcagatgagcccgctccctctgctcctggggctcgggctgattgcgcactgctgagggtggccccagctcctccactttccccttttgcctcctcctcaggggctctggctccggcctccggcgcttccccaggggacgtgagacccctcccccagggccctgccctggtgagtgctccatctccagtagggggctccacagggggaggcatccgaa

SEQ ID NO: 130627 - DNA, 746 bp, Homo Sapiens
  misc_feature (505)..(520): n is a, c, g, or t
ctgaccacaaatcagatttaattcaactcacatttattgaacaagctagcctgttttgttttttcactttattcctgcaacagccacgtgatagagggattactatccacgtttcacaaacgataaaattgaggctgccacctgatgttactgaagtcctccacccaccttctttcgttcttttttaagcgtctactatcggctggggatggaatagttcgcgagtcagtttctgccttctgatggaggcagaaatttaaacagccaacacggtaaatactccagagctgcaaaaccacgaagtattttgggagtggaagcagggagaaggtggagggctgactttccgcgcacagggtacaggcgagaagaggtgagatctcgggaaatgcagtcaagtagttcagtaagactcgaatgtgacattgggttgcagaggtgggcagtcacttaggtatatttaattggaaatatatcctcaagtgtcacctcttccaagaagccnnnnnnnnnnnnnnnnccctcttcctctcataccactatcattcatgcaacaaatatttatttagcatctattagattccagaagctcagttcttccaggtgttggggacacagcagctgattcagtctttgtctggactacatctccccacactgcgagatcaccacaggtagcttgggcttattgttggggcctgtgggaacattctcaatctttctcatcactagaagtccatcgatga

SEQ ID NO: 130628 - DNA, 609 bp, Homo Sapiens
tttttacgcatacaaaaaaactttatttacagttgaaaacttaaagacaatcttggattctgaatctctgacacttccatggtctcttgatcaaatggggcagcagcaggcagggaagcaaagacgggggccagtccagattatcttactcaagaacaccaccaagaagaagggaaggcctgatgttagccacagctgtgggcaggctcctgggaagtgctgattcagtctttgtctggactacatctccccacactgcgagatcaccacaggtagcttgggcttattgttggggcctgtgggaacattctcaatctttctcatcactagaagtccatcgatgatttttccaaacaccacatgcttcccatccagccaatcgcacttagagcaggtgataaagaactgacagccatttgtacttggaccactgttcgccatggaaagcaggcctggagctgagtgtctaagtttaaaattttcatctgcaaatgggccccggtaaatactggcgactccagtaccatctccattaacaaaatctccaaccttgattcatggaatctttattaccctgtggaaggtgcttcctttgtatccaattggaac

SEQ ID NO: 130629 - DNA, 1010 bp, Homo Sapiens
cactaaccgccactgcgctcgcttcgcacaaggtcgggacgcacctaatacagcggaaggccgccgggtatcacacccccggctggccatggaaaattggtcccaggaaacacgctatgggccagggtgcccattgcctgacctttattgtccggcccccggccataaaagccttggagtatttatccctgttttctggtaccccgttccaaaaaaactttatttacagttgaaaacttaaagacaatcttggattctgaatctctgacacttccatggtctcttgatcaaatggggcagcagcaggcagggaagcaaagacgggggccagtccagattatcttactcaagaacaccaccaagaagaagggaaggcctgattcagtctttgtctggactacatctccccacactgcgagatcaccacaggtagcttgggcttattgttggggcctgtgggaacattctcaatctttctcatcactagaagtccatcgatgatttttccaaacaccacatgcttcccatccagccaatcgcacttagagcaggtgataaagaactgacagccatttgtacttggaccactgttcgccatggaaagcaggcctggagctgagtgtctaagtttaaaattttcatctgcaaatggcccccggtaaatactggcgactccagtaccatctccattaacaaaatctccaccctgaatcatgaaatcctttatgaccctgtggaaggtgcttcctttgtatcctattggaaccccatctttcctgaattctccggtgcagaactgcctaaagttctcggccgtcttaggcacaacgtctgcaaagagctcgatcttcatgcggccaacttcctgaccgccaatactgacatcaaagaacaccacggggttaacaggacttgaatttgccaccgccatggctccgacccggaagcagaagtcgggagcgtgggattccggcgaacctaaagcccggtccgcggatttcgtccggccc

SEQ ID NO: 130630 - DNA, 349 bp, Homo Sapiens
ctatggcacctgggggcagcttaggtttggcttaagttgtggtgggggacctggcaaccccctcccagcccaggtccaacctgacccagttatcttccatggccattccttgtcccacccccacccgatcataccttcccccctctgccacagcttagcatgaatcttctttattgtcctgatttgtcctgtttgttggtttttatttgtggggaagggcagctgagccaaaggggtcagaaattctgccctttgcctccaccacatggcattctggttttggtttctgtatagttttgggtctttctatgctggttgtatttatattaaacccctggttagtaaaaga

SEQ ID NO: 130631 - DNA, 745 bp, Homo Sapiens
  misc_feature (707)..(707): n is a, c, g, or t
ttttttggtataaaagtgatttatttggaagggagactactggagcagggagaagagggctgaggagcattgcatacataggtattgggccagggtctgatgaaagaacgtgcttaaaaccttgggtgaaattagttgtggtgttagactggggtgccgagtgggtttctgtaaatggcttgccatgggtccagcctctacctcctgcaaggcatttgccagcccgtctgacagtggggagcccagaagaggaggaggtctgggagtagggagggttctaagatgccagcatccatgctcccactgcatccttacactcaccgccccaacacacatacagacatgcacacacatagtacttgtcaggtcagcttgtcttctgagatttgtttctgaagtctggaagcagaggtttcactttgccccaaatcagtagctcccctacttctcactctagtccctagacactgcccccccaccatttctccaggctgagacacatcctggtcctgggggtccctgagcccacacatggtgactgactatggccacctggaacaaggttgggaggtgggaaatcagagaaggctgaggcagccagaaataggaagaacagaggtgaggtgtgggctcaaacctctgctcaactgggcagtgggcagaaccccgggcaggggcctagaagttctcataatggtgggataacntgagtccggcctgcctgttgatgagctgacaaggcctt

SEQ ID NO: 130632 - DNA, 164 bp, Homo Sapiens
  misc_feature (12)..(12): n is a, c, g, or t
tttatctttctngaatattttattagggcaaaacaagatatttgcatgggatgcttcttaagtcatctcaagtagttccccttcagttcttaacatgcactctcaaaatcaacacacctaccccaacccaatactcatcgcttcacagtcatccagtaaagtac

SEQ ID NO: 130633 - DNA, 948 bp, Homo Sapiens
gggaccctaaagaatgcaatggcttttaaactgcagttactgtgttcttaatgaagcaatacccaaagctctgttcttttggagcacttgaggggagcttgaatgaaaggtgcagataagagcagtaccttgatcttatgctttctgagtgtcctgccttgttgccatctgcatggatgagtgaatgcttctatgcacgaggagactcaagccaactcagagtctgctttttccaacgctcttcccaggtttcttttgcaaagcttggtcatttggcccaggtcttcctggaaagtggagtacatgtcactgactagggtggcgtggtgtctttacccttaacattaagtcttgttacctcagtgatgtgaagccaatggttggaattataaaaagcatccttgctggttcttcacaggacactggaacccaccctgtcaattcagctagcatgtccacacagtcttgatgatccctctctgtaacaggcagctaacattaagagaagggggaaagagaagaagagagcaatagcttatgggagagctgagatcttacttcgttgacccatatttttcccctgaccaagttacctgtaaactggaatttgcaaggggatgctgtgatgataacccctttctattgctgtaatgttcatataacctgggaaactgagagaaggggatgtgtaaataaaagcttaaacattttagtaatgtgtttaaaatgtcactctctcttaccctgtttcccttttttgccagatgaggagttttttatatttatattgtacactacacgggaagcctgaaacgacaagaatatggggttggggataggtgtttatattagagtgcacttaaaaaatctgaggggaaacatttgaggagtttaaagaccctcccgcgaaaatcttgtgtttgccacaataaaattttcgggggttta

SEQ ID NO: 130634 - DNA, 172 bp, Homo Sapiens
gccaagatgattaatttgaatgtcatatttaattaatttgcttaattgtagtaatctttttttacctgaacccatagaattttgcagcatatttttcccctgaccaagttacctgtaaactggaatttgcaaggggatgctgtgatgataacccctttctattgctgtaatg

SEQ ID NO: 130635 - DNA, 1020 bp, Homo Sapiens
tttcctcaatcatcatcggtttaatgaccacgtggcatgactctctggctatgtacatatatacacatattcacatatataatatgtaaataacttttgtgtcatttacacacccaaaaagtgtgcaagatgtgagaggctggcagcccacattattactatcgagaaagaacatttcaaaagccgagttctcctaacacacacgttctctgctcgcgcctcctagctccgcagggtgggcaacttggcctcgcaggcacagcccgttttcccgctgctctctaatcctccagcagcagctccagctcctccagcggcaggcgcacccggagctccttctcagtcatcaggtccaggatctcctgcatctcatcggggaaatactccacggcgtccaggtacaacacctttgcccaagggcaattctgaagtgctttgtagaatacacctttgcttctttctttatttcctaaggaaaccagaaagttcaaatacatcctccacagcaaggggcactggctgccactgtcgctgcgcatggcattttcaaacagggcttggatccgatgcattaagccggtctcaggaattgtggcgtggatctctctaccgtctaacctctggacagtttccaccagtctcttcctcagtttctcagcttcaattgcaaacaaccaaggctccaagggtttggcagacctggtgattgtgtcaaaaaatctcctggttttgctggcactgtgggacttattctgaatctgtacataggacctccaaagaacctggttgcctggatacaactttaaagcctgtgagagtgcctctcgcagaggggccagcgggtaaacactcactttcatgtggaatctcagcaggctcgtgtgcatcagtgtgatggcttcgagaacactggtccaactctgggagctggcactgtccccctcgccagagccttctgggaaaacagaactgttcagttttgcaaacacctgttcgtatatctgcacagcagcatcaatc

SEQ ID NO: 130636 - DNA, 1158 bp, Homo Sapiens
  misc_feature (243)..(415): n is a, c, g, or t
ccagccccttattgcctgggcccaaggttcttccttagggaaacaccggttagtgacccagttccaccttacccttacgggggacccgcgggcgcccaaaagcgaaagggttctaaaaaagtctttttcgaagggcccgaagggcggcccgaccaaggatgacaggatttacccgggccatgtttgtttaggaagagaatgggttttcccccatgttggtccagggcttggtcttgaacctgnnnnnnnnnnnnnnnnnnnnnnnnnnnnnnnnnnnnnnnnnnnnnnnnnnnnnnnnnnnnnnnnnnnnnnnnnnnnnnnnnnnnnnnnnnnnnnnnnnnnnnnnnnnnnnnnnnnnnnnnnnnnnnnnnnnnnnnnnnnnnnnnnnnnnnnnnnnnnnnnnnnnnnnnnnnnncccctattctctggaccacagtttgaaaatcacagacaggtcaacctagatccttccagctctagttttctactgtgttctttcctcttgagaagttacagctcatcatgggcccttaataacagaattcaacagaaggcatcatctgaaaacaaagtcaattcagaaactgttgttgcaagaaggcaaacagaaaaacggcaccatgtcccactggaatctctttcagcgatggagagttttgttttctggtaaaaaatatagaaatagtggttgtccttgaggggacttgtggtttggttctaaacctccccatggagccgagtggtgtccctgagggtgaggagggcagaggtctctgctcagagctgctctgagcccatccgcaagtttttgatctccagttccaactgtttggcctggacctctcgctgggtcaacagctcccggagccttcggatctcctcctgttgccggtagaacatctgcagcaactcattctctgtctttggtggggggcattcgaaaacgtcaaagccatttgtcagccaggttttcttctcctccagcctgtgttctgctgcccaccttggcatcttctcctccaacagggaggaagacctccagccatcttctgcagccagcttttctgtctgattcaagagcccgggtgaggctggggccatggaattgaagataggtctctctgcaggcagtggggtgggtctcagcagctcagagcc

SEQ ID NO: 130637 - DNA, 688 bp, Homo Sapiens
  misc_feature (653)..(653): n is a, c, g, or t
acggccaagcagacgccccaggggaggaacctggttttaatgggccctgtgctcagggaggccttcagtcagcagggtcgcctcagcagcatttgggagcctgccctgcagctccctgcctccaccctgcacgctgtgcccacacccccccacaacacgtaggtgaaagcacaggcaccatgcggaggccccgagcaccccttagtggggcggggtggggggaggaagtcagtccataatgttgtagttacggatcttggggggcccctggcagcctttagcttttgcaggatgagaccgggaggctcctgtggtcttggcctttgcctgggctgctgtcttcatccctggggtggcaatgcctgcctgcatcttgacgggcctcctgtcggctgctggaggagctgggagctctggagttgagtcaccctgggaggtgacaccagaagggctggatcccaggtctagcaacctccacgtgtcctggagggtgccactggcaaaggaggaggagctgtgggattggcgaccatgctcctcagggtgcttgggagcctggggtggctttggggacctgtcttctttctgccgaggtgatttacaggtcaccgtgtggatgctgtgttgtgtcttcgggccttgcagggtgttangtccgctgccacctgtgctgagcggggctggtgct

SEQ ID NO: 130638 - DNA, 524 bp, Homo Sapiens
tttttttgcaagcagacgccccagggaggaacctggttttaatgggccctgtgctcagggaggccttcagtcagcagggtcgcctcagcagcatttgggagcctgccctgcagctccctgcctccaccctgcacgctgtgcccacacccccccacaacacgtaggtgaaagcacaggcaccatgcggaggccccgagcaccccttagtggggcggggtggggggaggaagtcagtccataatgttgtagttacggatcttggggggcctctggcagcctttagcttttgcaggatgagaccgggaggctcctgtggtcttggcctttgcctgggctgctgtcttcatccctggggtggcaatgcctgcctgcatcttgacgggcctcctgtcggctgctgtatgagctgggagctcggaggctgcatcacggaaggcgggcacacaggcctcacttgggcgagaagagacccagagacgcatggccttcctcctgggccggctcccgaccagagcccatctccc

SEQ ID NO: 130639 - DNA, 997 bp, Homo Sapiens
tttaagttttccaataaatttaatcaataaaatatatactgaaatatcacataaaaattaacttacacttcaaagattgtgcagctgacaactcccccaaatcccccaaccctcaggccaaacaagataaaaagaaacaagaaaaaagttgtaacatgaaattgacttgttttgcttggaaataagattataaattagtaaatcaaaatcttgacctctcatgataatcgtggtgtgctgcaggcatcacgatgaaggcggggctgtctgcactcctgtgcttgcgacactaatactgttctctccactgcaccggagcacctttgttcggtatatatatgcctttgttacctctgactcacgtcgcttaaagaccagttttgcaaatgttgttttttaaaagcatacttgtcaaaactgtgatgtaagagaataaaatccttggaggccttgatttgaagctgtgaacctgtagcctaccaaggacagtaaaaacattcccgttgtgaacactgctccagaagcagctgaggaactagaaaaaagtggacacccctccatcaccaattcagcgactcatgcttcctggcttgcacagttcctcaggacttccctgagagtgatgagaaaggtgcccctcttccccagcccaaaaggtaggcagagaaaggtaaccagttgcgtggttcattttggacaggcatgaggaggtggctttttaaacacgtcgtttaacaaattttgggaataatctgatgagactatggcaccctattgtggaaccttcgtgcccattcttggtctcagggcatatccctatatgtgcgcattatatcgtatcactcatgctgttcctggtgaattgtttcgttacattcatcacacctattgggtgattggtgtgcccggggttattagtactaatcaataatcgttcttatgtctttcattggacacgtggcaagtatcgacttccacctcttgcgtttttcttgtg

SEQ ID NO: 130640 - DNA, 715 bp, Homo Sapiens
  misc_feature (665)..(665): n is a, c, g, or t
  misc_feature (674)..(674): n is a, c, g, or t
ttttcctgttacgccgtcaatgcagcaggcaatgaggggaatgacacagccctctcattcccggaacgtagtcaatctcggctctgcggatttcacagaacacactttgcctattgccggctccaacaagaagtaactttccaggaagctgccggccccggcagccgccaggatcgctgcctgagctgcgctggccgccggggattcacccggggaggcggggccgctggggaaggctcgcggggaatacagcacactttcccctaaatccctcgtccgcgccgagtgcagggctctcagagttcacctagtcccacctctcacccacaacagtttataaatggggaaggtcagacaagttagtagcagagctgggtctagaacccaggagttcgaatacaatccgaggctcatatcgagactttaagttgtccgattccgaagtttatttgcttttttccctctttttgccttccattctccctcacccccgttcttttaggggaatgtttgagcgagacttcaaggtcaaaagatggagtccctaggggctgagggtctccatcataggcgccccaggcaaggttggagaaaaactaaacagaaagccccttccgcctacgttggcaagaacgggaacccagctccacttggtttccgcccanagtctttanaacaggagctgccaagccgtaaggatttccgaatccgattt

SEQ ID NO: 130641 - DNA, 1981 bp, Homo Sapiens
  misc_feature (327)..(390): n is a, c, g, or t
  misc_feature (473)..(567): n is a, c, g, or t
gcccccccgtgtttttcccccagtggggggaaaaattttattttcccaaagggggcgaccaaagggggttggaataagcccccgtggggggggttttaagggttttcttcccatcccccttttgggaaaaggggttctcccaagtgcgggcgagaaatatcttttaagtgaagttcccacccggttttttccaataaaaaggcccaggggcgggggcttaaatttttatttggggcttcgctttggacccccccttggatagatcccgtaaagcccctccaaacttcctttgggttttgttcaaaaccgttgggtttcccccggggnnnnnnnnnnnnnnnnnnnnnnnnnnnnnnnnnnnnnnnnnnnnnnnnnnnnnnnnnnnnnnnncccagtttcctttccttttggggccccgggcccaaaaaaatgttttaaaaactttttggggggcggagggggcggacaagggnnnnnnnnnnnnnnnnnnnnnnnnnnnnnnnnnnnnnnnnnnnnnnnnnnnnnnnnnnnnnnnnnnnnnnnnnnnnnnnnnnnnnnnnnnnnnnnttgtcaaaggagaaaaccagaacgttttattagtttcttgaacctatttatagcgtcaaaagttagacgcaggtgcaggcctccattccatctattggctggctctcgactgccgagactggcctgccaacctgtgtttcaggagggcacgcgtctgcggctgaaccgcggaagggccggtgaggaaccgggcctcgggagatggccctgagggcccccgcactgctgccgctgctgctgctactactgccgctccgcgccgccggctgcccagcagcctgccgctgctacagcgccacggtggagtgtggcgccctgcggttgcgcgtcgtcccgctgggaatcccgccagggacgcaggtgggcaccgtgtggagctgcgggaggacggggtgcccccagggagaggaagacccccgcagcggggtaagcgcctcctctttccccggcctgcagacactgttcctgcaggacaacaacatcgcccgcctagagccgggagccctggcgccactcgccgctctgcgccggctctacctgcacaacaacagcctgcgcgccctggaggccggcgccttccgcgcgcagccgcgcctgctggagctggcgctcactagcaaccggctgcgcggcttgcgcagcggcgccttcgtaggcctggcccagctgcgcgtgctctacctggcgggcaaccagctggcgcggctgctggattttcaccttcttgcacctgccggtgagcgcctggggtctaaaggggcgggatactccagttatggcccctcgccctgtaggtctggaatagttagaaaaggcaacccagtctagacttggtaagaagagagacatgcccccaacctcggcgccctttgttcctcacgatctgcgtgctccttacttcagcgactgcaggagcattcaccatgcaagaaaacagcattgagctgctggaggaccaggctctagcggggctgtcctccctacgcactgctggacctcagcaggaaccacgctgggcaccatcagccgagaggccctgcagccctggccagtctgcaagtcctgcgcctcacaggtacctcttcctcggaaagcagtctcctgtctggcccacggtgttggcagtagggagcaggctcatcgtgtggaggggctctgacatcaggcaactgggcagcagtctggaaggctgcaccaccgcctagcagccacacctggagggactgcgggagtggagtgtgctggggaatacagctcaggcaaccctgcctcgtggagttcctgtcttctgttttccccaggccagggtgcctgagctggggaatacagctcagcgacgcgtggtcgacgatatcccgggaattccggaccgtaccagcctgctttttttaccactggttttatagtcacatgc

SEQ ID NO: 130642 - DNA, 818 bp, Homo Sapiens
ctgaggcgccaggcgcggggctctgcacacatgatcgtcctggtccctggaggtgagcagccggctgcacgccctccgtgatccaggcacccagccagtgcagggcgcagtcacagcgccatgggttctctgtgaggcgcaggacttgcagactggccaggggctgcagggcctctcggctgatggtgcccagctggttcctgctgaggtccagcagtgctagggaggacagccccgctagagcctggtcctccagcagctcaatgctgttttcttgcaggtgaagctcctgcagtcgcggcaggtgcaagaaggtgaaatccagcagccgcgccagctggttgcccgccaggtagagcacgcgcagctgggccaggcctacgaaggcgccgctgcgcaagccgcgcagccggttgctagtgagcgccagctccagcaggcgcggctgcgcgcggaaggcgccggcctccagggcgcgcaggctgttgttgtgcaggtagagccggcgcagagcggcgagtggcgccagggctcccggctctaggcgggcgatgttgttgtcctgcaggaacagtgtctgcgtccctggcgggattcccagcgggacgacgcgcaaccgcagggcgccacactccaccgtggcgctgtagcagcggcaggctgctgggcagccggcggcgcggagcggcagtagtagcagcagcagcggcagcagtgcgggggccctcagggccatctcccgaggcccggttcctcaccggcccttccgcggttcagccgcagacgcgtgccctcctgacgctcccgcggcgagcggc

SEQ ID NO: 130643 - DNA, 1091 bp, Homo Sapiens
ttttaaacaccacacatacacaaagcattttaaaggagccacatatatctatatagcaactctgactgcttttcaaagttaccagggaaaggaacttattcaggctttctttaaaaaaactccttagttttaatgtatatctttttaagattgatgctgtcatttgaagtaaaataatgtcatatggataatgggggaagaggggagagagacgagaaaatggaagaagcagacactgagttcagatttgcacctgaggtggcaagggaggaaaggagaaaaggtacaggtaaagttgatcctaaagcgacaagtggtttaaggaagcagcatttatactcagcaaacattcactgatttttgatgggaaaagaacagttgccagtaaatctcctgtaacaaccttttctaaaaggaaaagtagggttgattcagcaaagcctaacttaggcaaaaggccagaggaaagtgaacctacttcccaatggagtaataggatgtacagtgtaagagcagacaaagctgcctcacaaatggtaaacactccctaggcaaaagacatttaaaggaagacgaagaggtcctcagcctcaactggtatttcatatttagacctcttaatctagttgcctagttcactctgcactcctgtataaaactgacagatttacagatgctgacctattgaaaaataccacagccagaatggcctaaacaggtatatagttaatacaacccccaccatcctttacttttaacatagctcttagtaggaatttcataaaaatggacatcacagctaaaatgcattattaattctcctatctgctgacaataaaaaagcagcaaactcagtgatttctatttaaatgcactagatgggaatatcatgttttaggggtgtttgccttcaaaccaaacccacagcaacacacacaagcaatttcggtatccaccattttaaattcacaatctgagactaaatgaatggctatttatatttaaagcaaaacattttctttgacaccctaatgtagagaaggggtgagcagacgagccataactaaaatttgaaaagcagcaattaaggg

SEQ ID NO: 130644 - DNA, 707 bp, Homo Sapiens
tttttaacatttaagacagcttttattaaatacaaaagcaaaataagctctaaggagtaaggtagggctacttaagggcgttttctgtggacagcggacacagcaccattaaggttagcttagatttgaacaaaccatgagcagacagctaactacatgttatgtttctcttagtagttttagggtctgcccagtaatcaagaaattttacttctccagaatacatgaacatgggaaccaaagaaatgtaaatatttcgaaaaagcactacacaataaaatgagacgcaatccttatgcaggtcaagatgttctccacatctacaatgtgcattaacaaaattaatgcagataagaccttcactccaaccccaaagatcttacatggttaatactattttccaaaatcagcagaacaagctgcagttacttcttttagacatttagctttggaactttgaatttcaaagtaaaattgttataagaaagctagtcaatatatttagcaatagaaccactcttttacttttgatatcattctgaggtattaattcagaaccatcttccaagctatactggtagcaccacagacttactagctgctggtcatactgcacatcaatgattggtttgagcaaaggagcttaaaatgatctaaggctagcatgattaatagtttccaaaaggatgaacatgagtacttttatg

SEQ ID NO: 130645 - DNA, 1374 bp, Homo Sapiens
  misc_feature (139)..(189): n is a, c, g, or t
  misc_feature (488)..(572): n is a, c, g, or t
  misc_feature (583)..(678): n is a, c, g, or t
ccggggggtaggaggcgctgcgttggcctactctctttctctgcttgctgcttcttgtcgtccgccttctcctccttttccgttctctctccctcgcgctcgctgctccgttgccctgttttcgctcctttcgtcctgnnnnnnnnnnnnnnnnnnnnnnnnnnnnnnnnnnnnnnnnnnnnnnnnnnnttgcctgggctcgcgtccctgcccctttgtggtccttgggggcctttcgtggtctttctgtttgttgcgtttttcgtgtcctctcccccgcttgccgttctcgccttcctcggctcgcttcgtgcggttggggtcgtgtggggccccctggccgccttcttctccctccgcttcgtgcgcctgtcgttcccgtcgctctcgtgcggctggctccttgtctccgctgctgcgtcgcggctgcggtctctctcttcgcttcgtttcgccggccctcgcgtcgcgtggtctgccgcgccctnnnnnnnnnnnnnnnnnnnnnnnnnnnnnnnnnnnnnnnnnnnnnnnnnnnnnnnnnnnnnnnnnnnnnnnnnnnnnnnnnnnnntttttttgtcnnnnnnnnnnnnnnnnnnnnnnnnnnnnnnnnnnnnnnnnnnnnnnnnnnnnnnnnnnnnnnnnnnnnnnnnnnnnnnnnnnnnnnnnnnnnnnnnaggggcggagggcagaacaaattcagactttattgtcagggagaggaaaaaggggaggaccgtgggtggggggcctgggttgctacattgtcaagcagaaagagttgatgggaaggggaagaccagtgtaggccagacccctcccgggtcggcggctgaagggttgacgatacggaaaccacggagtcgggggtgggggagaggtgtcacacccccgcccgagttgtgcagtggaggtgactggtgggaggggacagccatgaggtctaggaacttggatcggggaggctacagactcggcgaatcctgcgaaggggaagggcgggggcgaggcttctattgctttttgctcacagttttgcggaaggcgaggcgggggtgggcttggactggacaccccttgcccccctcggtaccccttgggcgatgggtgctggtgaaaagaatggaacccggactagggaggaagaaggcgagggaaaggtctatggtggcatctccttggtcccacccaagtgccggagatgcccccaagtgctgccccctgcaatgggcccggctagacctggggctaaggcatggtgcggggcgggcacagtgaggttgcacggcggtaaaaccaaagtgcttatgagggacccaggatcccgcctgctccctccccctacggaagacgggggtgttcacggaagcgct

SEQ ID NO: 130646 - DNA, 1153 bp, Homo Sapiens
cctgtttttcctccgtatttaattcggtatcacaggagcaccaataaatagtttcttcccgcccctgcaatcttcctcctgccccgggcagggccttaggggccggcgatcccgtcgggggcaaggcacctgcaacccagaacgcagcagctcaggccagctgaactgccgcgcctgcggaattcccgggagagttccaaagcggtgcgtccaagttttccggcagtgggcggggcctaggaacgcccccgcgccccgcgccggcggagcctcgaagggacttccccccaagagggcggggccactcagggggcgtggttttcgtcagcggcggtcacgatgacgtccatccaaatgcgcatggcttcggggctcggagccaccatgtagaaaaggcgttcgtaggttttgacgcagaaggtcaggcgggggttggggctcttgaaggcacagcgtaagtggtcataatagacttcctcaatggcctggaagtagatgacacctttgagcttggtctcttccttgtccgcatagtaggccaagcggcgggcttggcggtcaaagcagaaccatcgcttcctccaggtcttgatgcggccgcccatcttcaccaggggtccacggcagcagcacccagacacctgcacatgtgggcagttttccgggttgtggccccatccctccagatgctgccggagatccaagattcgcgggcctggagggtggggtggggtgggcggggccgtgatggcaggaacagcagggcctgaggaaccttccgtgccccttcttgttccttcccgggccttgagcagccgctccctctccgccatggcctgctgcaggagccgctccatgtgggcaatgtctggatgggatggccccacagctattcccacggccacagttcagcagctggtagagggggtatctgccggagtcccccactgctgggcgggagagctgaggcctccagggattctagggtagaggggaccaggttacagggctggatacaccctggcctgagcctatccacttctcccctgcaggcataggtgcgggtttcctccatcctctgctgcaggatgagtgctgatgtgggaaggaagtggggaaccaggggatcctcaccagtacaatggaaggacag

SEQ ID NO: 130647 - DNA, 725 bp, Homo Sapiens
tttttatccaacaggtgtttattaagggcctacgctgtgctgaggctgccattcagggagccccacgaatgtgaggcctggccccttcctccaggcctccaggccccatctctggagactcccaggaactcacgtcgactcctgtcctccagttctactcagtccacttcatctcagcctttaccgggccctcctgagtgcctgtcccctgctgggtgcgggggacaccacggaccagacctggctcaagtcatagatggggtgggcagggaaggcttcctgggggaagaggtgcctgagcacagggttaagggtggagaatgctgggccatggaaacagcagcagagagggttggaggggccatctgcaggcggatctgtgtcaatagagccgatctgccgggtgggagtcctggagagggccatgggagggtcagggtgggggacaggggcgcagacatacatggtcagacttgcgttaggatgtgcctcaggaaccaggacaggctcccactgggccgggtgtgtgaggagtggcacagaggcctggggcaccacacccagtgtgggctgcagcggggccccccagagcctagagctggccgggtccccagagcagcaggccgagtgcagggagcagcgcaaggatggcagcagccggctgcagggcatgggccccgctggcgttgcacaagtcggtgtcacagcacgtgatgttcttcctt

SEQ ID NO: 130648 - DNA, 1190 bp, Homo Sapiens
ggctcttaggttttcccacaatacgtttgcgaagcgcaagatcctgcctgaccatgggatggcccctagggtaaccaagcctggaattttccgttctcgcgtccgcccaggacatagtactggcttgatggtttccagggtctttcttcttcaacgctttcagttgaaaacgttgggtccgggaccacctttctgggccaactttccaacacagagtcttcaaaggtggcggagaaaagcagcatctggcagttcctgggcagcatccttctggatgcggatgctctgatcttggtggccgtgagtggctatcatgacatcagcctcatccagaacaaacaccttgattttcttgggatcaatgaacttgagcttggagcaccagtccagcacagtcccaggggtgccaatgacaatctgctcactgatcttctggcctctttccaatttattgcctcgaacagcataagctagcttcagttcagggtaaaatttgcccatttgttcaatcacttttcctgtttggagggcgagctcatacgttggggagagacatagacactgggggtatttgtttgcaggttctacttggctaagcatggccagcacgaaggcagctgttttaccagtaccagactgagattgggcaattaagttctgtgggggctcagcaagcatcagtggcaatgcgttctcttgtatcttggatggacgattgaaacccatggcatagactccttggagaagctgtggtttcagccgaagctcttcaaaagacttcaccgagtacagaggggagtttggatcccgctgcaggacttccacttggtttgtgttatcaacaaggttgcttctgatcagcttgttgagtaaggactgggcagctctgtcctctttctcttcttcatctgtcttctctgcattggcattggtcttgacaacagcaccattggtatctggtttgattttctcttccttaagatgcaagttgctcaacgactcagccgcagcttcctgctcgtccaccgccagggcccatgagtcagtggccatggtcccaggcgcgggtgggacgctcgtgctggtggattcgagggatggcacgagggatcgtgggctccgggggttcgcggcaggctctgctcccgacgcgtggtcgacgatatcccggtaactccggaccggtacca

SEQ ID NO: 130649 - DNA, 665 bp, Homo Sapiens
tttacacataccaaaaacatatttaatcaggtaaacaaaaattccaaatacattgttgcttatttataaatattgatttataataatcctaaacttttttttaaccttaaaaaaatcatccaaagacttcaagttaaatatatttcaggattagccagggatttttgtttttcgagggttggtttttaaccacttcttcatccagcggtctattatgagaacacaacacagtcctctgtcccttaagcatgcaggttccttctactgctctcagtgtggtcttgtctgccaggcctgtgattctccctaggactgtcttttcctctgggaggactgactcacctgtgatttgtggtatttcaaactagtgaaaaaaggaaaaacaaaagtggcatttgattcctaagctattactactacccaggaaaatgcttgctgagagaaatgaacatagctttgtgtattgcattctaaaaataacaccaaaattgtgcttttgtaatcttgtgcagatttgagtttgtgctttgatgttttcaaaggaatcttcaaggtattggaaatactttggaatccaaagtatttgttagatactttccagtgagtccagtcactttccttgggccttcagttttttttaggtctggccagcagatattaatatc

SEQ ID NO: 130650 - DNA, 1197 bp, Homo Sapiens
agccaagaggatgttttatttttgcagcatgaacagattttaaaatgggctggggttaaatatcaagctcctaataagatgtgggacggaaaacactatcccaacactatgagaagcccctagcactggttaacgctttcctagcctagtctctggatttggggagcttgtcttcagtggctgagactgtgagctgggagcagttctctcagctggagagactcgggatggggtaacctggggaccagtctagcccctgcaccctcttccctgcctctgctccttgggagcgggtggagagacacccatgtggctccccttagggccagcaccaagcaccacgctctcatcctgcaagtcggcgcacacagtggatgaaggcaggagacccagaaagcagtgcagtgcagctctaataaaggccttatttttcttatgtaaatcatctttttacatttgtttgtaaacatgtttaaagaacgaacctagtgggacatttttagactttgatgctctagccattttggattgtgtaagttgcagatgtggcttttactttttaaatggcatattaacaagccagcaaagtgtgtcagaccatggcgtggtatttattgtgcagcagatccagagacagaggcagcctgtcttttcagttggtttctgcttttaatttacttgtacaattcattgttactgttctgtttttctattaatcttttgtcaacttcctgattatgtaacaaagtatgtacagtctacttttgaactatttttatcacagtattatttattgctttctttcaataaagtactgaagcattttccactgccaatgaagaatactgagaataagctctaactgttttggaaggcagtgtcaccatatggaaattgtattacagaagtcaattgacagaataaagcagccaggagatgaagtgcaggttcagggcgtcatcctgcccgctgctctggaggtcccgagcctgcatcactgcaggagacaggtgcctggtgttaaattgttaaatgcaaatgtgggggctcacatacacagtcggtgggtagggcccaaaggcagagcctaggccgtggaccgcgcgcatgcacgcatgtcccttaacaccgtttcccagctctgcttccttcctcggtgctggcttcacactcccacctgctctccctgcctgctca

SEQ ID NO: 130651 - DNA, 1023 bp, Homo Sapiens
gttggacatcttcagagacttcttttcaatctaagaataccatgctcggagtaaactaacaactgatgcactttgctgcagagtccaaaggatatacacggaggcttcaagatgtcagagggaaagcctagttgataaggtgttggacttcacacaccaaacttaatagaaactgcaggttcaaatcccagcagggtcaactgagagtattacgatctgctagaaaaactgagcgtgagacactttactgctctttgacaaatttaagagggccttccagactgtctctggagtttatgaggagacataaaaggggaaaaagctttgcgtttaaataaatatactgtcttttagttctgtttaatggggagaaaaatcacatctctgtaacatgctgtgtatataacaaagaaacagaactatcaccttccagatacccaaatgagatccttacagtaagtttaccatcagcatacagtattacagatttctaacattccgttcttgcccaatgcaaatctatatacaataaacctaaaattacccaccaacctggtttttctttagtttttaaaggccatcaaatccttggagatagtatggacctccagctgttaacattcagaaggaacacacttacagccctgtctccattgggcttattactgctccagtcaatggtgcatttcagagctgagaacaattccaatgaagttttcactgctagtagtaaacaccactgcttcaacaatccacattaggtcagcatttaccagagggtctccctctggagcaggttgtccaagaatatgagttcaaccactggctcaagagaagcggaatgtcttctcaatggttcaaaattcactttatgttcaactacaggccttctgcaaactgaggatctgagccctttagggcagtgactataattcttcccggacatagaaggccaacaaggtgactgtcacacatcagcacagagcgaaagccattacatattagtagccagtgagaaacaag

SEQ ID NO: 130652 - DNA, 685 bp, Homo Sapiens
ttcacttctcattctgagctttcagatttgcttttattggtagggaaattccagagtggggagccacccaggaggagacaggggtgccgaggcttctgggagtctggaagctcccggatggagaggcttacagcccccagccttccccagcaggagcacaggcaggggactggccaagtctgtcagctcagagcaggaccggcttcagggcctgacttcggtctcctcttgacccgccccggaggcttgtggtgggctctgtgtttgcagctctcctgaacagagctagatgagggtgggaggcccccgttggctcacacagtggatgctaccatctccggcctctggatgtggagctctgtgccagagtcaacagtctccagggtgggccggaagttgttgtaggcgttctcaaggccgaatctgctctccctcagattctggtctgtatggagaggccgtgatgagtgatgggagccttggtagggggaggactagggggcacaggggatttcctctggcaaaaggaagagtcagcccggcatctgccctacgccctttctcactgccgaccacccctccgaccctgcatcactgggctgcgggtaagtgcacagcctgcctggggagacgcccgctggaccccggaacaggagggagccgagcagaagtccccacatgcacg

SEQ ID NO: 130653 - DNA, 1158 bp, Homo Sapiens
  misc_feature (656)..(666): n is a, c, g, or t
  misc_feature (806)..(806): n is a, c, g, or t
  misc_feature (865)..(865): n is a, c, g, or t
  misc_feature (899)..(899): n is a, c, g, or t
  misc_feature (913)..(913): n is a, c, g, or t
  misc_feature (939)..(939): n is a, c, g, or t
  misc_feature (951)..(951): n is a, c, g, or t
  misc_feature (964)..(964): n is a, c, g, or t
  misc_feature (1037)..(1037): n is a, c, g, or t
  misc_feature (1042)..(1042): n is a, c, g, or t
  misc_feature (1049)..(1049): n is a, c, g, or t
  misc_feature (1068)..(1068): n is a, c, g, or t
tagcctttatacaagtctatctttatttgtaaaaaataatatacaactaaagctaatttgatttttaaaatcgaagttcatttagtgataatgtacactttataataaaattgtagtaaaatactgacatttgatagttataaacaaagtatcattcatgtaaaaatcatgttatagcatgtaaaatttaattagaaaattcatagctcacaaaagtacatatattttgttgatagctcgagaacattatcataaatttacttaagatacagaacaaaattcacagttaggcttgacatttagtactataaaattttatgttggatccactgatacttttgttaataaggtgcacttgaaataattgattcagcctaccaatgagctgatattttatcgtataaccaggatctattggttttacaatatatctagtaatcaattatttcaccaataatttaagaaacagagatctacttgaaaataccattgatagatacccttaacaggataattaaaataaaaagcaatagcagctttgatttccatttccatgaatgcgtacaagataaatctgtattttacagttaaaatttgtacaaaaagtcaagccctgaagtagtttttcccccaaaagttctgatgttaaaactttnnnnnnnnnnngagagaggtagtgtgtaaaaatatttttacttaaaatgttgaacccctgcaccacttatattataaatgaaagttaaccttctacatactaacattattttgccattcaagagtcaaatttgtaagactcacagaatgtntaagccggaatgccattaaaaatagcatataaatggaagaacttcggtgaattcaacanaaagtacaacgtattacataatgtgcagtcagtntatagtttactgantatatgcttagtggtaatggtgacanaatacatttgangtatctgagtcangtgatctttcacgtatcaagactcttcatatatattttaccatatagagaaacatccttcaaagcggctcgtngcganttctggnctcgaggggcaatccctanaggagtcgtataattcggatcatgtcaactgttctgtgtgaatgtatcgtcacatcacacacaacagcggacataggtagctgggtgcaa

SEQ ID NO: 130654 - DNA, 666 bp, Homo Sapiens
gtctttcagagaattttaaaaaagaagtaattttgcacatctcctgttatcaaattagcacttgtcatcaaggaagggaagataaagcacgaggagatgcccacaccccaggaaagtgtcccaagagtggctcagattctccagggctgcgacgtcctggttttcatctgggggtggtgacaggcgcgtgatctctggttattccagaagcagtgaatgtaggatgtgtgtcatttagcttctcacgccatgcactggggcaagttcactgaggaaacagatctcatccttaaggcaggctgggagtgggcgtggctgggaggtgggtgcctgaggaacactctcgccccttcccctgcacctgtggtctcaacctggcgggaagtccgctccagctcctgtgggaccagggttgctggatccaagttgccaggtaaactcccgctgatctgcagcacaagagccaaatcccaggacgagctctcacggagcagtcaggcccagtggaaactggtggcctcgctccaggaaatgaagccagactcagacaaacaaaagccaccagcaatgcatggaggcaggatgggacatctcacgcggacccagtgaccctggagcatgcctgggtacagatggagcccccaacaggggtttccttcctcatgt

SEQ ID NO: 130655 - DNA, 1060 bp, Homo Sapiens
  misc_feature (178)..(194): n is a, c, g, or t
  misc_feature (978)..(1008): n is a, c, g, or t
catagtgaaccccccctctataaaaaattttgaaaattagctgagacttgtgggcaacaactgtggccccacttatttgggagctgaggcaacggggtcaagacttcagtgagccctgactgtacgactgcactccgtcccagcctggaccagagttaagaccctatctcccatttgnnnnnnnnnnnnnnnnngcatttcaaactaacagcggtttaattcttcctttagtatctagggtaaaactggtcctttttctataaaagtctactatcttctggtctagttttcaaaaagtataaacaccctgaaattaaaaacatgaaatattaagaaaaaagatgatgtggaggccaaaacccaggaatgaggtagtcaacagtgtggttatgtgacccctcatctcacacttcgcagaggcacgttcaggaagccactggctgccactgcacaaggctgctccaagattccatgtcacctgggcctgtgagttatttgaaacagcaacctaaccccacgccaagctgggctgttttctccaaaggaattctcaactgtcttcaacagaatttctgtgcaagtcagccccagacagtgggaaggtggtgttatgcctggggatgtggtttctccgagcagcagtgatgtttggagattaatactgaaagctgcgctttgtctggatatcatcaagaatctgctgcagctcctcatcttcaaaccgtccctccaagctacgaacactggcaatggtctctctgtttttgaaacgactgaaacggctgtgtagtttaatgttttcatgaagacttctgagagctcctgttcgtcctctgcactctcattctgctgctttcgatgttccagaagcatatgaacttctgaatttagaagtgtctcagctgtttcaaactctttaggaaagatgagctgtgaggcgtcctcctctacgtcgccagcccgcggatcgctgccacnnnnnnnnnnnnnnnnnnnnnnnnnnnnnnnaccacccggacgcgtgggtcgacgatatcccgggaattccggaccggtccac

SEQ ID NO: 130656 - DNA, 1941 bp, Homo Sapiens
  misc_feature (308)..(372): n is a, c, g, or t
  misc_feature (386)..(412): n is a, c, g, or t
  misc_feature (782)..(796): n is a, c, g, or t
  misc_feature (1520)..(1747): n is a, c, g, or t
  misc_feature (1772)..(1788): n is a, c, g, or t
ggttgccccctctgggcccccgccccgtgggtttctttcggggaccccctttcccaagttttcttttttccccatttcccggggctttaggtgcccatccagccccatggaagtggcctttttttaggggaaataattgggcccggtacccccttgggccagcccttattggcccaaattgggacaataccagggaaggcagcatgggccactcgccaagaatgcccatgcaaaattcatccagcacttaaaaaccgcaaagttacccgtagattggggtaagccaaatttcacctcgcccttcttcnnnnnnnnnnnnnnnnnnnnnnnnnnnnnnnnnnnnnnnnnnnnnnnnnnnnnnnnnnnnnnnnnggactttatctccnnnnnnnnnnnnnnnnnnnnnnnnnnngaattttttattcttgccttatttcgtagcaaacataaacccatcctgattttaaaagccaacactgttctttctcctttttccttggatcacaagttcatacagagtcaagcaagtgccccaaagaaaaaccccaaaattgaaaacaagtgtattcccttcagaaaaatcaaagctagaatgtttagctattgaagtgttttcccccagactgagatcaagtgacttcactgcagtggctcaagagtggatgactccctccttccaaataaagcacttattgctaattagcaggccagaggcttagactggatctctcataattggagacttcaaagtgttcagaacttcaagcctggcctatgaagtnnnnnnnnnnnnnnntttttttaagtagaattgcaattttatttttctccagagaagtttttcttcagtccttaacaactccgctccttatatgggctttggtggaggtcatggggcagcacctgcaggtctacgttggggtggaggtgttcggtccttgcctgcttcatgagctcaattcctcaccactgtgctgtgaatggcacaactcacatggtaatgtagcttcacatccagcctgggaagtacacaggcgtcaaggatgctcatttcagaaacatcgctgactgctgcggcctctacgtttcaaatgatgaatttcttagtagccttgtcattgggcacacaacaaccacagttcatacagcaaatgggctgcagtgaacagtgcacacctggttgtggacctctttggcacgaccattgcttcttctttgttatcttggaggtgcaggcccaagaaagatgaagtaaaaatcttaatttgagggtgactaaatgaatccttcaagaccacttaccccaaatccacattctgcaagacagttcaagaagaaaggcaaagtagccatctatctcaaggggctatgggctccacaatacttagcacttgtccccaagtgtaaacacttcccatggcgtgcttcttccgtctcccaggttaggcacaacgatgccaaggtgctgtcatcgacactcccatcctttaagaatttcaggccagttgtggtggctcatnnnnnnnnnnnnnnnnnnnnnnnnnnnnnnnnnnnnnnnnnnnnnnnnnnnnnnnnnnnnnnnnnnnnnnnnnnnnnnnnnnnnnnnnnnnnnnnnnnnnnnnnnnnnnnnnnnnnnnnnnnnnnnnnnnnnnnnnnnnnnnnnnnnnnnnnnnnnnnnnnnnnnnnnnnnnnnnnnnnnnnnnnnnnnnnnnnnnnnnnnnnnnnnnnnnnnnnnnnnnnnnnnnnnagagttaagaccctatctccatttnnnnnnnnnnnnnnnnngcatttcaaactaacagcggtttaattcttcctttagtatctaggtaaaactggtctttctctataaagtctactatcttctggtctagtttcaaaaagtataaacaccctgaaattaaaacatgaaatattaagaaaaaagatcctcgtgcc

SEQ ID NO: 130657 - DNA, 1031 bp, Homo Sapiens
  misc_feature (42)..(42): n is a, c, g, or t
  misc_feature (96)..(96): n is a, c, g, or t
  misc_feature (158)..(172): n is a, c, g, or t
aaaaaaattaaaaatttagctgagagttgtggtgcaccactngtggccccccagtattggggaggctgaggcagcggggtcaagacttcagtgagnccatgactgtacgactgcactcctccagcctggacaagagttaagaccctatctccattttnnnnnnnnnnnnnnnaaagcatttcaaactaacagcggtttaattcttcctttagtatctaggtaaaactggtctttctctataaagtctactatcttctggtctagtttcaaaaagtataaacaccctgaaattaaaacatgaaatattaagaaaaaagatgatgtggaggccaaaaaccaggaatgaggtagtcaacagtgtggttatgtgacccctcatctcacacttcgcagaggcacgttcaggaagccactggctgccactgcacaaggctgctccaagattccatgtcacctgggcctgtgagttatttgaaacagcaacctaaccccacgccaagctgggctgttttctccaaaggaattctcaactgtcttcaacagaatttctgtgcaagtcagccccagacagtgggaaggtggtgttatgcctggggatgtggtttctccgagcagcagtgatgtttggagattaatactgaaagctgcgctttgtctggatatcatcaagaatctgctgcagctcctcatcttcaaaccgtccctccaagcttgggattagagccttggactcctcagcagtctctgggcaaaggttggccaaacaggccaactcaaacttatgaagctttttctggagtagcaagctacgaacactggcaatggtctctctgtttttgaaacgactgaaacgggctgtgtagtttaatgttttcatgaagacttctgagagctcctgttcgtcctctgcactctcattctgctgctttcgatgttccagaagcatatgaacttctgaatttagaagtgtctcagctgtttcaaactctttaggaaagatgagctgtgaggcgtcctcctctacgtcgcca

SEQ ID NO: 130658 - DNA, 1248 bp, Homo Sapiens
aaatgttaaggcccgtcatttcatggtggtaattgtgtgagagtatgtatgaattgaaaagatggaaaatgacacaattactatgaatatagtaagattaaaacagcatctgtatgtgtcaacatattacttagcctcccggagccaatactagcaggacctgagagtctgtgggtccctcctagggctgtactgttctctggagcctgggggctgaggccttgattgggggcaggacaatctgttgtcttggaatagagcccaggaggcccagacaaggtgctgaccagctaaagctgcttttttcacacactgtttgaaatacggttagtggagagaggcagtggggcgatccagggtgggcagggagacgttctaaaacaccaaggcattcctcacagggtctggagcgcagtgagcttagaaaaccagcaccgtaacacatgctgccctttacgaggcagtggtggggcgaggggggctgcacgtgtgacccgcctgcaccagggcctcctgaaggccaacctctccatcgagccctgttctgagaccaaattccagtgccgaaagacattaaacaggattgtctcttcactggcatctatcaaagagcaccaacatgatataaattaaaacccacagtaaaatctctcagaattccgtccccttttctggctctcccacactctgcaggctgacggagaatctcactgttggccagtgtccccagatgccctgactctcggctccagcgctctttctttgtgttctgtctggtctagaagagcaagtccaggtagctgtggcgccgcctgtgccttgcctcctgcagtctgcctacgattgcacgactcacctcttgatgtgtgagacccgcatttatatttaatcatcatcttagagtatattcttccagtagttgtagaatacgtattttgtgcccatgctaggtgcccgggttgcaaaggtggattggggctccttttgtaagtgggaggcaggcttgtgtgggtcaccacagggcagcccgtgatgagctgcaagggccatctgagccccaaaagctcgctgcatagttggagagtcgcgggaagcagggggaagggtgatggtctgggccctactgctgctggaattttaagtagctcagtgtgactggcacataggatttctgacctgaaaatcattgggctaggttagaaatctgcaaacttctgtaaaggaccaggtatgtggggtgtgggccgc

SEQ ID NO: 130659 - DNA, 2858 bp, Homo Sapiens
  misc_feature (2618)..(2618): n is a, c, g, or t
  misc_feature (2672)..(2730): n is a, c, g, or t
  misc_feature (2766)..(2766): n is a, c, g, or t
ctggtaccggtccggaattcccgggatatcgtcgacccacgcgtccggaaagatggtgagaagcggaacagcctgccccagatccccatgctaaacctggaggcccggcggtcccacctctcagagagctgcagcatagagtcagacatctacgcagagattcccgacgaaaccctgcgaaggcccggaggtccacagtatggcattgcccgtgaagatgtggtcctgaatcgtattcttggggaaggcttttttggggaggtctatgaaggtgtctacacaaatcacaaaggggagaaaatcaatgtagctgtcaagacctgcaagaaagactgcactctggacaacaaggagaagttcatgagcgaggcagtgatcatgaagaacctcgaccacccgcacatcgtgaagctgatcggcatcattgaagaggagcccacctggatcatcatggaattgtatccctatggggagctgggccactacctggagcggaacaagaactccctgaaggtgctcaccctcgtgctgtactcactgcagatatgcaaagccatggcctacctggagagcatcaactgcgtgcacagggacattggctgtccggaacatcctggtggcctcccctgagtgtgtgaagctgggggactttggtcttgtcccggtacattgaggacgaggactattacaaagcctctgtgactcgtctccccatcaaatggatgtccccagagtccattaacttccgacgcttcacgacagccagtgacgtctggatgttcgccgtgtgcatgtgggagatcctgagcttgggaagcagcccttcttctggctggagaacaaggatgtcatcggggtgctggagaaaggagaccggctgcccaagcctgatctctgtccaccggtcctttataccctcatgacccgctgctgggactacgaccccagtgaccggccccgcttcaccgagctggtgtgcagcctcagtgacgtttatcagatggagaaggacattgccatggagcaagagaggaatgctcgctaccgaacccccaaaatcttggagcccacagccttccaggaacccccacccaagcccagccgacctaagtacagaccccctccgcaaaccaacctcctggctccaaagctgcagttccaggttcctgagggtctgtgtgccagctctcctacgctcaccagccctatggagtatccatctcccgttaactcactgcacaccccacctctccaccggcacaatgtcttcaaacgccacagcatgcgggaggaggacttcatccaacccagcagccgagaagaggcccagcagctgtgggaggctgaaaaggtcaaaatgcggcaaatcctggacaaacagcagaagcagatggtggaggactaccagtggctcaggcaggaggagaagtccctggaccccatggtttatatgaatgatacgtccccattgacgccagagaaggaggtcggctacctggagttcacagggcccccacagaagcccccgaggctgggcgcacagtccatccagcccacagctaacctggaccggaccgatgacctggtgtacctcaatgtcatggagctggtgcgggccgtgctggagctcaagaatgagctctgtcagctgccccccgagggctacgtggtggtggtgaagaatgtggggctgaccctgcggaagctcatcgggagcgtggatgatctcctgccttccttgccgtcatcttcacggacagagatcgagggcacccagaaactgctcaacaaagacctggcagagctcatcaacaagatgcggctggcgcagcagaacgccgtgacctccctgagtgaggagtgcaagaggcagatgctgacggcttcacacaccctggctgtggacgccaagaacctgctcgacgctgtggaccaggccaaggttctggccaatctggcccacccacctgcagagtgacggagggtgggggccacctgcctgcgtcttccgcccctgcctgccatgtacctcccctgccttgctgttggtcatgtgggtcttccagggggaaggccaaggggagtcaccttcccttgccactttgcacgaggccctctccccacccctacccctggctgtactgctcaggctgcagctggacagaggggactctgggctatggacacagggtgacggtgacaaagatggctcagagggggactgctgctgcctggccactgctccctaagccagcctggtccatgcagggggctcctgggggtggggaggtgtcacatggtgcccctagctttatatatggacatggcaggccgatttgggaaccaagctattcctttcccttcctcttcggccctcagatgtcccttgatgcacagagaagctggggaggagctttgttttgggggtcaggcagccagtgagatgagggatgggcctggcattcttgtacagtgtatattgaaatttatttaatgtgaggtttggtctggactgacagcatgtgcccctcctgagggagggacctggggcacagtccaggaacaagctaattgggagtccaggcacaggatgctgtgttgtcaacaaaccaagcatnagggggaagaagcagagagatgcggccaagataggaccttgggccaaatccgcnnnnnnnnnnnnnnnnnnnnnnnnnnnnnnnnnnnnnnnnnnnnnnnnnnnnnnnnnnnttactcctcctctttctctccccaacccccattctnatctgcacccttcttttctcatgtgtttgcataaacattcttttaacttctttctatttgacttgtggttgaattaaaattgtcccatttgc

SEQ ID NO: 130660 - DNA, 441 bp, Homo Sapiens
  misc_feature (52)..(60): n is a, c, g, or t
gctagacttagacagtggcaaacctgagatgccttggatttgaaattgagannnnnnnnnctctccctatactgattgccttttgtgtgcccatggagctgtgcggggattctagtaacgtggacctgggacctagccttcatagggagcagggtgatggctcttccctgggtctgagacagtggaacattctagacccccatttccccagcccagtccctggatcttggctgaggtgttatagatctggtgacgcctggctttagagcctgcagacactcaggttccctaggggataccaccgatctctgtgatctgcgacttttttctctgtctgtgcaggtccacagtatggcattgcccgtgaagatgtggtcctgaatcgtattcttggggaaggctttttttggggaggtctatgaaggtgtctacacaaatcac

SEQ ID NO: 130661 - DNA, 843 bp, Homo Sapiens
  misc_feature (66)..(69): n is a, c, g, or t
  misc_feature (84)..(84): n is a, c, g, or t
tgggccccgcgggcccaaagggaaggtctagaaaggtttctgggggcccgaggcggccgccatgtnnnntctcccccgtcgggnttttccgctttataatcaatataatctctgtgcctttgaatctaccaggacccctgggttcccagacgcctgggaattgggtctctcaattccctttggttttggagggaggagtttaaacctgtgcatgggagccaggagggactcaaggggtggcagtggtgagtgggaggaaatacactttgggatgactcgttcagccctgagagaggggtgtgagttacccaggggaatgggtagggaaggtttaaagcaacacccaaggaaagaagggaaactcatctcttgtagtgattcaaccctgagaacagatggggagtggggttggctgtcccccatggatggatgaaaggtcacctaatcagtagtcaccaggacatagtggtggaggcacaagtggccaaggagtgctcatttggtggagactgggaaagcggctgttatttagtgtctgtgtagtagagggagcgcagctggtcccagaagaagagggagaggatggtgtgggggccgaggcggaagtaggaggcacctatacccttgtacatgccaaaaatgccctcggtccgagctgtctgcagcagagcgtccagtatcccccggtacatgaggcccttgccctgtgcatctgtgggctggttgtagagccttgtgcaggccacatcaaagggtgccatggccaagacaactgcaatgccactcatcatggcagccaccagcgccaacttccagctctggggaggaaagatctgatgctcc

SEQ ID NO: 130662 - DNA, 895 bp, Homo Sapiens
aatccagaagctgttgaagtcttgttgaattatgcctacactgctcagttgaaagcagataaggaattggtaaaagatgtttattctgcagcaaaaaagctgaagatggatcgagtaaagcaggtttgtggtgattatttactgtctagaatggatgttaccagctgcatctcttaccgaaaattttgcaagttgtatgggagactcccgtttgttgaataaggttgatgcttatattcaggagcatttgttacaaatttctgaagaggaggagtttcttaagcttccaaggctaaagttggaggtaatgcttgaagataatgtttgcttgcccagcaatggcaaattatatacaaaggtaatcaactgggtgcagcgtagcatctgggagaatggagacagtctggaagagctgatggaagaggttcaaaccttgtactactcagctgatcacaagctgcttgatgggaacctactagatggacaggctgaggtgtttggcagtgatgatgaccacattcagtttgtgcagaaaaagccaccacgtgagaatggccataagcagataagtagcagttcaactggatgtctctcttctccaaatgctacagtacaaagccctaagcatgagtggaaaatcgttgcttcagaaaagacttcaaataacacttacttgtgcctggctgtgctggatggtatattctgtgtcatttttcttcatgggagaaacagcccacagagctcaccaacaagtactccaaaactaagtaagagtttaagctttgagatgccacccgatgagctaatcgaaaagcccatgtctcctatgcagtacgcacgatctggtctgggaacagcagagatgaatggcaaactcatagctgcaggcggccgc

SEQ ID NO: 130663 - DNA, 1078 bp, Homo Sapiens
  misc_feature (844)..(856): n is a, c, g, or t
atctgaaaaatcataatattttatttcgtaatccaaggtagctttactgaaaagtgacacttgagaggaggtgcacagcaggtatgaatttgggtctgggaaggtggaggaggtgctctcttgagaagttttgctaagactccatagcagacattgttggttcccactcatatccccttggcatattcaaaagatcacttgcagatgttgctcataaatactaaaagattcctgtgtctctgcctggggtcttctctggctgtacttcctgacagagaaccaaccctaaaagtgtacccttgttaaaggattattttctcccaaaaggtaaaatgatgactttcatacaaaaataaaatgaatgagtatttacaaatttatttaactcattgcttgatgaggggactattaagatgttacaactggctcaaaggagaactcaaaatggcacacatatatctagaatgagagtcctgacatgaatttataaataaatgctatcttggtctattttctgttgctgtaacagaatacttcatactggctaatttgtagagaaaaggaatttatttcttacagttctggaagctgtgaaattcaagattgggcagttgcatctgacaagagccacatgctgtgtcataacatggtgggatcacatgtgagagtgttgagcaggtacttgcaaaagagaaagaaaacacaaggggtgatctctctttgtaataaccccactcttgcagtaactaattctgtctcatgatagtgagaactcacctccgaagcactgcattaatctcttcttgacagttgatccctcatgacctaaatgcctcttaaagtnnnnnnnnnnnnnacaatccctcaatgccattacattggggaccaagcctcaaaatgagtttttggtagagacaaaccatagcaggtacaaaactggtcactatccactggataacagtcagtcgtattcactgcattcctatgggcaaaatcatttacattgctatctattttctacaacttaaagaattgtaaaataattcaatgacgatgaaaggtggagctcacctggata

SEQ ID NO: 130664 - DNA, 2134 bp, Homo Sapiens
  misc_feature (546)..(559): n is a, c, g, or t
  misc_feature (580)..(580): n is a, c, g, or t
  misc_feature (589)..(734): n is a, c, g, or t
ccggggggcaaaatgttgtggcccaccatttgtttctgtatcagaacgcgccagccacaggaaatgtaagcccgagattccgtcgagccaatcccggatttgtttatcggcggcggcgggggcagaattaatttattacgcccaagggggcgccaagggtatttgagtgtatagcgcacgagtgcggtggggcacgggaaggtattaccgtgcccgtaggtgcacaggtggttttatccccacagaagggcgaagccagggcgttggatgggtatttattcaggcacacatcgtttccgcgataccgccgccccgcaggtgtgtggagaatggaaattaccaaaatctgggggcacagagggggtttcggtcttgtttgtcaggacaggtcccgcggaggagggcgggcgcagaagtccaatttttgtgattgggtgacaaggcgccttccgtttggaccctcccgggattttttttcggggggagagaccccagagcgttgtgttgtggatttggtttctgcgcgggaaggacgaagccgcgcgnnnnnnnnnnnnnngtgggtccacggcgcagatgnttgggttgnnnnnnnnnnnnnnnnnnnnnnnnnnnnnnnnnnnnnnnnnnnnnnnnnnnnnnnnnnnnnnnnnnnnnnnnnnnnnnnnnnnnnnnnnnnnnnnnnnnnnnnnnnnnnnnnnnnnnnnnnnnnnnnnnnnnnnnnnnnnnnnnnncatgcctcaaactattttttatttgcaactacatgatttcacacaattctcttaaacaacgacataaaatagatttccttgtatataaataacttacatacgctccataaagtaaattctcaaaggtgctagaacaaatcgtccacttctacagtgttctcgtatccaacagagttgatgcacaatatataaatactcaagtccaatattaaaaacttaggcacttgactaactttaataaaatttctcaaactatatcaatatctaaagtgcatatattttttaagaaagattattctcaataacttctataaaaataagtttgatggtttggcccatctaacttcactactattagtaagaacttttaacttttaatgtgtagtaaggtttattctacctttttctcaacatgacaccaacacaatcaaaaacgaagttagtgaggtgctaacatgtgaggattaatccagtgattccggtcacaatgcattccaggaggaggtacccatgtcactggaattgggcgatatggtttattttttcttccctgatttggataaccaaatggaacaggaggaggatagtgattctgatggccattccctcgatacattcctggcttttttctgggcaaagggtgccacattggaagaggtggaaatataagttctgaaatctggtacacaggacttgcggctgcagtcaccgaactgggtttcacttccatttccttacttgtttcttcatctgaagaagaggatcctgaatgataatcagaggtaaccttatcaagggccctggtaactttcctggagatctcatccttgttctcatctttattttcaaagctggcaacaatgaatgcattgtttttctctccataccgacagcacacctcacatgggtccacccagagagtgagctcctttggcaagcccaggtcactatacaagatgcagctgttttcacaggctttcaggacatcaggatcaactctctgaaatttattgacacgaatacatctgtaggcctgtcctttcgatggtttttctggataccagtgatttttatatttttcttgaagtattagggtcaatttctcagcaaacctctcaactgcctcttttttcaacttatcatgttttcgaactagccttgtgaaaaagaagacaacggcagcaatttcattcttcatttttttcccgccgctgccgccgccgctcttcggccggagattcggcggcccagaccgtgtcctggccgggaactgagggctccgcctcaacgggcccgcgctgggcaacagggagcgcagcgagcctcgtccggcgcgtgcggctcccgcgtcgtcgggcggccaagcgcgcgttgagaggactggcgggcggacgagcccc

SEQ ID NO: 130665 - DNA, 1020 bp, Homo Sapiens
tttatggttttttaaaaaagtttaatattattacagtcaggaggcagcggctggaagatactcggctctttcccccaagtccaggttcagtgcattggcccccacacagcaccccagcctcctgcctgggcaaggaggccctgcgctcagtccagcttctccagcacagagggcacatacaccaggctgagctcactgccaaagttgcagacaatggcagcgttgtccagcaccaggatctggcgggcaggctgggcctcactgttcttccccaggtagactgtctgtaacaggtccccgtagtttaggtcccaaaaggagacacagccctggccgccagtcaccagcaggttgtctgagatgacacccaagcttgcaccacagcccaggtcctgctgaatggagtagaacttgatgcctgtgctgcggtcccagatgctgatgaggtcatccaggccactgctgatgacacaggaggtggtacaggtaagggaggtgacatccccacggtgagcaaacacatggctgacccggctgccagtcagtacatcccacaggcagatggccccatcttgtcctccactggccagcaccatggtctggtcaatgtacacggtcgtgatggcccctgagtggccctgaagggtgaagaggcagcacgagtcctccagacggaacactctcagtgtgtggtcttggctcccagtcaccaagcgcccagcagcggctttcagggctgtgatgggtttttggtgtgcacagggcactgtgtgggtcaggtgacaggccactgtgtcgctgctgctgtacactggagaggcaggggaactgccccgccctggggtccctctaaactgcagggggctgagggcagtgtgggtctccaaggagaagaaatcaagggaaccgttgagccgtgcagccacaatccttttgtccaagaacaccagagcggtaatgcctgaggagacctcctcgctgctgcagcacagcaccccttcaatggcgtcccctcgtgcc

SEQ ID NO: 130666 - DNA, 949 bp, Homo Sapiens
ttttggagtccaagtctcttatctttattttaacagactggcagcatcaggtcgcagcagcagtacagggttcctggctgggcagcacaggcctggggcgacagctcctgtcttgtctgcccagggcagtgtcaacttaggcctctactccatggctgtgaaaggacagcagcctcaaggcagtctagctcctgggcacaggcagccaaaccccctcccatatccagctaaaccagctccaggaaaggagaaggtcctgtttccccggcatccttggggcccagggactggttctttcaccggatgatcttgcctggttgaaccacagcagcatttgggctttttcaccctttcctacatcaagaactttcccaaatgtgggccctggggccctagcaaaacagtggccttggccacaggctctgggcctctgggaggctcccatctggcatcaggtggcggcacagagcagggctgtcagcacgggcagagagctgggcacaaagagtagccagacggcagggcgtgccacagggctccgagggtgggtggcccttatggtagagaaaccagaaggtctggaaaagttgcatgtcgccccgcatgcgatataccaggttgtgccaggcggtaggcagtgtgttgggcagcccataggtttctcgagccctgtagagaagctgccagtgcggtatggctcccggtatgtttgcctgggtcagattcaggatgtaggtctcatggtccaggaccacgtgagagctcccggagtagtttccatctatttggtacacacggtaacctgcaaggatgtggggctgactggaggggcaaggagcaagggtaactccagggaggggccacacatcctgcccatgctttgcaggctctggctccaacctccttcccctatcccaccaactccaggataagggaggctcccttctgc

SEQ ID NO: 130667 - DNA, 1354 bp, Homo Sapiens
  misc_feature (58)..(58): n is a, c, g, or t
caccggatgatcttgcctggttgaaccacagcagcatttgggctttttcaccctttcntacatcaagaactttcccaaatgtgggccctggggccctagcaaaacagtggccttggccacaggctctgggcctctgggaggctcccatctggcatcaggtggcggcacagagcagggctgtcagcacgggcagagagctgggcacaaagagtagccagacggcagggcgtgccacagggctccgagggtgggtggcccttatggtagagaaaccagaaggtctggaaaagttgcatgtcgccccgcatgcgatataccaggttgtgccaggcggtaggcagtgtgttgggcagcccataggtttctcgagccctgtagagaagctgccagtgcggtatggctcccggtatgtttgcctgggtcagattcaggatgtaggtctcatggtccaggaccacgtgagagctcccggagtagtttccatctatttggtacacacggtaaccaggattaaggccgatgtaggtagttgcactgggtgccaggaaggctacagccagcgggcggctcagagtctcttcatcatagaagacctcaaattcatccacatgagtgtggccaaagaactgagcagccagggtgttctcatacctggctacaattcggtaataattccagctccagctcttcagacagtgccctgggggaatgtggccaattatatgcactttgtctcctcgatcctcagcagcttgaagctcccccagcagccactggagctgtcctgcgggatccgtggagttgatcaagagccagaagttctcacgggaacaaaaattcatattgagagagatgaggcggagaccggggtatggggaaagagcatagaaccccccaattctgagggtgcgcagggcttcggcaggcagccagggctcccaagccttggccatcgcttcatagagccagcgggaggagtggttgccctcaatgaaggggggagggaagctattgacaggtgtgctttcatggttacccacagcagggtacactggcactggccccaggaacttcctcacaagtgctgtgacggtggtcagggcccgcagttggtcctgacgagtctggtgccagacatcatgtgcggggatgtctcctgtccagtacaccatatcaaaagggccggctgggcccagcccactcaacaggctctccagggtcctcaggggcaggtcacacttgctgtattcgccccagtatccggcacctggccgggatgcgggcggcaggccagaaccccggcggcagcacagtgcctcgtgccgaattcgacacccagcctcgtacctagcct

SEQ ID NO: 130668 - DNA, 905 bp, Homo Sapiens
  misc_feature (793)..(827): n is a, c, g, or t
aatcgcgtcgcaggggtaaaaaatgtatgattagcgcatagataccctaggaatattctgttagttcaaagagtgtgtgttcccccttttgatgatgtctgccactttcttgctgagacctttcctgtatagtcatttggcttctattgcttgtgaacttctcttgatactccagcggcagaaaccagtttttctgtgttgcaccccatgcaaataatcttttttatactgtggggatgggggagcactttcgtaatttgtcatcagataacttcgacaggttatgtcttttccttcttgagttgcaactttaacttctattacaacatacattccacttttaaccccttcttgctcatccagagaatttaaattgcttttgttcattttccatactactccccacacttcatcgccaggactctgaaaaatggtggctatccctccatgccaagtttgacttgttttgccttgggaattgccaaagtcaagcttaaaatcctgcaggcgggccacacagaagaacgccgccgaggggtttcggaggtggatcctctctgtcagcaggttgctgccgtaggcaaagtacagagaaactctcctcatctggacccgtgacgtccttgcagcccgagttggccatatcccactacgcccctgcactggagcctgaagcaaagtgtaaggaacggccagagagcgcaacactggggcccactaccccggcgcagtgaccgccgcccccggccgtaatggccgaattcccgggcatatgtccggtaccgtcgactgnnnnnnnnnnnnnnnnnnnnnnnnnnnnnnnnnnncgccgcttcctcgctcacatgactcgctgcgctcgtcgttcgcttataagccggagcgcccatagtagtatcaagttt

SEQ ID NO: 130669 - DNA, 1173 bp, Homo Sapiens
ttttaaaccacaaatacgtttattcctctaaaaacagtataccatctttccaattttcaaaatgttattatcaattgtctgcagattactctcattaagctgatttttaaaaatctcagacagagcagagcaattcaccagcaccatcatcaagtgagctacaaatctatcttttaccagagcaaggagacacttaagatcaattcaagagaatagctttcagtgttcacagaaggggtactcacattcatttgtcacatatttcaggccctcatacaccccttttaaattgtctaactcctatcccagtttctttttatagtctaaaaacaaggaatcacccaagtaagatactccttcagagcactgctgaaaatggatcaaacgtggagatcccccagatccctgttctcaagtgttaaaaatattttatattagcacatagaatacccttagatatattctgttatgttctaaagagtttgtgtttccccctttttgatgatgtcttcaatttcttctgagacctttcctgtatagtcatttggttctattgcttttaacttctcttgatactccagcggcaaaccattttcttttgcacccatgcaaataatctttttatactgtggggatgggggagcactttcgtaatttgtcatcagataacttcgacaggttatttcttttccttcttgagttgcaactttaacttctattacaacatacattccacttttaaccccttcttgctcatccagagaatttaaattgcttttgttcattttccatactactccccacacttcatcgccaggactctgaaaaatggtggctatccctccatgccaagtttgacttgttttgccttgggaattgccaaagtcaagcttaaaatcctgcaggcgggccacacagaagaacgccgccgaggggtttcggaggtggatcctctctgtcagcaggttgctgccgtaggcaaagtacagaaaactctcctcatctggacccgtgacgtccttgcagcccgagttggccatatcccactacgcccctgcactggagcctgaagcagagtgtaaggaacggccagagagcgcaacactggggcccactaccccggcgcagtgaccgccgcgcggcagcctctagggttaggggactggcgggaag

SEQ ID NO: 130670 - DNA, 776 bp, Homo Sapiens
  misc_feature (206)..(296): n is a, c, g, or t
  misc_feature (319)..(519): n is a, c, g, or t
  misc_feature (555)..(660): n is a, c, g, or t
  misc_feature (728)..(728): n is a, c, g, or t
  misc_feature (756)..(756): n is a, c, g, or t
aaagattaacattttctttattcacatttcttttatttggctttattacaataagcctgtattacatttacaattaaagtccaacaaacttttaaaaaatgtacaatatgaagcaatttattttaaagacatatcttataaatgggaagacatcctatgttcatggataggaggacttaatattgtttagatagcagtacttgccnnnnnnnnnnnnnnnnnnnnnnnnnnnnnnnnnnnnnnnnnnnnnnnnnnnnnnnnnnnnnnnnnnnnnnnnnnnnnnnnnnnnnnnnnnnatttgagagcaccagaatagttnnnnnnnnnnnnnnnnnnnnnnnnnnnnnnnnnnnnnnnnnnnnnnnnnnnnnnnnnnnnnnnnnnnnnnnnnnnnnnnnnnnnnnnnnnnnnnnnnnnnnnnnnnnnnnnnnnnnnnnnnnnnnnnnnnnnnnnnnnnnnnnnnnnnnnnnnnnnnnnnnnnnnnnnnnnnnnnnnnnnnnnnnnnnnnnnnnnnnnnnntaatgggacaagtagacatctacaggcaaaagaatnnnnnnnnnnnnnnnnnnnnnnnnnnnnnnnnnnnnnnnnnnnnnnnnnnnnnnnnnnnnnnnnnnnnnnnnnnnnnnnnnnnnnnnnnnnnnnnnnnnnnnnnnngtatacatcttcctgaccttggattagatgatcttttcttagatatacaccaaatcacaagcaaccanagaaaataggtaattgaggctttatcanacttaaacattttttgtgcc

SEQ ID NO: 130671 - DNA, 519 bp, Homo Sapiens
tttttttaatatataatagacaagtttatttgttcacctaaagtagttttaacagcataattctataaaaatgaacactaatggaagatttatctaagccatacaaaagtagtttaatggaaaagacccagtaatttaaacgttttcatataaggaacatgatgcacactatgggatctatgcatcaccttcaaaatgtaggaaggtgtattaatttcacatatttaatgtattatataaatgtatttaacaacctatcaacttctgacattctgaagaattaaaatttaagtctaatgatgataaaatgcttcatctatgtcttctcaaggtcaggacaactgcctaggccagggagactgagctcccctgactcatgggcaggcctcgaccccgctacactggcctcatgcattactctaaatcaaagccttcgatatacatgacttaggatcaggaataacagagaagatctcagcaggctccatgttctctctactgtacctgacaacagtataa

SEQ ID NO: 130672 - DNA, 887 bp, Homo Sapiens
ctgtttgggcactttttgtttagggtttatttttactgctgtgttggcaaaatactgaaatgcagaagatggatgtgtcccagaaaagaagatggtaattatggggaagcatctgctgtgatatagttatgtttgtatgtgttacatctatcactgtaataattgtaagcaaagacagagagttttgtcttcattttgtgatggatggctctttcctttgcagccaaacagggaaaaagttaatggcgaagtgtcgaatgcttatccaggagaatcaagagcttggaaggcagctgtcccagggacgtattgcacaacttgaagcagagttggctttacagaagaaatacagtgaggagtttaaaagcagtcaggatgaactgaatgacttcatcatccagcttgatgaagaagtagagggtatgcagagtaccattctagttctgcagcagcagctgaaggagacacgccagcagttggctcagtaccagcagcagcagtctcaggcctctgccccaagtaccagcaggactacagcttctgaacctgtagaacagtcagaggccacaagtaaagactgcagtcgtctgacaaacggaccaagtaatggtagctcctcccgccagaggacgtctgggtctggatttcacagggagggcaacacaaccgaagatgactttccttcttctccagggaatggtaataagtcctccaacagctcagaggagagaactggcagaggaggtagtggttacgtaaatcaactcagtgcggggtatgaaagtgtagactctcccacgggcagtggaaaactctctcacacaacaaatcaaatgacacagaactcccagtcatgacccctcaagagggagaaaagcagtggagtg

SEQ ID NO: 130673 - DNA, 663 bp, Homo Sapiens
atggggcagcgggggtctttattcgtcagattttccttcttggcctactccccaggtgtggccagggatagtccatacagtgtggctactgccaaggtcaggatggccagcagacccagtggggccagcagcccctccctggatagggctccagggtccttcactggaggaagatccttggtacccctgctctctccaaggctgggactagtgttcctggttgtggccaggtgtgcagtggttgtgacagcagatggtcttggcttggtcctagcagaggctgtgaccccatacatgggcctgatggtgccgaaaggcctggcgtgagcatccacccaccgcagcagggcctgtggtctccactgacagatgctgagcagggccaggacatcaccctcagccgtgtgcgagtctggaggggactgcccatacaggcgagtgtagatgctgcctaggctatagctcttccttgggccgtgttctgaggggctgcttgctcgctccagggccttcagcgcagtgatgctatccacacagaaggcaccatccagagcactggtgaggcccagcatagccagctctgcttggagcagggggaagtcgtagcggtcaccattgtgtgccaccaggcaccagggctgtggctggcgccgcaggaaggct

SEQ ID NO: 130674 - DNA, 1135 bp, Homo Sapiens
ccgtctaatctaaagcatcttgacagaggcatttgcgtgaaaagttagtcttctttttaactctgaatcaggataaaatggttaatttgcaaagagtacagttttaagcaagaatagagtgaaaataagtgtgtaaatatggcgatttgggggagttctacctaaggttctatgtaaagcttccattcagatgcccaaaagcacaaagagcattcccaatagaaacccgaccataacccggtcccaccttcctggcataattcctttcctcaaacatctgccacctgaggctaagcctacacacggcgtggctgagtaacagggtaagggaatagggagatcgtttcctcaagactggtgcgcatcaatctgtgccataatttaagtagaaatgaacaggtgtataaaaaagtataactgtacacagcctttaaattaaaaacctcaaaatcttcactcaaaatgggatgtaagcttgttcatttaagttgcaggtgatggactcgtcagagagagtaatcagtggaacaagatcagtgtaacccaccattgactcggaaaggagagacaaagtcaagaacatagagatctatgataggccaacaggcacagtgggcggggaggggcggctatttctgttgttctgcgtcttcctgcgctcagatccctccagctgcactcggaaaggtgccgagtcccaggcgaaatgaccagctcatctgccttccaggaacaccatgaagccaagagcaatggaaccatcatctcttgcaggaaaaggagtggatgcccacgtggctggctgaggctcctgggcccgccgcctccgtccccccgctggcctgtccccgactcatcactggatcgcctccacataatttgccgggtataggccaacttgcccgttgtccaagcgtcccttgcaccagccctgctcatcctcgtcctccatcttggtcagctcatccccagccttgaagctcagctcatcatgctcctgcccctcatagtcatacagggcccggactcgcacttccgtccccgaggtggcgtcgtcgtcgaatggattcgagtccccattggcatccgtggaggagaaggggttgttagactcatcgtctgaccagtcggtggg

SEQ ID NO: 130675 - DNA, 1052 bp, Homo Sapiens
cagtgggcgatgtttttaatgaagggcatagggtgtcgtctgcattgtaccatccaaaggtgtgagtagggccaaatggagccttgggagactttttatcctggaaagtctatgaattcatgaaatccacattactgtcattacagggccaccacaatgggcaaaagttcctcatggggagaccgcagtgttgtgtgcagtcccaatagtgtgataccaccagggggtgctgcccagctggtctctgccccaattctcagcaaggctgaggaaggcagaagtgagagcccttggaagacaggtttgacccctaggctggtggggcgtgggcagccagcctggacctggaaggtctgcaacctggcaggctgacaatggcaatagcagggactccacatcaatcggcctctttacaatttgtcgcctgttcccacacacaccattccatctcaagactcaagagatgatgcccagatagtgaacagaggctcagagaagtcagggagctgctcaaggtcacacacctggtacgtgacaaggtgaagatccctctgggcttgcctgttgccaactctggggccctggcatttggccagcgggagaggcagcatgttgaggagaaagagcctgtctggaagcctgtagcccggcttggagccctgctctacctccaccctgcatggctgatcattcctatccaatcccttcgcctcctcctgccccatgggatctcggtgaccttctcctctatttggggggaagttggcacggggcttaggatcagtatgagtggatcctttggtattcagccaagatgtgattttcccagacacagcttggcctctttaaggacaaaattcagtcctgctagagacttctcacacaacctcaccagccacgggcaccccagtcttcagctacacccaagtctgggatgcaagggggccttagcagctggctgacccaggatgcccaaggtcaccattccctagactctaggcatcatgccacatgctgcacatgctgcgtctttgagtccttgcagtcgtgtg

SEQ ID NO: 130676 - DNA, 1031 bp, Homo Sapiens
  misc_feature (823)..(823): n is a, c, g, or t
  misc_feature (825)..(825): n is a, c, g, or t
  misc_feature (941)..(941): n is a, c, g, or t
  misc_feature (963)..(963): n is a, c, g, or t
tttttttcttggaagagctttattgcttccatgggggtggcctgggacggctgccacagcttgggtaagctccttgggcctcacttccctttggtccaggctaaaggcagaacccaaccacctggcagtcttgttgctgaaacctagaacatgtggcaagttggtgagtccgggcctgcggtagtcctatgcatcagctgcagctgtggaggggagctcttcccagcaggcggagctgggcgtcaccctcctgagctttaaagttctttctgctatagccctggggcggtcttgttggctccgaagggatggctccagggtttccccatgggacagctagggctggtgagtgggaataccccgccttctccccaagaaaggccaaacagtgtcatgagctggagggggctggcttgagatcctgcccaccatcctgtagccccacagcaaggtacaggctggtcctggcactcctgccccacagggagctaacaggtaacactgcctgatgggccctctagtgggcctcttcctgcatggcaagtgaacccaacttgacatctccaaccttatttaaaaataaattatccctaccctcccccctacccaaattcacaaaatgataatacaccaaacactgattggagaagtgattccggcagcagccttgctgcccagtgtcccaccacctgcatgctgggcctgctgggcacagccaggagcctgctggccctctggcatcaaggacccatgctgaatgaggctgagtgctggtctctgaaactggctgctgagcaagacagctctggctgctccaccaggncntgctgccctggggcccttggacgtcttctctggtctgaaactctgtgtagtggtgctgctgctgctctggtggtgcctggctctatgccagtgctggtcactccatgcactgctanatcatgatgagcgagcttccancttcgcagaactctctccgctgatatgtggtcagacgaacgaaaagaatatcattggcttgccacctt

SEQ ID NO: 130677 - DNA, 850 bp, Homo Sapiens
tttatatatatagtccttaataggctaaaaacatcccttcataggttctacaataatgtttccaaactgttgaatccatgcaaagatttatctttgtgaaacaaattcacacactaaaaaacattttaacagatcacttgtttccagtttttattataaaatatttggtttcacatgataggcctcaatgggctgagaaatgttcattcatatattctacaaatagggtgtcaaaactgtggaatcaaaataaaagtttaacactgaatccacacatcacaaagcatttttacaaatagcttctgtctactttttattgcagggtattcagtttctcactgtaggcataaatgggctcagatatgtttcttcctagattctactaaaatagtgtttcacccttgtgagtcaaaacagaggttccatttgatgagaaaaatccacacatcacaaagcattttcacagatagggtgtttctagttttatcacagaatattcagttttccactgtaggcctcaatgggctcagaaatatttctttgcagattctgcagaaagagtttccaacctggtgaatcaaaactcaggtttcagtcagtgagatgaatccatacaccacaaagcattatcacagatagcttccctctagttttcattgtgggatatttgatttttcattataggcatcaatgtgcttagaaatgtccatttgtatgttctacaaaaagagtgtttccagcctgagacttctgtcattaaatgtgtgctaaataaatgccgggagggccaacaagtcagagccgtggctgacaggactcttcttggagtctgtaagtggcctggatgctc

SEQ ID NO: 130678 - DNA, 566 bp, Homo Sapiens
gcactttccccctcctcttcccatattcatttttctttttccctttaaataggccactggaagctgcactgtctaatttttcataggtgatcgactgctgagcgggggcttaggtagacagagggaaggtgctgataagccagtgcacggattctattagggaaatgcggtggtaattaatgaatcctgccagtaattgggaaggtgtgagtccccgtaatatcgtaatgatagtcatctgtctgcgaaccccccatcactctgagagatcgctcatcgctctgtgatctcagactcttagccatgcaaatctccctgacaggacgctatgtctctgtctccctaattgggcattctagagttgtttatggatattgccggcatttaggcctcagttggaggttgttcaaaaagcgttagcaaacttgccttaacaacattgtcaaatatgtattcccccgtttcgatatctgtttttaagccggcagaggtttgtgatgaaattaagtgatgcattgtgtgcacttgagctctgggcgtgattgttattaaaccgtttttgaagt

SEQ ID NO: 130679 - DNA, 2201 bp, Homo Sapiens
agagagtatgaagtcgacggcgcgccgaattcggcacgaggcgtgctcacgcccctcgaagactgcttcatgctggacgccagcaccgtgctggacttcggcgtcctggccagcatcatgcagagcggccacacgcgcatcccggtgtacgaggaggagcgctccaacatcgtggacatgctctacctcaaggacttggccttcgtggatcccgaagactgcacgccgctcagcaccatcactcgtttctacaaccatccgctccacttcgtcttcaacgacaccaagctggacgctgtcctggaggaattcaagcgagggaagtcccacctggccatcgtgcagaaggtgaacaacgagggtgaaggcgaccccttctacgaggtcctgggcctggtcaccctggaggacgtgatcgaggagatcatcaggtccgagatcctggacgagtctgaagactaccgagacaccgtggtgaagaggaagcctgcttctctgatggcccctctgaagcggaaggaggagttctccttgttcaaggtgtctgatgatgaatataaagtaacaatctcgcctcagctgctcttggccacccagcgcttcctgtcccgagaagtggatgtattcagcccgctgcgcatctctgagaaggtcctgctgcactgttgaagcatcccagtgtcaaccaggaagtgaggtttgacgagagcaaccggctggccacacaccactacctgtaccagcgcagccagccggtggattacttcattctcatcctgcagggcagggttgaagtggagatcgggaaagagggtctgaagtttgagaatggggccttcacgtactatggagtgtcggccctaactgtgccatcctcggttcaccagtccccggtgtcctcgcttccaggcccattccgccatgacctgcagcccgacccaggtgacggcacgcattcatctgcgtattgtcccgactacaccgtgagggcgctctctgatctgcagctcatcaaggttacgcgactgcagtacctcaatgcactcctggctacccgagcccagaacctgccacagtcccctgagaacaccgacctgcaggttattccaggcagccagaccaggctccttggtgagaagaccaccacagcggcagggtccagccacagcaggcccggcgtcccggtggaaggcagccctgggcggaacccaggcgtttaacggctcactaggcagccccagatctggggaacagatgagcacgtggggagctggagtgagctgagcagaagtttttgtgcccgcctgcccccatcccctccaggccacgttttagcatggcccttgtagttgcgggtcctgggtgtcctcagaactagacatcaatgcctggatccttcagccggcctgccctcctttaggagacaggagtcaccagggcacagccctccaggcccgcctcaggaaggaatgaaaggaatgccatcatctctagttcccagggccagccttccccttctcccccggggcaggacagtgcggcatattcagattcagacctcttgggctgagccaccttgtgagtgcagttactgcctatgtgtggccgtgacctctatttgtttgcttttaatttgccaacctatcggtgctggcagcactttttgagcaagccgagagcacccattttggctgggggttcagatcgatggccttgtccatgttgtcctttctggcttccctgatggtgtcatgtttcagcgcatgcgccccagcctttcccatgtgccaaaccagaagctccactgcccgtaggctgtccctgtagccctgctccctccctggaggctgctcttctgattctgagagctggcctagtggtgctgagggcccctttctgcttctctgcccacctgctgagttgccactcgcagtgttgtcagttcccgtgttctgagaagaggtcatgcctgggaggaagggatcgtcatgctgcatcgaatcctctctccgccgtgtggcccccaggagagtagctgcctgttgcacctgctccacacctccccacagcctccctgcaggtgctgtgtggccgtgatgtgcagagagcagtgagggagggttcatgaaccaggtggatcctctttaaaaaaacaaagtttttggtatatctccgttacaatcacaagaactggcctttgg

SEQ ID NO: 130680 - DNA, 1167 bp, Homo Sapiens
  misc_feature (41)..(81): n is a, c, g, or t
  misc_feature (84)..(118): n is a, c, g, or t
agatgatagactcactatagggcgctaggtcggtcgttagnnnnnnnnnnnnnnnnnnnnnnnnnnnnnnnnnnnnnnnnncgnnnnnnnnnnnnnnnnnnnnnnnnnnnnnnnnnnncagtcgacggtaccggacatatgcccgggaattcggccattacggccgggggaaaacgtatcacctttcccagattctcggattctcgactctttgcaacagcacttgcttgcggaactcttcctggaatgcattcactcagcatccccaaccgtgcaacgtgtaacttgtgcttttgcaaaagaagttgatctgaaattcctctgtagaatttagcttatacaattcagagaatagcagtttcactgccaacttttagtgggtgagaaattttagtttaggtgtttgggatcggacctcagtttctgttgtttcttttatgtggtggtttctatacatgaatcatagccaaaaacttttttggaaactgttggttgagatagttggttcttttaccccacgaagacatcaagatacacttgtaaataaagctgatagcatatattcatacctgttgtacacttgggtgaaaagtatggcagtgggagactaagatgtattaacctacctgtgaatcatatgttgtaggaaaagctgttcccatgtctaacaggacttgaattcaaagcatgtcaagtggatagtagatctgtggcgatatgagagggatgcagtgcctttccccattcattcctgatggaattgttatactaggttaacatttgtaatttttttctagttgtaatgtgtatgtctggtaaataggtattatattttggccttacaataccgtaacaatgtttgtcattttgaaatacttaatgccaagtaacaatgcatgctttggaaatttggaagatggttttattctttgagaagcaaatatgtttgcattaaatgctttgattgttcatatcaagaaattgattgaacgttctcaaaccctgtttacggtacttggtaagagggagccggtttgggagagaccattgcatcgctgtccaagtgtttcttgttaagtgcttttaaactggagaggctaacctcaaaatattttttttaactgcattctataataaatgggcacagtatgctccttaacctcgtgc

SEQ ID NO: 130681 - DNA, 1085 bp, Homo Sapiens
  misc_feature (172)..(172): n is a, c, g, or t
  misc_feature (187)..(187): n is a, c, g, or t
  misc_feature (253)..(253): n is a, c, g, or t
  misc_feature (290)..(290): n is a, c, g, or t
  misc_feature (310)..(310): n is a, c, g, or t
tccggggcccacccaagaaggaatgaaggggggtcccttcggggttgtacaagtggggaggaattttcccgcctttcaacatttttttataaaaggtgaagtttccaaaaggttggctgggagccccatacatgcaagaaaccatgccccaatgggccacgtttgccacggncctgcatcctggcgnttgaagggccggcagagctccgtatagatgggcagcacctcagggtgggcagacaaaagcaaaagnccataatggggcactgtgtaggacatctgtgagtcanctgtgaacatctgggctcancagctgctgtgagtcccttggctggggagtcccacgagagcttcactctccattgctgtttcattgtggcctatagcacagccaagttggaacttcttgtagatgaccgaaactaggaaaaacagcatgcaggtcagagagagaccactggtgtaccccaggtagcccaagtgtttcatgagggcgaggggcaggatgattaacacactgacgatgatgatgaggaggtttcccttcaagaaccagtccccctcggggtccatgtacaggaaggtgccgataaccagggggagctcagatttgatgatgaacaggtaactggacatggccccaacattgtgcagacagatgactgtggccaccactaccttccccgcaggcccgaatgccctctgtcccagctgctcataggctcggatgcctgcaataccagcacaggtcagcaggaggtggatggagtaggacgacagaagcgcaatgcacagcagcagggccaggaagaagatgacccccgtgtgggccatggcataggccagccccaggatgccgctgcccatgatggcgttgctgaggttgaacactgacattccaaacgatgtcttcccctcgaaatccatgaactggaccggcttgctcccaggagcaggaccacgactgggcaggaagccctcacgttcttgcctgtagcccacagcatccgaagggagggctccattcatctttggatcctgcagttccatcctgctcctctcagctcctgaagtggccctcgtgc

SEQ ID NO: 130682 - DNA, 521 bp, Homo Sapiens
tttcgctctttactttttattcactcacacccaggttctttccacaaagggttcaaggtagttacaagaattactactgtttggcgtttgctgaaagaagtacgtgagaatattatatgctttagaaaccacagagtcgaagcctgtcatcgtcctcatagaccaatgagtagccacacgtacttgtttggcattaccaagtgtccgggcaaggccgcagcctgcagctcaccagccgtgctgctcggcctgtgcacgtcaccggctcttccctagggtagcttttgcttgctttctcccacgtccatcctctctctctctgactcacagccagccaggtttctagccttgtcattcctaaactactgcctcaagccaggcgggcgcacacaaactaaaatgctaatctccacagcggtgtctggactaatggtgtcccccaccgtggaatgtatgtgagctaaagacaggatctcagcaggcagcctggactgagatcctgtcgggctagtcgggggggt

SEQ ID NO: 130683 - DNA, 916 bp, Homo Sapiens
  misc_feature (619)..(661): n is a, c, g, or t
gaaaggcacaggccagaggaaggacagtgttgacccacatgtcattggtgaggttatgatctctttgctattatcacctacttacccacctgaggctcctaggaaacaatgaatgaaaggtatagaaaaaaattaggaagtaaacagggcttttttcccctttatgaaaaaaagtacacagaagtgttgaaacgattcaagtttaatttgttgatatatgtgtgtacttagacaaacactaaattctacaacatacataatgtcaacatgggaaaataccaagtttgtcattgcacataccaataaataaatacatttgctccagaataccaaagtttattcaaaaagtcaataaaagcacagttttgcaaatttgtctaaaacgccagataatcttgaacaaaaataaaatgtctgaccactccaaaataggaaaagacaatcttgtgcaaatagacatacacagtctaggcattgtggaaactggctgtgttcccagcaagagatactgcaccctcctgaccgagcagtcaggcttccctttcctagccatcctaagttgcgttctaggaaactctggatctcagcctcatctccagctttgcctggaccttgctannnnnnnnnnnnnnnnnnnnnnnnnnnnnnnnnnnnnnnnnnntgtgatgtctttcttaggaaagaaaaaaaggcacagtgatgagctataaaggtagtgatgagagctataaaggtagtgatgaaagcaaggaataattttcattcaccccaaatcctacggcaagctttgacaatgtaacatctttatcttgtggttaggaaaatggacctagagagattatgtggtttgctcaaaatcacatagctactaagtgcagtagtgctttctataagacaacttgcctttccacttggt

SEQ ID NO: 130684 - DNA, 1022 bp, Homo Sapiens
ttttgcgtgggtcattctgatggtggctgctgtcagcatccaagtggcttatgggataggacaaccccccaggcacttcactgtaggacagttagcaccaagagctaaggttgtgagataatgcaaatctggcctgtcacctctgcagagtacaggttcccatactgtgaggcagcagccagagagggaaccaccagagaaacagcatttcagaattgtctttcctttggtgtatggatatgtgtgtgttctagtctttggtgggcaatggaatctgcagctccatgacaatcttgttaagtagcttatgtgggaagtgtttcaggtcacaagggccacccattctaaggcttctcatttaattccccaggctaagagacaggtggggaaaggaaaaaacctagcaccttgctatactgaattggaatcagaaggcaatcaatgcatattacctactttctggccaaatcaaatgaggataaatcaaagctgagtcaaaagctgtttttactatgaaactccacctgctaaattcaaatatctaccactctttctatgggtgaaaaaattccagaagatttgttatctcagctgaaatgtctgaagatgagtaactaatgtggatttttctgccttcacctagaaatggttgagttgggaggtcctaggcaacagaagtgtcaatctcttattcaaagaaaaacaccctacctggtgggcagaaatggacctgcacctacagagataccacttctattactctgacatgttttacagagaacacacatttcatttgtcaaatctttacaggacatacccgaccagtattacagccacagacaccagtacgagagcacctcatctcagggtaggaattgggtgaaaataatccgttgtcaagttcaatgatgaactgccctctctcaaatgatggtgagacaaggaaagttctctcttcacattcatgtccataggggcacggcatcatgggtacgttggcccagttggctccgttggatccg

SEQ ID NO: 130685 - DNA, 803 bp, Homo Sapiens
  misc_feature (18)..(18): n is a, c, g, or t
  misc_feature (39)..(39): n is a, c, g, or t
  misc_feature (117)..(117): n is a, c, g, or t
  misc_feature (713)..(727): n is a, c, g, or t
gagggcgattcagtaatntcagcattaatgggaaacttntggctcaaatggagatcaatgattcaacacgggccattctcctgagcagtgacggccagaacctggtcaccggagggnacaatggggtagtagaggtctggcaggcctgtgacttcaagcaactgtacatttaccctggatgtgatgctggcattagagcaatggacttgtcccatgaccagaggtctctgatcactggcatggcttctggtagcattgtagcttttaatatagattttaatcggtggcattatgagcatcagaacagatactgaagataaaggaagaaccaaaagccaagttaaagctgagagcacaagtgctgcatggaaaggcaatatctctggtggaaaaaactcgtctacatcgacctccgtttgtacattccatcacacccagcaatagctgtacattgtagtcagcaaccattttactttgtgtgttttttcacgactgaacaccagctgctatcaagcaagcttatatcatgtaaattatatgaattaggagatgttttggtaattatttcatatattgttgtttattgagaaaaggttgtaggatgtgtcacaagagacttttgacaattctgaggaaccttgtgtccagttgttacaaagtttaagctttgaacctaacctgcatcccatttccagcctcttttcaagctgagnnnnnnnnnnnnnnncacgtttgatactttgtacatcagatgcatcttatttaaaagggatacttttgtaaaagtaaaaccttgtataaag

SEQ ID NO: 130686 - DNA, 413 bp, Homo Sapiens
tttttcactacttagttccttttaaataaaataaagacaatccccaaagtggattatgcagaatagacaatgagggccgtttccccatggtcgctgttgccccagatccctgccagatggctcggcagaggagctcaggtttcagcaaattgcagaacctcattaggactcgatttcatgtttttagatgctgtaggctctacatcagatgatgatgacttcggaaaccaaaacatctcctaattcatataatttacatgatataagcttgcttgatagcagctggtgttcagtcgtgaaaaaacacacaaagtaaaatggttgctgactacaatgtacagctattgctgggtgtgatggaatgtacaaacggaggtcgatgtagacgagtttttttcaccagagatattgcc

SEQ ID NO: 130687 - DNA, 1158 bp, Homo Sapiens
  misc_feature (1019)..(1056): n is a, c, g, or t
tgatgtgaaaaacatttataatttcttgtagttacagtgtgtatcttcattataatcattcttacaataaatacagaagtgctaaacagaccattatcacagtggcctgtgggctgaggcacaggaactgaggggtgctgcagacaccagtgcttctccagggctggccaggacaccttcagagaggctagtgaagaggagaggaatgtagggtgaatttgaaatgtgattaatagagtcaatgcagcacatgctagaaacagatacagagttttttgttgttttttaactattttaccagatgatactaactaaacaaacagaacaaagaaagagattcaagatctcacatgagtgagaatccagggccttcccctctggccctggccccagcctgggccttgtttttgctatttccacctaggcatctgccatgcagcagagttaggagcgtgtgggcggctgctgagactcacacaccacagtactggcatccttcaggggcagctggcatcagtggaatgagtgcggatccgaagaaaggtttcccagttccaaagctggacccacaggaatcctgtgaggatttgcaaagacattgatagtgttggttcttggagcatctttctgcctcccgggctttgtctggtctcagcctcggggctgcaatccagggctgtgctgagcagcaagaggagaggagaaatgccactgtcttgcacctcccagtaagtctcccttttcatgaagagcccttgtgccaggtacaatggtctctctgttctctcacaaaactcatccacaaaagatatacagagtcttttgacagacagtcccactgctctggagtcctttatgttcatttctgattgacaattttggaccaaggccaagaggccccctaattcatgttgcttcgtcatgagggttgtccttgtcatctgatgatgcatgaggcatgctaatggcaaggccgggatgccaccccaggcttcgaggctgttagaggtcttgagtgnnnnnnnnnnnnnnnnnnnnnnnnnnnnnnnnnnnnnntttgagctcccattaggtcacttgtaactttgcctagcaaaacaggctcccaagacataaggcttgccatcgttgtgaaaagttgtgatggtaccagaataa

SEQ ID NO: 130688 - DNA, 3242 bp, Homo Sapiens
  misc_feature (285)..(297): n is a, c, g, or t
  misc_feature (463)..(472): n is a, c, g, or t
  misc_feature (643)..(735): n is a, c, g, or t
  misc_feature (1089)..(1099): n is a, c, g, or t
tgtttgtgtcatagccgacacagggggggtggaaaatattatttattcgtttacgcatgaagctaccctgaggatccagtgtgtttgtagttattatacgcacggcgggggcagaggaagatatggatgtggtgtgctttatacagtacacaccgcctggtggttgaaggggaaaggtttttcccccacaacaggggggggcgagaagatatagtggtgcgaaataagggaattccccccacgccactttttttggtgaagggtataggggacccaccgagggannnnnnnnnnnnnaaaatgatggtaaaataataggaagggccgcccccgcagggaaacacccccccgcgtgtgaggggggacttccccgggaaagggaggcccctgaagagaggcccccctttttggggggattttgttatcaagaaacaggccctgggtgtacccgccccggggcggnnnnnnnnnnattggggggggaagtcccaaccgccgttgttccaatagcccgaggtttttttcttgggagaaacgattggggcccaagggcccctttaccccttgggggggccggggcccccaaaaggaaaggtttttgaaaaatttttttaagaggcccgaggggggccgcccagggttnnnnnnnnnnnnnnnnnnnnnnnnnnnnnnnnnnnnnnnnnnnnnnnnnnnnnnnnnnnnnnnnnnnnnnnnnnnnnnnnnnnnnnnnnnnnntttttaggattacacactttaatctgattgacactgaggaagtagggaggacatgaaagaaatttagttttagctctgctttatgcataaccagatgctccttttctaaaaagtatattgaggttttaaaaaacacatttatcagaatacttcaggaaaccatactatgtgtaatccaggaaatacactatttgcaggataggaaaatcatcactggcaacaaaagattaaaacaaaaataaagcaccaggttctgagcagttctaaggtgagtatatcagcagaaatagtgtaaatgctcttgactggttgctatgcaaacatgctaatgaggactagtccatgtcttataannnnnnnnnnnaacatgtttctttggaaaaatggcaatattgagtggaagagaagctgtccttttagacacccagcttattggcctgggtgagaacaactttgagaactggcatgaaagcagaggtctcactgaagttgctggtgctaactatgtgggtatgcatggtcaatccttctgagtagtttcgagtttcaatgctccttgcaatgttgtgtaaaccactggtgattgttggtgaaagtgtctgttccctaagtttatcatacagaaactccaaacgtttgctggcatcatctagcttcctcttggtttgagggtctgttgctgaagaaaggcagcgctgaataagatcctcaaatgtggtctttagaatgaggtgctcatctggaataggtttcttggtaattttttttgttggcaaagactgcacatgctggaaggtatttccaataggagcccctggggcaccttcaatattgggctttgaaaaagatggtggcatgcctgtttgaccaagaggttgctgtacgccatggaagggctggccacctggaagatgtggctgtgggaatgaagactggcttgacagtggtactggagctgaaggctgttgctgcagcatttgtgactgggggtcacccaacgggttcatgattggtgatgtgatgggaacaggaggcatgaagttttcaggcatcttcttctttttgggtactctgttcaaagctggagggtcattccaaccattctgaggacctgttctttgggacgcaggcagctcactggcagcaggcagtgtacctgttgttccaggaggcagtgcataagctgaagatgatggtggagctcctggtccgccatgctggaaggatgctccagaggaagggggaggagggaaagaagtagcagggctggaggtaggtgaagaggcctggtgctgtgctgcgtacagctgagactgcccagtataggaagaagcagaagatatgtaagggggtgttagggtaagcgtttgaagtaggaggagcaacaggctgctgaggtcgatacattgctgacccccctgttccgaagggatacggctgggctggttgataaggctgtggctgtggataaggtggtacctgggtgtgcatatgacctggagatgtgggaagctgaccagcagcatttggattaacatttccatgcattatgaaacccggaggtggaggattttctccatggggataatattgttgagtttgaactcttggcatctggtggtggccagcaactggtccaggcctgcccttggggagctgctgtttctcgtacggaattttaggtgattcatgtcctgctacaggctctccttgtgctctacaaagtctgtcacgaagctgcatgatatttggctggttggtgttgtcaggaagaaaagccaaggctgcagcaatactgccctgagctgccaacaaattggcatactgactcatcttcgcagccaagagaactcctacagtactagtgtccatggcttgagtgagttgcacagcttttcgcaggatgacaactttctcaatcagatcctgaagtgacaaagggtggcttccatcttgagctttagtccaacatgcaactaatttctctacattccctgcacaaatatagcagagacatgcttgagtctgcaggaggctatctccttcattttcaagcctggttcccaaaagatcacaaagggctgaaaattcatccggctttgcataagtcaatactgcagctaaagcctctctccaatttttaagatcacaagactcaacaatctctttccagttcttcatcaccactgcagtgatgagcctggtaattttgctttgggattttgcgaagtattttttctgggttcgagccaagagttcttgtccacctgctatggccaatataatggcatcggccatgcggttatcatgtaaacaaaggtcaacagcactctcaaaattgcccgtcagcaaagcctgagtaattaaaccatcaatgtccccactgacagagatattaaatgttcctccagatgagggtagaaattcagattcttctttttcctctttaatgtgctctcccaagagctgctcttcagcagcagggctctcctccccatcactctgcc

SEQ ID NO: 130689 - DNA, 878 bp, Homo Sapiens
cacagttaagtattgtcatttatgtatctttaacaaaagataaaatacaaaacggacacaacatcagcctttatgttgaaccaccctgtttaggtaggaaaatgaacattgtttttcattcttaaagtaaataggaattaaatctatttgcattgctgtttaatttcataccaatctaaagctcgacactatgtatatccaaagtacttgacaatttgactcagttactcacaccactgtttctgagatgctgacttaatgcagtatcctacaggtggtttttggtagtttagaaaagccagtgagtgggctgttaaaagttgatatactgatgtcagaggttttgttaggctgttttcactgattctactctgtcagtattatcttcacagtgttctgagaagaggcttcaggatcatggcaatctattactaatatccctagaagctatccttataattctttcaataaaccaacttcaggttttgtttttttgcaaattttacaaacaaagtaacagctgctggctataaatattaggatattctacaatttaaaaaatctaatattcatgattgttacataggggcactcacaatgaaaacaaacggtaatgtaaaccatatcctctatgataaaggaaaggatttctacacctagacttatgtccagaatggtaaaagacctactactgatcagtcaatattgacccaatgatgagaaaatagttgttttccattcaaagactaacacatttagtctactccagaggccaaggaagagagaatcgcttgagcccaagactgcagggcattatgactttgtctgtgaaaagccactgctctctagcctgggcaacatagcaagatcctgtctct

SEQ ID NO: 130690 - DNA, 1579 bp, Homo Sapiens
tttttttgggagttgaggacatttatttcacattcacacaactgtacattttctataaataatgtggggctgaaatatttacagtcatttcttgcccatacccaggctgtctctccctcctgacaccccgtgcctggagagacagcctgcagacagatgtgcaaacccagcttggtctttcctgccccctccctgatgctcaggcagagcagccagcggtccctgggactccactagcctcgaccactccatcctctgatgccgaaggcgtggcaggccacagggaattcgccgctccactgcagtcacagaggctgtggcaggcagcagccaacactgcgggccctgggcagtagctgccggcttgggaatgcagaaggaagcagggaggctgccactcactccggctgccccccaattcttcccttcctctctgtgcccttcctctgagagggtgagccccagggttccctcactcctcacagagtgaaactgctccaggcgcccagtcatgccgggtcacagagaagggagagccagactcttgcagtggacagttataacgccagggacaaggacaaggaaccacaacacaaatgtctcaaggacacaaaatagtgggttcacaccggccccacagactgtacacattcttgagccctgaggggaaggcagtttggtcttctgggagtggagagggagaaggtggacacgctcaagacacactcagagggacacataaccggtaaccaaccaagccacagcagggggcttgcagaggacacacgagcatcatccactcctcagtcacagcagcatcgtgcacttgggaacagcaaggggccaggggcgtgccctgggctggggcagctgcgtagcccctctccatcagctagggacaggccggggcggggttctgagatcttcctcactgctatgaactgcagccacgtacgagaagagacataatacggagtagcagatttcgtgggccattggtgtcttgtacttgtggctcaccacttctgttaatttcaggaacaaattcctccaggacaaagacgcctcgaactgtattgcactttttaatgtgattcagctctatgaaaacctgattgtgcatgaatttgaggttgatcccttccagggtcacctgcagcaggccaccctcaccagtcttcaggtcctgcacagggaactcgccacccaattcaggtccgggtttgatgctttgctgtcgggcgcagcgcgctccatgctgtccttcacacagtagtacagctcccgacactttttagtatagaacttgttgagctgggtctcagagccatttctacgccacaagcacaacaccttcgtcttgggacagtaggtcatgttgatgagcttctcgtaccaccagcgctcatacactgttccgatgttactacgcaacaccacacagtcatcgcacacctacatgaagaagcagacatttgtggtacatgcagggacagatacaacggagatatcttttgtatctgtccatgcagggacagatacaacgcagacatttaagctacatgtcggaccctcgtgg

SEQ ID NO: 130691 - DNA, 1188 bp, Homo Sapiens
  misc_feature (696)..(696): n is a, c, g, or t
  misc_feature (736)..(843): n is a, c, g, or t
catctttgaagtcctttattcccagcagttcacatcagttactcattgagctggggttcgtcatattaaccaagaattcattcatctttcttttgatattgtaatcttgtcctcatctccacaactgagttggggcctgaggggtttaagagttctcactccatcacaggaggcaaggggtacccttgtgaaccagacttcaactcctggaagtcttgttcagttcataggcaaatatctttgcaagtttagtatgagacagcccaacggttaaataaataagacacagtgccatggttctaggcatttggagagggaaaaggcacattacacagattcccctggagaaaatacaggccattctcatcttctcaacatgcattttcccactcttcagtgacttttaatcttatcccctggtctatgagaaaccataacccacgtgctactgaatacatttttattttcccttcatgacatagacttggttccaagtatattttattttcctcccttatgcctacaagacatccaattttgttcaggtcccttttaatggcacttaataaatatacattctgagacctggcagaacaggctgtcccctttcacactgcctttaaagcgcctgtttgaactagctagtgcagagctcaggtggggcacgtcctagcttacagctcatggccatctctnggcaccaggtctatctgtccaatactttgtgtctagggtnnnnnnnnnnnnnnnnnnnnnnnnnnnnnnnnnnnnnnnnnnnnnnnnnnnnnnnnnnnnnnnnnnnnnnnnnnnnnnnnnnnnnnnnnnnnnnnnnnnnnnnnnnnnggagcctggattctgccagttgaaacctgccatggtaacttcagtgagcagctacactgagaactcctgagctacaattctagcacacagtaggcctttggtaggtatctgtggaacccacgagtgggtttcctatttcattatctgttcccctatgctctctatttttatcagaaatctgagcaggaaagagcagagagaatgagtcaagagcatcctctcaagtgaattcgctgctgagaaaggaaccgtagggcttgcatttctcttgtgtcatgcagtcttcatgctttaacaggcccagaggaggcaagttatagactgacacagacatgtatatatttc

SEQ ID NO: 130692 - DNA, 865 bp, Homo Sapiens
tttataatttaaaatacatttatttaatgtttccatttgtttctggttctgtgacacaaagctgttaaataaatacattctccacagtccctctgggacgggccacacagatgaggtagagaaatcattgcacgcacggagactcggagcacagacagggcccctcccacccacccacacctggccagaagccacctgggggtccaggtccctcaaggcagggcctggtgcagagaaggtggctgggatcccctggccaaggagcgggctgaacccctcccaacagccctttctcctctactgcccctcagaagagaagcgcatgaaacaggaggctccggctgagcggcctcttcatccagcaagacattcgaatatgtatttgtatagaaaccaactagctagcagacatttttggtctgccttgtttaaaaaaatagttttctgaatatttatgacatagagctaaatgtggtatttgattaaaaataaaaaccttcctctgacttgacgcccttcatagacccaatagtgactgagtgacagtcttgtcatgtcatgagggtgtggccagctatgctgctcagggaccagtggatgcggacactgcagagggcaggggctaccacccccaccccttctagccaggcttcaccagacaaaggacaaacccagcgtcttgcacccacactgtggtacggggatgcagctgcaggcacatgtcggggtgctctctgaaccacaggagaataaaggttcttatgtactataacacagggacggcagagacccacagcaacataaataggttttcttttaaaaacacagacaccccggctttctggagacccttagggctctgaga

SEQ ID NO: 130693 - DNA, 981 bp, Homo Sapiens
  misc_feature (669)..(669): n is a, c, g, or t
  misc_feature (718)..(718): n is a, c, g, or t
  misc_feature (747)..(747): n is a, c, g, or t
  misc_feature (756)..(756): n is a, c, g, or t
  misc_feature (772)..(772): n is a, c, g, or t
  misc_feature (810)..(810): n is a, c, g, or t
  misc_feature (858)..(858): n is a, c, g, or t
  misc_feature (894)..(894): n is a, c, g, or t
  misc_feature (899)..(899): n is a, c, g, or t
  misc_feature (901)..(901): n is a, c, g, or t
  misc_feature (945)..(945): n is a, c, g, or t
  misc_feature (961)..(961): n is a, c, g, or t
  misc_feature (966)..(966): n is a, c, g, or t
gcgagaaccgggtagtgtttattgccaggaggacacccgcacagcctccggaccccagagggttttgacacaaatgacttaaaggcactggcttctgtccagctccagccctgcccggcagggcgtgggggcggagaccccatcaccacgcagcctcgacccgccccctcctccagggctgcagctccgcccagtggctgaagatagcaaacgccttgcagggcgaaggttcccaggatgcagtgagtgggggtggccccaggatgcagtgagggggggtggccccaggctggcggggaggtggagtaagggggctctttccgcggaagggtgagggactatgagacgctggggggcaggcgggcagccgcggtcttctccaccacgaagccgtagttatactcctcctcaatgtccgccagagacttgatggtcaggtccccaaaagcagagaaggccagggggctgcagctcttgccctcaaatcgtgggtggagtgtgaagggaaccccatccatggctgagatgccatagaggctggaggcctcgtagatggagtcattcctccgcagagtggatgcccgagagcccagccttgacgctgtccgctccaggaggccgcccttacttggctggctggctgcatccaaagagaggccctgcatgtcncggctgagactcggggcttgggcactggcctcgggggctttggcttccntgcacagatggcaaagcgcccatgtcccntaatcgaangtatccaacactgtcntggtcgtccactcaagcggacatcaacacagcgtgtcngtggctcccaaggcacagctcacaacatgcgttttctcctggcacagnagcttggatccatgggtcgcaacgggggaaagccancggangngtctgtcacacgatctgatacggcacacgtctctgcggtctcangtgccaagataagcangatancaatctgccgaccta

SEQ ID NO: 130694 - DNA, 555 bp, Homo Sapiens
ggcgagaaccgggtagtgtttattgccaggaggacacccgcacagcctccggaccccagagggttttgacacaaatgacttaaaggcactggcttctgtccagctccagccctgcccggcgggcgtgggggcggagaccccatcaccacgcagcctcgacccgccccctcctccagggctgcagctccgcccagtggctgaagatagcaaacgccttgcagggcgaaggttcccaggatgcagtgagggggggtggccccaggctggcggggaggtggagtaagggggctctttccgcggaagggtgagggactatgagacgctggggggcaggcgggcagccgcggtcttctccaccacgaagccgtagttatactcctcctcaatgtccgccagagacttgatgggtcaggtccccaaaagcagagaaggccagggggctgcagctcttgccctcaaatcgtgggtggagtgtgaagggaaccccatccagtggttgagatgccatagaggcggggaggcctcgtagatggagtcattcctccgcagagggga

SEQ ID NO: 130695 - DNA, 931 bp, Homo Sapiens
  misc_feature (28)..(28): n is a, c, g, or t
taaaggggtgaggggactaatgagacgnctggggggccaggccgggcagcccgcgttctttctccacccacgaagccgtaggttatactcctcctcaatgtccgccagagacttgatgttcaggtccccaaaagcagagaaggccagggggctgcagctcttgccctcaaatcgtgggtggagtgtgaagggaaccccatccatggctgagatgccatagaggctggaggcctcgtagatggagtcattcctccgcagagtggatgcccgagagcccagccttgacgctgtccgctccaggaggccgcccttacttggctggctggctgcatccagagagaggccctgcatgtcccggctgagacctcggggcttgggcactggcctcggggccttggccttcttgcaccagatggcaaagccgcccatgtcccctattcgaaggtatccaggcactgtcttggtcttcccactcagccggacatcaaacacagccgtgtccgtggctcccaggggcaacagcttcacacacatgcgtttcttcttggacacagaggccttggaatccatggggtcgcagacgggggagaagcccagcggcagggggctcttgtccaccacgatctggatatcggccaccacgttctcctgcgggttctctaggctgcccagagaactaaggcacaggaagtagccagatttctgcgcgaagctcttgccaaagctggcgggtgccccctcgacggtgcaggagatcgcgctgaacccccgcggcgggggtgcagaggccgacgaccaggccaggccagccagcggcgccgagtctgtcccgggtacgggatccatcctgcgagccgagcgccgaaggcgggtcgcggggcacagcctcgaacctcggagcgcctcccgacggcagcgctcgcctcgtgcc

SEQ ID NO: 130696 - DNA, 1900 bp, Homo Sapiens
  misc_feature (55)..(172): n is a, c, g, or t
  misc_feature (369)..(487): n is a, c, g, or t
agtgttgtaattcacttttatttttttattctgagatggagtcttgctttgtcannnnnnnnnnnnnnnnnnnnnnnnnnnnnnnnnnnnnnnnnnnnnnnnnnnnnnnnnnnnnnnnnnnnnnnnnnnnnnnnnnnnnnnnnnnnnnnnnnnnnnnnnnnnnnnnnnnnnnaccaagctaatttttgtattttttagtagagacagggttttgccatctaggccaggctgatcttgaactcctgaccttaggtgatctgcccaccttggcaaagtgctggcattacaggcatgagccatcatgccctgcctgtagttcacttttaagtatattttttaaaagtaaaaaatctgaagcagctgccaccnnnnnnnnnnnnnnnnnnnnnnnnnnnnnnnnnnnnnnnnnnnnnnnnnnnnnnnnnnnnnnnnnnnnnnnnnnnnnnnnnnnnnnnnnnnnnnnnnnnnnnnnnnnnnnnnnnnnnnntccggacaccacaagaaaaaacaaaagaaggtgcctactgagttttcttctttccagatgaccaactcttaacttactcatctgtttttttcactgttctgcttcttttgaagaagatttgaggtgacttacaaaggtgtatggcatatttataactgaagaaatctgggtgatgttaaaacgagggcaggaaaataaggtggaaaccagatgtaaggatagtcttcactatttatgtcaggaattcctacaaactttctatggtgaacagaatagagcttcctagcagtcaatgcaaagaagaaacacaacaattccacaccccaaagttaacagtcttgcttatcagaagcacaggtagttctgaaatctgatagaaaatgttcctgtatcatttcagaacacgcaactatgtgatcaaacccctttctatttgtttaaaaatttgtcaaacatcccatgtttgaccctggatgtctgaatcccctcagcccacattttcccccctacaccatgcccacaccatccccatagaatttagggtgaggcagcatctcagtgattgacaggcccctccttagaccccgtttactttcctgggtgtggtttggggtaagccctgttcatgaaggctggatttctgttctttgggttgcccagcttgccaccctcatttctggaacccagaccagcatcctcagcccacgctttgccactcagctcatcttcttcccagttggcacttctcagtgaccccatcccttccccagcagtgactctgcgtggggcagctccctggtggctggactctttccattttggcatttgggttagtggatctttccactttctggctccagtttttgagttgaattcatatgtttccccggtcactggatctatggcttctccatcaaagatagtgttcatctggatagtttcaccacgacgtctctctctgcagtcttcgtttctcctttctttgtcagaggttccttgttcttcccagtcttgcaggggcagtgtctgtggatggctttggccaataggacgaccaggtacacgaggagacccagaagcaatatggagcccaaagtgatgacaaacggcacgtaccatgcagatggagagtaaacgtttttcctcaggacctgataggtgaccctgggcctgggggtcgtggtgatgatagtggttgggtggggaatgactttaatactcagtgtcactgttcctgtctcaacaagagcctccgctttcttcctgtcagacatcaagttgtcatcagttacgtagacaagtagcttgtagtcccagatcttatcaaacccaccagcatagtcaaagcgagatgtaagcagcaggcgtgtgacattggaaccagcattgggagagaaggtgaaatgattgttg

SEQ ID NO: 130697 - DNA, 281 bp, Homo Sapiens
accaccccccccaggctaatttttgtattttttagtagagacagggttttgccatctaggccaggctgatcttgaactcctgaccttaggtgatctgcccaccttggcaaagtgctggcattacaggcatgagccatcatgccctgcctgtagttcacttttaagtatattttttaaaagtaaaaaatctgaagcagctgccacccaagtgtagaatagataaattgtgatataatcatagaatgaaaccagacataaccatgaagagaactgaactactg

SEQ ID NO: 130698 - DNA, 1448 bp, Homo Sapiens
ttttagaatcaggtggctcactgagctctgtattttgtttcctggagctttcactggtttcttcccctgagataccccaagtgacatgaaaagcatactcagggcctagagacactttactggggatgggcttctgtcacaggtcagaggtctgagaagaggggcaggccccactcctctccactagtagagaaaggttgacagagaatcatttcttgcttctcttggccgtagttttggttgtgctgggggcctcagccacagaggccttgggggctgtggctgctcgtgcccccttccttccccagaaagagctttggtggcccctgggaatcagactgcatggtttcttggtgggagaggaggcctggggtgaggagacggcctcagggactgtctcctccccttgcgcaggagtggcagaagggctgctgtccccagccatgggcaccccaggtagcaggggcaggtcggtgagggtgggctgcatctccatcctcagcaggtgctctgtcagggccgtctgttgccggtgctccctgtgcctgctcagctcctgctccagctccttgaggaagcctcgttctgagcagaatgggccactcagctctgggaactcctcatcgcttgaggcttcatcctcctcatccgaaatccagcgctccaccacaggctgcccgtccaggtccaggagaagtggcagggcttctgtcaccagctcgcggtagccatcctggttggtgcagctgtttccagacaggttgaggatgagaaggctctgggggaactcatccagcttcaatgtttctatcaggttctcagaaaggtccagaaactggaggcatgggaggtcgaggaggttttccacctgcctgatcttggtcttcctgccagagacaggaagcgcaaggaggggatgcaagccaggttctcaatttgctggatcttattcccttgcagatagagactgtgaagattctggaggccttctaagttcctgatagtagtaatcccctcccggtccaggcggacagtctgcagttcatcaagagtgtgaaacatcttctctgacagttccccatcttcagggaaagtcaagttccgcttagtgataagggcttcagtgatgcagacgcccccttcctctggaccctgggctgacttccctccagacatgatctaaaataacaaggctgctggtctgaggcgggacgaggaacgacaagagaggtcttggcggcccctaaggatggcagaacctcaggatggcaggaggagagagaaactcagagacttaggagaggaggaaagggggttgattcagagaaaattgcctggggtgaggtcgaagcacacagtacattgatgtgaagggtctggagctttgaggggtgtggaggggctttgctggcagccagctggggtgttgtgggcaggaatggttgaga

SEQ ID NO: 130699 - DNA, 507 bp, Homo Sapiens
tttctttttaaaaaagctgtaggctttattaagcagagtgacagtacaaagctttcacagcgtggaaggggtcccgagcggggtagccagtgttagatttttttatcaccttttaaactctctaaggcaggaaatatgtgtggtgggaagatgttaccagagggagaaacaaagacaattaacatgtctcagatcttgaggaaaactggaattgtaacttaagttttctctacttataaccttgcagcgggatggcaaaggagacaggatctcacgggattttacaaattgtgtttacaaggaattggaattgggaccatagataaggtctgctggtcacagaaaagtgggcttttaacattccttttagtttcaggggagggggaagggagagagggagagaggacacagggaagcttacaacaaaattttcgctgtttatagctttcttggggaagaaacacaggcgcaaattctgatgttaggaatgttttaagcacatatctt

SEQ ID NO: 130700 - DNA, 926 bp, Homo Sapiens
  misc_feature (101)..(101): n is a, c, g, or t
  misc_feature (244)..(283): n is a, c, g, or t
ggatgttttcccagaaggggagaaaccaaaagcccaaattacccatgttctccagatctggagggaaaaactggaattggtaacttaagtttttctctacnttatacccttggcagcgggatggcaaaggagacaggatctcaacgggattttacaaattgtgttacaaggaattggaattgggaccatagataaggtctgctggtcacagaaaagtgggcttttaacattccttttagtttcnnnnnnnnnnnnnnnnnnnnnnnnnnnnnnnnnnnnnnnnagcttacaacaaaattttcgctgtttatagctttcttggggaagaaaacacaggcgcaaattctgatgttaggaatgttttaagcacatatcttcaatattattcatccaggaccaaagtaagtccgcatgcaggaaatgagtgagtttcacagctttctgagcccctacttgacccaggaagcccagctggaacctcctctcactttctactttcttctgatattccttgaaaatacttctccttcatagcggagataagtagttttaaacagcttggttccttccctgctgtgaagtattgagttttatttcaggaccaaaggacataaaccagtttatgacataaacaggtttagacaatccctcatgcaagaactggggaaagtttgcatcgggggttcagtaacaatctggtttaagttgccttctggtccacttgctctctctgggatattaatgcggctgctgctcctttcattatcactccatgaaaactctgtatcttgagaatcctgaaagatagggtttctcttattccttttgggctgggtggaatgatggttgccctctttactgccatttcttcttcttttcccggacgcggggtcgacgatatcccgggaattccggaccggtaccac

SEQ ID NO: 130701 - DNA, 580 bp, Homo Sapiens
gaaaataaaaatttcataaacatttattcacagcccctttaaaagtacaacagtgaagtaaaaccccaattaaacaactgcccattaacttgttacttaaaatgtagacttaaaaaccaatagactttttttggtgtgtatgcaattgcttttataaacacagtttaggttggaataaggaagtcctaattcatcatgttggagcttgccctcgctgctgcaggctgttgaagtgagcctccttcaaggtctggttgatatgggagtaaagaccttggcatggtacatacccctcatgcaagaactggggaaagtttgcatcgggttcagtaacaatctggtttaagttgccttctggtccacttgctctctctgggatattaatgcggctgctgctcctttcattatcactccatgaaaattgctacctctgtatcttgagaatcctgaaagatagggtttctcttattccttttgggctgggtggaatgatggttgccctctttactgccatttcttcttcttttccgtacagggcagcctcccatagtcctgccctcggaaccatagcaaccgcccc

SEQ ID NO: 130702 - DNA, 1123 bp, Homo Sapiens
  misc_feature (661)..(661): n is a, c, g, or t
  misc_feature (899)..(921): n is a, c, g, or t
gtcaattcagtttaaagcactttattaaccacacatacatattttccagtgtctaattctcatcgtgttcttttccattccagacttccctgtctctttcccagagctctgttcctcttctcactgtttctggaaggcagttgcactcaaaagtgaagtcaccagtctgccgacaggtgcctccattgacacaaggcgagggtgcacagggcacatacaggctgtcacagtactggcctgtgaagccctgaaggcactggcactggtaggaaccaggcaggttgaggcaggtgccaccatgctggcagtgtcctggaatgtcacactcattgacatcagtctcacacttctgccctgtgaagcctgtgaggcatttgcaggagaactggttggccacagtggtacaggtacttccatttgcacagggatgagacaggcaggcatcggtccattggcactccttacctgtaaacccgacttgacaggtgcactcataggtatcccggctgagcatatggcatgtgccgccattcaggcaaggtcgagacacaaagcatggatgagatgtcgagtactggcagtcctctcctgtaaaccctgaggcacatcggcacgtggctttccccagcatggcctgggccacacaagtcccaccattctnggcagcggttcttctcacaggggtctcgatgttgacaatattcccccaagaagccttctggacatttgcagtatcctgtgccattgtggtaggtaacacacattccttcatttacacagggttcatagccatctcgacactgcaatgcatgcgcgggggtcgcgcagcacagccagagcgccagcagcgcccacagcagagcggggcgcagggcgggtatcttctcggtcgcctcctnnnnnnnnnnnnnnnnnnnnnnntgggcagatccacatggggagggggtcccgatagaggagccccactctctcctcccctcctcctgcttcaaaggctcaggccctggcgctacgctccgaagcccagcgcaaatgcctcgactccccgcgccccgagtccgccgctcctcggccgccgcctcagccgccgcccgaagtttggctgaaacatcccgggaattcc

SEQ ID NO: 130703 - DNA, 1001 bp, Homo Sapiens
ttccatcaaaatggaaggcaaaacgggggcatcagcaaatgagctcgccgtgatcactctcaggggtcactcacatcggaacgcttttgtctcaatccttcgacgcattgggcacaaccttgtcagccgtggtctcagaggtgcgatctcctcacgcccttccagacgggtactcctgtctggacccagataaatctttcttctcaggtgactcccaggtaggggccccctagcgcggagcccagcttgactttcatcttcatccagtcctcttggaaggggatcctgtctgcgtcgtccgtggagttgagatgtctgctcctgaactcgtctcccacctcccgcaggtgcctggcaaacaccatgctgcgacgggtatcccagtattctttccctccatagtggtcgtgaagtaggttctcggctctgtctaacatcacggaccgggctgatgtgtttctcagcagcaggggcgccacgatggaggctgagccctggacggacagacaggagacgtttagacccctggtctcctcataaccccaaaaccatcctctgtagtactcgtgcttgtcctgggagtacaggagctgatcaatacacggccgctcgtccaccttctcttcccaggtcccttctttccacccctctgcgtaactttgcaggacgtaaacctggtcaataaagggcccaccagattctgcgatgaactgctcatactcgatgacggggatgtttttattgagacttggaagatcaaaaaactcagaccagggaatccggacctggtggatgtcaggactctgccagtgatagaggcggccccatggaggcaggacaagcacccactcctccgtcttcagcagagtcttcaggagagaggcgattcggatatagacatccctgcgcaggttgaagccttccggggggttgacgtcatacagaagataccgtctgccctcgtgccgaattcggcgcgccgtcgacttcatactctctcc

SEQ ID NO: 130704 - DNA, 2205 bp, Homo Sapiens
  misc_feature (67)..(67): n is a, c, g, or t
  misc_feature (125)..(125): n is a, c, g, or t
caagggttaaccggcccaagagggtgagggggggctcccctgacccctgagggaccccctgaggcanctgttgcaccttccacggattttgtgtctagcgttgccctctttgcagatgccctcgntggtggtggcacaaagacctaaaaatgatttctgtaaaatgggtacaaggagctccctgataaagcagctcatcctagacagccttttggagttagcgtaactgtccttcctcatttctagttctcaatagcgaatggcagacctggaggccccatgtgcacctgccagccggggcgagggcagggacggagcccagctctagaggcgtggggcctcttctgggcctgggaccctgcgagggacggtcctgtccttgtagagctccagctgcaagtttcctacagacaatccactgagtgccccagagacgtcactgaaaaacttcccagtgctctgacgtgccagcagtagggcctgaactgtcatccctccacggggctccctgaggcctcaggccctttcctttgcagcaccaggtctgccttgcacgcatcccaggaggaaacacacaggcagcctcctgctgcgcggagggcaacggagagattcatgaggcccctggtcgctctgcagacatttaaaatgacgcttctccttgcaccagctcccagggaaatgtcagcccgggtccacctgacggagggcagctcacccgcctgcatctatcctcaatgcacttaaaatatgaagacatgaaaggtggctggaaaggccagagcgggagcctgacaaacactcctgcttctgggtcaccacgcgggcactgctggcaaccgagctgtgggttcacagacgctgcctgaaaacaaccgccacccccgagagcagcggagcctcttcatcagccatggcggctggcaacgccgaggacggagcccagctctagaggcgtggggcctcttctgggcctgggaccctgcgagggacggtcctgtccgcccagctcccggctggcagtagacggtgactccacggcgacagaacctgcatccacccgcgcctgtcgggtccggggagcggccctggaggatcctcctcagtaggtgatcttccagtgggtgggttgctcacacgccttctcttggtctaccgcagaacctgttgtacgtcgtcttggggtccaaccccaggatttctctttcctcatgaatccgaaaagaaaatgttgagactgaggtgccaataaaaaacctggcgtgtgcgcagatccactggtcaataatcgcaacgcctccgtccttgtagagctccagctcctcccacgtgggttcaaacctcaccatctcgggtaacagcttttttagctcttcatattcctttctgacggcatctgtggccacaaacaccttgtccagccggtgggtcttcatgaggctgcggatcttcctcacggccccttccagactgggtacatcctgtctgtgaccccagatgaaatcttttcttctcaggtggactcccaggtaggggccccctagcgcggagcccagcttgaccttcatcttcatccagtcctcctggaaggggatcctgtctgcgtcgtccgtggagttgagatgtctgctcctgaactcgtctcccacctcccgcaggtgcctggcaaacaccatgctgcgacgggtatcccagtattctttccctccatagtggtcgtgaagtaggttctcggctctgtctaacatcacggaccgggctgatgtgtttctcagcagcaggggcgccacgatggaggctgagccctggacggacagacaggagacgtttagacccctggtctcctcataaccccaaaaccatcctctgccatgctttagagccagctgccctggcactggacacatggaggctgttaactgacagcttttccacaggaggcctggtagtgtcagagcctttaatggcaatcgacacttgggactgacaagacctccatccctgtagtactcgtgcttgtcctgggagtacaggagctgatcaatacacggccgctcgtccaccttctcttcccaggtcccttctttccacccctctgcgtaactttgcaggacgtaaacctggtcaataaagggcccaccagattctgcgatgaactgccctcgtgccgaattcggcgcgccgtcgacttcatactctctcccc

SEQ ID NO: 130705 - DNA, 1142 bp, Homo Sapiens
  misc_feature (707)..(794): n is a, c, g, or t
accaacttccataaagcagtttatttttcttaaaaaggaaggtacatggtcacagtccaaaatgttttatacagctctcagcctggaaaatgcaactgatgaaaaaggcactgtttctagaacaaatggaaaaagaataaatatgtcatcatttaccctgcacagctttgagtaacaccataggaccctgtcacacgttcagggtcaattttaaaagcttgagaagacacagcaaggtgatgtcctagactagccaggctccgaaaggaagagctgtctgtccctcctaactgtcctctctctgtcacaggtgtccatgtcactgttcctctagcagatgtggaaagtggctgctcagtgaggactcagcccccaccaacctgactgagggtcacacgacaccatggtggaaagtcacaaagggtaacgggccaagagggtgaggggggctccctgaccctgaggacccctgaggcactgctgcaccttccacggattctgtgtctagcgttgccctctttgcagatgccccctcgtggtggtggcacaaagacctaaaaatgatttctgtaaaatggtcacaaggagctccctgataaagcagctcatcctagacagccttgtggagttagcgtaactgtccttcctcatttctagttctcaatagcgaatggcagacctggaggccccatgtgcacctgccagcnnnnnnnnnnnnnnnnnnnnnnnnnnnnnnnnnnnnnnnnnnnnnnnnnnnnnnnnnnnnnnnnnnnnnnnnnnnnnnnnnnnnnnnnccagtgggggcgagggtgggtggccacccgggcctggtgtgaggagcagagctgcaagtttcctacagacaatccactgagtgccccagagacgtcactgaaaaacttcccagtgctctgacgtgccagcagtagggcctgaactgtcatccctccacggggctccctgaggcctcaggccctttcctttgcagcaccaggtttgccttgcacgcatcccaggaggaaacacacaggcagcctcctgctgcgcggagggcaacggagagattcatgaggcccctggtcgctctgcagacatttaaaatgacgcttctccttgcaccagctcctaataacaatgacaac

SEQ ID NO: 130706 - DNA, 1508 bp, Homo Sapiens
  misc_feature (410)..(423): n is a, c, g, or t
  misc_feature (468)..(488): n is a, c, g, or t
  misc_feature (513)..(572): n is a, c, g, or t
  misc_feature (786)..(806): n is a, c, g, or t
  misc_feature (936)..(960): n is a, c, g, or t
  misc_feature (996)..(1020): n is a, c, g, or t
  misc_feature (1056)..(1073): n is a, c, g, or t
  misc_feature (1106)..(1312): n is a, c, g, or t
gtggcttttgggattctcctgccccacccccccgtccatggcagccccctccccaaggctttgctcacacctgagacaggaaggaggaaggggatccaataggaatatgggccccggaggggaagtcatgcacccccaagccaccaccccccagccttccacgcacatctcctggctggaagagagccctccaaaaaggggacacaggctgccccggcccctcaactgcatccacaccccatcctctcatcttgggtcccagccaggcccccccaaaaccaaagccccctcaagtcctggggtcccagcctgtgcccccagcttcctgcccacccagccctgagcattctcacacagagaaagaacaagcaagggctccagggggacaggatggggcagggcatacagtnnnnnnnnnnnnnncagctgggaggagggagggacaaaacaaaacattttcctttgggnnnnnnnnnnnnnnnnnnnnnctcccctttactctttgggtggtgnnnnnnnnnnnnnnnnnnnnnnnnnnnnnnnnnnnnnnnnnnnnnnnnnnnnnnnnnnnnactgatatcaccaggatagtttactctccttctagctttctgcttaccgcacactggataacacacacatacacacccacaaaaatgctcatgaacccaatccggagaaggttccagcaggtcccccaccctcccctcctcctcctacttctcctcttgacagcgaggacaggagggggacaaggggacacctgggcagacccgccggctcttnnnnnnnnnnnnnnnnnnnnntcacatcatactccaatcataaccttgtatattacgcagtcattttggttttcgcggacgcgcctacctaagtaccatttacagaaagtgactctggctgtcattattttgtttatttgttccctatgcnnnnnnnnnnnnnnnnnnnnnnnnngggggattccataaaagattcaataaaagacaaacnnnnnnnnnnnnnnnnnnnnnnnnntgtataaaaattaaacaagctatgcttcgactcttnnnnnnnnnnnnnnnnnngcctacagccgcggccctcgtgccgaattcttnnnnnnnnnnnnnnnnnnnnnnnnnnnnnnnnnnnnnnnnnnnnnnnnnnnnnnnnnnnnnnnnnnnnnnnnnnnnnnnnnnnnnnnnnnnnnnnnnnnnnnnnnnnnnnnnnnnnnnnnnnnnnnnnnnnnnnnnnnnnnnnnnnnnnnnnnnnnnnnnnnnnnnnnnnnnnnnnnnnnnnnnnnnnnnnnnnnnnnnnnnnnnnntgcacctgcattatgaactggcaccctcggggacagcggttgtgtattggggtcttcgcttctcgccactgatcgtgggtcggtcgttgggtggggagggtacacccactcaagggtaatcggtacccgaactcagggaatgcaggaagacatgtggaaatgcaccaatggactatgtaaactgcggttgtgggtt

SEQ ID NO: 130707 - DNA, 1978 bp, Homo Sapiens
  misc_feature (41)..(61): n is a, c, g, or t
acctcactaaagggaataagcttgcggccgcctgctcaggnnnnnnnnnnnnnnnnnnnnnaccatgtcttggttccaatatttattattctgacaggttaggaatactaggataaataagtaatattttctcttacagaaaattgtaatgataccattgagtacaattaaacactctgagaatttcacagaaacatcagaattttaatagacagtagccagcgtccttgtggccagtgtgagtgacttctcacagctgcaaacaccctgggccagatttcttaaaacagctacatgacaaaaacaatgctattgacatccaataatgctaaagcctgggtaccacccaggctccactgactgtggtttccaaacatctctccactgactgtggttttcaaccacaaggaaaggaaaatggaatattctttggctcttccagcctagacacaactcctgacctaagacattgagtggagagtcctaaccctttggaagttgaactttctgctttcttcctgtgactttggaactgagtttgcaacagaggacctgccatcatgctgcccatggattttgtgttaacgctgggagaattctgtcctcctcttgctgacaagctcttctggccacctgaatatcttgagatactgcacgtggtgacagccccgccccccaaaactcttagaaaccagatctgagaaaaagcatataaaagtcacatcagtgttgtgtgacacaaacatcggaagagtacattgcctagttttcttgcacacacaatttctggacataacagcatatttgctagaaagcacaaccctggccgttgcacaacttcactaaatgctgttctcactccacatcccctacgagtgacaatggtagccacggtgaaggagatggccccatccctcccacccgaggtacagacactgctgcctgaatcctaacggtgggcatcctggttttttgtagaatccagatgaaaggcgggcaggacaccagctgggggccatctggaacatcagaatggccagtgtgttaaggcctaaatcctggagttgaggcaaagatgcacttgccctggtccaagacccactctggggcagaatgggaagggcctgctgaatcactgcaggccctcccgccttgatggttctctgctgctgggattctagaggtacacaggaagacagctctccaatggcttcagggttttgggtataaaatgaggattcaatgaggactccccagtcgcccccataccacgactgcttagctctgcaatgttccttctgtttatctgttggataaagaggtttctctcatcttctggagtcctcccattctgagcccggacaatacacgtgggccgatgaaggttgagcatgtatatcaaatgctgcttctcgttcttgagctcctcaatctgagccttcagcttcagcattcacactgttccagcttctccgactgtgttctgcaggcactccgtcttctccttgcttcttgtttcggcactttgcagctgcaatcgtgtatgttctttctcgtcgcctctgtgtttccgtggtcatcttcttcaggggctacctcggcttttgtgatggacaccccgaggggtctgtcgctgacagtgactgattccagcgcagaggacatccggtggcagaggtgcttgttctggatggcaaacctcagctcttccttgacaaagggcgtcaggttagcaaaatcctcaaacaccagtgacccaggaggggacaggcaggggacgatggcagaagcactcacttccgaggcagagacctggcctccaggctccgctcgggtcggccagggtcgggacggggtcgggcgggctgtttgtctggccggcgggcgagcaccgaggactcacggccggcgcgcgggctgaagggtgcgctcgggcggcggcgagagaagagagctgtgcagtgcgcgcctggctgcg

SEQ ID NO: 130708 - DNA, 400 bp, Homo Sapiens
gtatatcaagtatttattatcaagttttataacataaacaagataaaacggagccattcatcatgattcaatgccaaatgtgtacgccacgctctaagttacctacaaagcaagaaatatgactgaatcctaatattcctttgcaaaatgtgtgctaaaatgtatgtgccattcgaatcatgggaaaatcagaattgggtgcaaaatcagaaataattccactaatgttgctaaacatggttacactttccttttatacctaaaccagtaactaaaatgattctatctttattaacaatttacttgtattacttttacaacaggaaaaaagataggctgtaacgagaatatctcatgacaagctaaattggtttcaacttctgtatcagcatacaatatg

SEQ ID NO: 130709 - DNA, 742 bp, Homo Sapiens
  misc_feature (705)..(705): n is a, c, g, or t
ccacgagaaggccatcactttccacacattaagtggtggccatctttattagagatgtttaacattcaatagatatccaaggtgacaaaagttaggtcatggtttatgtgttagcatttgcagaaacagtaacaaaaagtagtaaaaagttaaaataacctcgacacacagccgcttttgccatcagccttcctaccgttcttcctccacctctggtttggtgtctgtcctcaaggacagcagaagaggggctgtctgtgcagccaaccagcccctgaaataccaggagcctggtcctagaagaggacttggaaacaaacccgtgggcaaattatcttaaccagtaacaagtggaatgatcagtaagaactcgttaaacctccctaaatgcagtcactttcaatgtgtctgagtctcacctctggatgttctagcttgcaacctttcttggagaaggagccggttcacaaccacagtctggaaaagcagatgaccctccaccagaggcacctgggctccacattccagccatcggggaatttcaaagtctcctctttgaataacgccacaatcctgaatcctcagacccagctaccagtcacggagcggttctgttcagacacttttgagtggctggtacggagctcataggccccgaggatgacacaggactcggcaccaaacaccatcgcttccagcttccanagctacaaaatcaagctttcaaaacgagtgttcactt

SEQ ID NO: 130710 - DNA, 165 bp, Homo Sapiens
attttaatgaatttgctgcatactcggttaatggaacataaacatatctttggtacttctttgtgagtgaaagaatgctggatagggtggctttgttctttaaatttttttctgaatgtagttaatttatggcatctgttgaataaaacctgagcaggcggccgc

SEQ ID NO: 130711 - DNA, 2543 bp, Homo Sapiens
  misc_feature (1351)..(1351): n is a, c, g, or t
  misc_feature (1962)..(1962): n is a, c, g, or t
cccccagggacgggggcaactacagccaccacagccagtggctcagaagggagagttcatgcccagcttagtttcaaactgcagcttctgtcgcttctggtagcggactcggacccgaatctcatgtagcttcacgatctcattggtcaccaccacaaggaccagggacaggcagcccaggagccatgtcagcaggggcacgtcctccaggccaaagtggacgtggctgtccctgtgtgtccacagctgcaggtccacagccgtctggaccacctgacccagcagcaccacaggcactgtcacggcccaccagaggttggtcaaggggctctttctccacaggggcttggtgcgatgcacatgggtgatggaaatgaagacagtgtgcaggacaatcagggcggccgtgagcttctgagccgacagcagtccattggcaaagtcctcaaaccaggctggagccctgtcgtcgttgctgggcagcatgacggaggagcagttggtgaggttgcggtcccgggagctgtcacagaagctctgcagtgtgaagccaaagcagatgaggcaggagctgatggtgaggctgaacttgagcaggaaagcagagcaggaagtagtgctgggtcttcttgggaatggactggaggtttttccccgttgccatagacatgatggagctatgggggggcttcccgagcagagagatgctgagcagagggtagcaaaagcaggacagccacaggatgtcggtggtactcaggagtggcggcagctggaccaggcaagaaaggaactggatgaccacaagagtcagctggcactgcagcaggaagaggaagcacttacggatgccataggtggcatgccgagcctgttcgataagccggatgatgctgatggtctcctcctggcgaaaggtcagggaacagggcaggctgttgagctgccctgacagctgcaggggagaaaggccatccgaggcctgggccatgctgatgctggtggcgtagccaaaggtctcccaggagcaacgggatgggtacaggggatccagggcaatgctgatgtcgctctggaggaagaggcagctgttccgcaggttggcagagctgcccaggcagcaggtcacctccccgtactcttgcatgatctttatcatctcacacatggtctctggggtgcagtcggtgaaaaggggcactagcaggggcacgttgtcaatgttctgcaggtggggccgcacttggtggataccccggggcagcttggcccggttggagtcctccaggaagctggggatgtcgctgtccgtaggctggaagctgatgaggtccgagtggccctcctcctnccatgaggaggagcccttctgcatcatctcgggacacctgattcaggtcatcatgcagggagcctgcgtggctggggctggagggggggatctcggagccaggcatgtcaccattgggtgtgagggagatgtggcagttccagcctgtctccaggcccattttttctgcaaacaccttgcttttgagctcatcctccaaagagaagtagacaaagcggatgcaggcgttgacaagcccatcaatgaggcgcacgatgtccagccgggcctggtacgtcagagctccagctgctgcggcgggcgttctgcttgatggggatggtgctgggcagctcgcacatggtgaagatgctgctttggccgggcacctgtaccagctcgatgcacttgccattgagctgagaggacagggcgcagttcatgggcttgtaggcgaaggcagagcaattacccagacaggcaggctcgctggtagaagtccagcactttctttctgtcagatcccgagagagggtagatgtcagctccgtcccagaagtctgtgcaggcctctaagaccacatcagcggtgccatgggacagcatctgctctgtgctggtggtggtgtctntaatgaagaggctgatcatgtggctgaggggaggccgccgcttggtgacacaggagagccgccccagcgatgtctccttcattgtctcggcactggggaggcggtacagcgccagatggttctcctgcttgaaaagctccttggccccaggagtgaagccaatgaggcgggcaagctcgcagaggccccagggcacatggacgggcagcacggcgctgtggctctcttgcagggcaatgttgcacaggtggtcggagaatcggcacaggcgctcggtgacgctggcatcacacaggttcagcagcacattagaggcccaggggtttgagggaggtgaggtgcagctgccagttggagtcatcaaactggatgcaggaggggttctgctggtcctgggacaggctcagcatctccaggtggtagtcacacacaaagtcctgtgcttcgtaggggtcgctctccatcccaggctgggtcctcttaccacccgctcacagtcctgaaatccgcttcctgtccttcttgggctccatagtctgcttgtatggactattaatgccagttgttcttagacgaaggga

SEQ ID NO: 130712 - DNA, 1007 bp, Homo Sapiens
  misc_feature (920)..(920): n is a, c, g, or t
tttaccaccaaaaagtgcttcttttctacctcactccatggccaggctctccaggggcttgtctaaagcagagtcacttgttctcagatgccagagtagaagtagactcactctatgcaggaccacggtgatggcttccatgctgagggacaagtggaccccaaaactctgtcccttactgttgctcccgtgatctctgatggggctgccttttgccacctgggaatcacttgcacccaaggcttatgtgctgttgctgaataggtttgtattcatgggaattcagtgggacaacatccagagaggaaacaggtacatgaggaagattccactccacaagatacagaacccacttctcatcctgtgctactgacattcaggttcgagaatgtattgttgcttccaaaagtaaccctcaaatgttcgaatcacaagcaacacattgctgcaagataaaaggcacatgtctgtaagacagaggtttcgaagatagttacaaaactgtccaccagcttctgtccatagtgccttccaaagcttcataaaactggccatgaattatgcaagacacacggcaaaacacttcttcacagcatcccttgcaaatggtatgaaggaaaggctgtaccacgtcaatgccaaagactgcaaaatgcagaagataagtgcaagtcccttgttatgccaccaaaaggcagaacacagggtaagtgcaaaacacaacagcaccatgatagttgcaatcaaacgagtaggctcaaacattcgcttcagctgtttcactggtcccatgaggaagatggtactcccaattgatgcgatattaccaaaggtataaaacactgcgaagaggtgtagtcccttcctgggcacccacagcagaacagtacccagcagtgagcagagaattcctatagcanaacacgcaatgaagccttttatcctggtactccagcttaatgaagatgcctcaacaacctcggacagggcgctccggtcctccgtgt

SEQ ID NO: 130713 - DNA, 1744 bp, Homo Sapiens
  misc_feature (190)..(272): n is a, c, g, or t
  misc_feature (1597)..(1606): n is a, c, g, or t
attatttctggcttttcaaccaaacattgttgctaatccctatttttctttaagtgacacacattctcctgtctctggcttcttcaggctgaaatgacatagtctttctcacccttacttcactcttgagaggtagggctcctttataattacatggttgctctcagactttctgtgaaagtttgggagnnnnnnnnnnnnnnnnnnnnnnnnnnnnnnnnnnnnnnnnnnnnnnnnnnnnnnnnnnnnnnnnnnnnnnnnnnnnnnnnnnncactgaaattacctggagtgaggattacttgtaattaaaatatttataaaagaaacaactttattcacagagtccagctttgggactagtctgtatcttgttttttaagtctaacaacactgataataggaagtaaaaacagaaaggaaaagaaattaccactgggaaaatctttttagttagattgtaggcttcctggggcctcccatgccaggactgcaaagtgatccagccctacctgtcttcccacctgtgtgtcccccgtgtgggaagttggtgtcacttccccttcccaccctcacatctgcttagccagtagccacacccctaaaacatcagactcaccatccaggtgcagctccagaggctacaaaaggcttcatgggacttgaatccccatcctagcttctctctccttcccctcaagacctgatctggttttaaggggcctggagctgggagtctcaagtctgctaagattcacatccatagcccccatggctttgaggagaatcctctctgccattcttccaatctccccagtgggttttgctattattttctaaattgggttaagtctaagaaggtgggggtgagcagggggtttatctgtgtgtagtgagtgcttcatgtgtggaatattcattttcttactgcagtgggacttggggttgaagccacccctcctactctgttggcttagccctgagatggtgacaggctggcctgcagtcagcatcattgtgcatgtgacagcatcaatgtgattagtaatttgtctgttcctcccttgaactgtctgtttagtctgaggtttttaaacttgcaggcagctgactgtgatgtccacttgttccctgatttttacacatcatgtcaaagataacagctgttcccacccaccagttcctctaagcacatactctgcttttctgtcaacatcccattttggggaaaggaaaagtcatatttattcctgcaccccagttttttaacttgttctcccagttgtccccctcttctctgggtgtaagaagggaaattggaaaaaaaattatatatatattctccttttaatggtggggggctactggagaggagagacagcaagtccaccctaacttgttacacagcacataccacaggttctggaattctcatcttcgaacctagagaaataggtgctataaacagggaattaagcaaaatgctggatgctatagatcttttaatcgtcttaattttttttctattattaaactacaggctgtagatttcttagttctcacagaacttctatcattttaaactgacttgtatatttnnnnnnnnnntcttcagtaggatgttttgtactattgctagaccctcttctgtaatgggtaatgcgtttgattgtttgagattttctgtttttaaaaatgtagcacttgactttttgccaaggaaaaaaatgaaaatattccagtgca

SEQ ID NO: 130714 - DNA, 690 bp, Homo Sapiens
  misc_feature (62)..(78): n is a, c, g, or t
  misc_feature (87)..(87): n is a, c, g, or t
gtcctcggaaatatttggaaagttttatttaaatgttttgtgttcccttttaaccaccaccnnnnnnnnnnnnnnnnnttttttttntgccgttccaaacaggagagtcgcttcagagaggagctggcgtgtgtgttcagagcccaggagtgtgagccctgccaggtggctcttcccggcctgggccacgctgggtaggatggccacccaggcaccggcttcctgggaccctggtggtcttggagtgagtgagtgagcaaggccttgtcctgaggagaaagacctcaactcccctgaaggagggctgggcctggggacagggacatgagcattgtagggcctggggggttccagaggtaaggagatgggagtgggagggtcaggagatgagactgggagggtcagatccagaatgttccacggaggcttcagggcctctgggtctggagaaatacgttcgctagaaaaataagaggctttgagaatgtctgcagtctgtactctctgcctgcccaagagaaatctaccctgtttgccaaatggcaagcggggagggagccaatgctggaggccagaagtgggtttggcccttggggaagattcagaggggagcgaggtgggcggcagacttggtttcctgggtccctttcttgcagttgcagaggctgaggaggcccccacctccctgcc

SEQ ID NO: 130715 - DNA, 1809 bp, Homo Sapiens
  misc_feature (204)..(212): n is a, c, g, or t
  misc_feature (913)..(913): n is a, c, g, or t
tagggtattttgattttacattactaattctgaattcgttatcctttgctttcagccatattaaaactgaaagccttccatacctgatgtttttctatctcattatacagctttcctgtcagatcttcttttagggtgactttgaagaatcagaacatcagggctccaactctcagtagagccagtaaccagcttcctgatttnnnnnnnnntcacctttggcctaattttgtcacttataaacagtggtattgcagtaccctggtatgattagttatgatatgtttaacaataattttaaaataccaaagcttgtgaattattttactttcaaaaaatatgtaagttagaattgtaattctaaaggcactgtcgtttgcttacacattctaacatatttctaataagaaagtacctgctttcttaagagaaaaagggataagttaccaaaagcagcacgttctcctgggctcataccccggattcatccatgaggccacttccattgtaaagcttttagcatctcttgatttctcttcacactgaggcacaaaggcctgctacttataggcattacttcatttttccttatgaagggtactataccaacacagactttatagtatgtttaaaaatcccaactgcaagatacacaggatgctgtaggcctgatttcctgttgtagaacctccagccctgtgttgaatgaggaggtgcaaatatatagacccttaagatcagaccacagcaggcattcaggtggaggggatgaactccattcattccagctgtgcagtgggacatctgcgccctccgcatctcggctcattcctcatctgagccactcaagagggcggtctggtaagtgtcatctgaattcagcttctgaattccaatgatttctccccttccngtgtctcttcatccgagtcaaaaggcagtaaacaagagaatagttgacggccacaatgctgagggcagccaggtagtgccagcagaagcacatggtgatgaacatgaggttggcatcatccttctggtcccaattcgggtgttccaaaagttgggaacagcacaaacccaatctgccagaaccaggttccctgaagaatgatgagacttggttcggaaaaagttccagcacaatgtggtcccggaagatcacctctagggagatacttacacaccctccgaacagagcatacagcaggagtgagtggatgtgctggtccagcggaggccggttgtggacgtggtagtagaagaggaaaccttccatgaatactgccacagccataaccagtctgtccacccccaagggaacgtggctgaccagataggtgagcatgtcaacaattcctgagactgcaaagaataggtacatggtgctgtgctgccaattcattaactttatccagtggttctcatggtagaggtgcaggtggggcccatccggaacaaactgctctgccaggatcccagtgacggaaaacaaagtcctaattgcggcttcgacgatctcgagacgctgatagtaatgtagtgggctgttcttccgcgtgtggctaaagtacttcagcgggtacttcactgaccaacacagcccaatgatcaggaagaaactccctggaagcgcgtggcccttgaaatttgccatcaggacacctcccagctcgttttggttcctgagcagaagatagtctcagccctgctgtctctctctttctaaaattttccatatgagccaattaaatacaggattcattctgggtgctgtgcccagcgcctcgcagccgtctgcagcccgcg

SEQ ID NO: 130716 - DNA, 829 bp, Homo Sapiens
gattttcatcaatttttatttgttgtatgcattttgagaaagaaatttgtattacttttataatcaggcaaaactaaatcaatagagatttcttccttagaaaaatggaaatgtcatcagggaacaaggcagagcaccacacattattccatcctagccttaactagttattaattttttttaaaaaaagatttcctttctgtcccatttatgtcagcaatgaagcaatgctgtggtaggagaaattcccattgatggatttttgttaggtatgtcaaacacagtttcatacatatttgtctacctgcctcaagtacaaacccaaagtccacatacaattttctttgcagtgattccctaagcttgctaccctggctctgcccacaacatgcatctgatatgtgttgttgcctggaattgcttaacttttaaaaaatacattcttatacctaatagatattgcaaaatcttgaattcttcctttcttaaaagactctgactctctcagattcagagaagcacacatacacccctaaatgagtataatggactgatagatgcagcctgcttcatttgacttttgctgtctttctcttaattctcctctttgcctgattgttcactctcttttattctttccctttcacatctttttaaaattttttctcccaataggtagatttttgtctaacaatctttacctgtttgtcaatataggctgatgatgtgcctatgaagaaggaactccaaagaaggaaccaggggaccatgtatcataatatatcctgtccccaaatccacagacactgaccactgactctctctctct

SEQ ID NO: 130717 - DNA, 2537 bp, Homo Sapiens
  misc_feature (1874)..(1884): n is a, c, g, or t
ttttttttcctgagtggagagagttgtgtttattcaccatgtcatacgcgcatatagggaacctctatttaggagctggtggcctgcactcagcaccgcacagataaaaatatacgactttcaacacagatccaaataccctcacattttaaaagtcaggattccctacacaagttttaagctgacgggattcaagttctgagttttcatacatagctttaacttgtattaaacacatgtttatttacaacgtggagagagaataaggggcagttaaggccactttctcctgtgaaacactgcaaaatatgtacataagtacaacctaatataggcaaaggttctaaaaatcatctttcttggcttcacgtaattgagtatcagtcggggagtggagagcggctgccgatagcaccaggccatgccaggccacgccaacaagggcgtgtgcattcactttttcattgagctgccctcagagctgctgccgagctgagccctgcacgggcccaggtgtgcgccgcaccccagaccggtctgaagcacgtgtcaccggtccctcagttccatttccaaatccaccaaggtccagtcgacagacatttccaaaaagaatcctgttctaggaccacttgcgctgagagcacacccgggggtcaaagggcagccaccgggggtcaaagggcagccatcaggtactccccagggaagggcttgcggccaccagtcactgcaaccccgcctcacctccgatgcctgctgtgcccagggtggtcccgctcatagcgacggcctgtgcgttcatacgacctcgagcgctctcgtcgctgatctctgtagtaatgacttttcttcttgtattttcccggattatccgcccgctcccgtgacctgcttcgagaacgggaagaactccggctccgagacttgtgtggcttctgggggtacttgcagtccttggacttccgggagccccgaatctcagagcctttgtagggagcgctgcggggggcctgtctcggtggggagtcactcctgctccgggagcggctctgcgacttggacccaccagatgtggagccgctgtcacttttcctcctcttaggagacgctgatcgggatggggacctcgagtagctctgctcacggctccggctccgactccgactctctcgcccctttggcaagccgttcacggggctgtccgccttggctttcttggcgccctccagcctcctcttggtgttcttcacagacagtggggaaggcttgctccctttaccttctttgggggattccaccagcttgggggcaggagagaaccccgaggtaccatccagcacctgtgtgcccccaggcaacaggccccgggcttgggcctttgcctcttcgatagcgtgctttcttttttccacttcaccctccaggtgtgtgagatcaacctttttccgagcataaagctgcaagatctttaagcagatttcctgaatttcttcttcagttgctccaaacaaaagaaaccaatggggacgattgggcaaagggatctccagcgtccgggcagcaagataaatgcaggcacaggcgatgctctctggctggaaccgcacgaagacgtcggtgcgaaggctgtcgttcatgtaattcctggaagccaaacacaggaagaactgcaatgccccacccgggaacccaggtcttccgcctgcattatctagagaaaatctagataaacgtactactcctctaaggagtctattgctaggactcagagctagacagtcctgtgaatctcaagagttaatggagaaatattctagctgctttttctaaatacagtaaatacaggacagaaaggcacagaaattattagnnnnnnnnnnngctggctgaatgtcagacaatacgtgttgctatgaaagagaaccgactttaactttacttttcccctcaaccttggcctgctctcatgcaaagcacgatgcctcagaaagaaaatgtctactggagtcactaaaacgcttttgattaaagaaatctaaatgctcaaaatccatagtgcagagaaacatgcaaactcaaatgaactggctgagcacaaagccggtgtggctgctgggagacaagccatcctcttgggttcctcttcctcttcctccagggcgctggcggcaggccccttctctgctgaccgagctgcagcttccttggaggagtccacttggaagagggaaaagccccttgggtgcaagttggacgcgtgggagcatcgtgcggagggagactccgcacccaagggcaggcctcttctcgggctcatcagagccgctgccaactgtcccatttcaacaaggggtcttaagatgaacattcatagaatcagaagcaacacaatactgagaagcaacatgatactgagaagcaacataatactgaacatttcatcacagtacattctttaactttcatatttagaagctataaacatacaaaaatttacattttttaaaagttaaagcatttaaaacctggctact

SEQ ID NO: 130718 - DNA, 1424 bp, Homo Sapiens
  misc_feature (70)..(145): n is a, c, g, or t
actggaaattggcacaagaaaactttttggtttaattgacatattgtatacattgatcttggtgatgatnnnnnnnnnnnnnnnnnnnnnnnnnnnnnnnnnnnnnnnnnnnnnnnnnnnnnnnnnnnnnnnnnnnnnnnnnnnngtactgttaacatacaaaacttctagttgctagccagaaactgatttctgaacccactaacaagctgcaaccttcagtttgataaacacttgtccacgagatctgcaaaaatgggaaaatcaggccatatgactaacttatatatcctccaagccttgcagaattcttctgagtacaattttagagaaacttctagagataaataaaaatgtcaaatattactgaatttcaaatatgacagtaatttcaaatactactgaaaaattacaacgtattaggcactgaaaaggcagagtagatttggcagtcaacaaagtccctgccctcttggatcttatattctagtggaaacagatttcagcatttccatcttagtacttctgatttactccagatcagactcatccttccttgatcttcttgtctgcatgtatcagctaatggtcaatgttctgaatgcagtccatatgtctccactcttgtgaggcttctctgctgtgtgtctcccaatcacttggctgaactactgactctataaaacaaatgttttgtctatgatagctctgattattaaaatatttcagcacccatctgagatagtaaaacatattttatcgagttttcctgtgtgaatcctctgatgaagggaagtccttgtcaccctcatcatcagcatggactcgctgatgaatgataagacttgagctccaactgaagcccttcccacactcctcacatttgtatggtttttctccggtgtgaactctttgatgggcttgaaggtatgagctccagctgaagactttcccacattcctcacatttgtatggtctctctcctgtgtggaccctctggtgggcttgaaggtaggatctctgtctgaagcgcttaccacacacatcacatcggtatggtttttctcctgtgtggactccacgatgtgccagaaaattggaggcccgacagaagcccttcccacactcctcacattgatagggtttctctccagtgtggcacctctgatgggcttgaagctgtgaacctacactgaagcccttcccacactctgcacactgatatggtttctctccagtgtgaactctctgatgcacctgaaggctggagaactgactgaaggccttaccacacttctcgcatttatagggtttctctcctgtgtggattctacagtgtacattaagatctgagctccgactgaagcccttcccacatgtccacattgtagggttctccctcgtccgaattcgccacccaggcc

SEQ ID NO: 130719 - DNA, 1948 bp, Homo Sapiens
  misc_feature (907)..(907): n is a, c, g, or t
  misc_feature (912)..(913): n is a, c, g, or t
tttcacactttgtggttattcttttattcttgggtgtcccccaccagaccccagctgactgggcagggattggccccaggcttggcacagtgccaagcccacccgagtgctcagccacctcttgccaaacatctgaatcaatgtcacagcaacacttggtttgctcctgttgcattctcatgacaggctcagcgtcaggtacgacgttcttgagggcaaggcctgtcctccacaaagccctctggggctggggtctccagaggcaagccctcagctctgggagactgtctgcctccgggaggaaacctggggcaaagggacagggagctccgccaccagcagcagcatgttttattgcaaccagaatccccggtcacgtggggaagggattggagctagggatgaggcaggacacatctggtccctgacaggacactccccgtccaggatgcaaagccaaaggcccggaacagcctgctcagtggctgagccctgtggccagctgtgccctgtctcttcccctgcccccagtcagggcatccaacggggcagaggcagaagggacgtgaaaaggggggtcggtttcagcaaagccttcacccagggacctgaaggaagaaggagtattgtgatggggtccaggtgccccaagatgctcagggcgcctgggctgacttcaggatgtgtccatgtggttatcagaggaaagcgatggggcctgccctgcccacgtggagagggagggagaggggaaacacggctcagaaggagaatcactggccagcgaccatacaggtgggatcttgggaccctgactccgccgccagggccgggtccacaccccacctcctggctgggccccacctgggaccccagcctaggcagcctcgtgtcctatgtggggatnaaaanntgtccaggtcctgatccatgatctgcaggacatcatccagggatggaaggcccccaggtcccacgtgcagggacagcagggaggctggcattggacaggaagggctcctcggcccctgactccggggtcagtccactgttgggggagccagtctctggaatcctccagatgtccacactccctccctcctgtggggaaggctgaggggtctccaggtgcaggcgagggggcttgggtggagcctgggctgttggctcgggtgagagcctgggggtccaccgatataccgggagggagatggcgttcttgagcagaggggatgggccgtccgggagctcccgcccacacacggtggcggtgcgggtgaactggaaggggaggtcgaaggtgccatcttcttcaggcccctccaccatggtccccggcaggaggtggaacttgccctgcaggaaggagatgtcgccaaacatgtcactgccgccgccactgccaatatgaatggtgtggcggaagtcccccagcggtgggctgatcatgtccgaggacagcaggtcccgaagcttctccttcttgcccttgcgactgccacgcttcagatagatgggcaccttggtggacatggtgacctcaccaccaggcctggctgtgaggctacgggccgcctgctgagaccacacctcctctccaaccctcagccagaggaaacactcgttccacggggtggtttgcaggtgccagagctcgccaacgggcttctggctacagtgtgggggcacgaacaaagttggcccaaggaattaaaaaagattagagatcaatgaagtcagtgggctgagataacaaaaatcacgttctcccctaaggacggcaaactcttctgaagaattgaagccagaaaggtaggaactgtgtgggcagcagtgcactttggtcttgtcaccgagggttacttgtccccggtccagggctgaggagcgtgaggcgcgcagacggcagaccggcggacagcaaggtctcaggagctggacagcgcgg

SEQ ID NO: 130720 - DNA, 1071 bp, Homo Sapiens
tgagccaccgcgcccggccgggagtatttttataaagcctttttgtacagattaatcggccatgtccaggttattggttttgatattttataggacatttgagtggtgtggcgatgtgtagagaatgtgccagagctgcagagacagtccattctgggctgctggctttttgcccttcctgcatgatttccagctactgtgacctggatgctgggaacccaggcatcggctccaaaaattagaaggcgagtgctgagaagacttgtcacaggtttctcacatcagaatatactcagtcatagtggttccctgggaagccccagaccctttgacttgtgacattactggtttgcagacataataactacactcagaggaccatggaggcatgagggatcatggtttcagggcactgaagactctacgaggccagagaggactagtgcgatggactgatagagtcaggcgatgccctcgaaataggctgtgattttctcttccaggaatgtaacctttccccttttttcttctgacctgagcccagattggaaatcagaaagtctcctgtacatggagctgaagaggggctgctgttttccgaatgttttccatttcacaggcgccacctgcttgcccggggttggtcttgagaagacacccaaatgttcatgcctcagaaaggcagcagaatgccttttaggaaatttttttaaagtaatttgaagttatatagaagtttggtaagaagaagcagttgtttctctcttttctccctcatttcatggaggtgttaatgatcatggctggccgtgatgtacacatgggctgattttcattttttcagtttcatagctgagaaattcagctttgttttagttgaatcatcatattggaaagcagacattgaaagttttcttttctatctttgttatgaatgtgctatggccccttttggagacttctattgggtaatattctatgtgagagaaggaaacttggtattaaatgttgtggaaaataataatgatgataataataaagtatatgctgcaatggtgtactgccaaaaaa

SEQ ID NO: 130721 - DNA, 978 bp, Homo Sapiens
  misc_feature (419)..(419): n is a, c, g, or t
  misc_feature (423)..(437): n is a, c, g, or t
  misc_feature (439)..(443): n is a, c, g, or t
  misc_feature (445)..(446): n is a, c, g, or t
  misc_feature (448)..(454): n is a, c, g, or t
  misc_feature (456)..(471): n is a, c, g, or t
  misc_feature (473)..(480): n is a, c, g, or t
  misc_feature (482)..(487): n is a, c, g, or t
  misc_feature (489)..(489): n is a, c, g, or t
  misc_feature (491)..(495): n is a, c, g, or t
  misc_feature (497)..(497): n is a, c, g, or t
  misc_feature (501)..(503): n is a, c, g, or t
  misc_feature (505)..(512): n is a, c, g, or t
  misc_feature (520)..(524): n is a, c, g, or t
  misc_feature (530)..(533): n is a, c, g, or t
  misc_feature (535)..(535): n is a, c, g, or t
  misc_feature (537)..(537): n is a, c, g, or t
  misc_feature (540)..(540): n is a, c, g, or t
  misc_feature (542)..(543): n is a, c, g, or t
  misc_feature (547)..(560): n is a, c, g, or t
  misc_feature (562)..(565): n is a, c, g, or t
  misc_feature (587)..(587): n is a, c, g, or t
  misc_feature (589)..(589): n is a, c, g, or t
  misc_feature (591)..(591): n is a, c, g, or t
  misc_feature (593)..(593): n is a, c, g, or t
  misc_feature (599)..(599): n is a, c, g, or t
  misc_feature (612)..(612): n is a, c, g, or t
  misc_feature (614)..(614): n is a, c, g, or t
  misc_feature (616)..(616): n is a, c, g, or t
  misc_feature (619)..(620): n is a, c, g, or t
  misc_feature (628)..(632): n is a, c, g, or t
  misc_feature (640)..(641): n is a, c, g, or t
  misc_feature (644)..(644): n is a, c, g, or t
  misc_feature (646)..(646): n is a, c, g, or t
  misc_feature (650)..(650): n is a, c, g, or t
  misc_feature (655)..(655): n is a, c, g, or t
  misc_feature (669)..(670): n is a, c, g, or t
  misc_feature (673)..(673): n is a, c, g, or t
  misc_feature (675)..(678): n is a, c, g, or t
  misc_feature (682)..(682): n is a, c, g, or t
  misc_feature (689)..(689): n is a, c, g, or t
  misc_feature (693)..(822): n is a, c, g, or t
  misc_feature (826)..(828): n is a, c, g, or t
  misc_feature (832)..(833): n is a, c, g, or t
  misc_feature (837)..(839): n is a, c, g, or t
  misc_feature (847)..(847): n is a, c, g, or t
  misc_feature (851)..(851): n is a, c, g, or t
  misc_feature (858)..(860): n is a, c, g, or t
  misc_feature (863)..(867): n is a, c, g, or t
  misc_feature (869)..(869): n is a, c, g, or t
  misc_feature (877)..(878): n is a, c, g, or t
  misc_feature (889)..(893): n is a, c, g, or t
  misc_feature (897)..(897): n is a, c, g, or t
  misc_feature (901)..(901): n is a, c, g, or t
  misc_feature (903)..(903): n is a, c, g, or t
  misc_feature (916)..(918): n is a, c, g, or t
  misc_feature (924)..(924): n is a, c, g, or t
  misc_feature (928)..(929): n is a, c, g, or t
  misc_feature (931)..(931): n is a, c, g, or t
  misc_feature (934)..(934): n is a, c, g, or t
  misc_feature (941)..(941): n is a, c, g, or t
  misc_feature (945)..(945): n is a, c, g, or t
  misc_feature (957)..(957): n is a, c, g, or t
actgttttgcaaagacaaacattttatttttcatgataggagctgtagcagagtatatgggggcctctgccagcccccaggctgggactggggcctgtgaccttgagaacctcatctcacattctgcagactttggcggcggggcagtgctcgaccactggctgggtgggctggtctcagcctctcctgcaggcccagggctgaaatcataaccgtcaggcccagccttggccaaagataatgcaactttggcagggctggctgctgggagggggcaggcacttgctcctcgtagagcaagagtgggtttcttccctgaccctcccttccaccccggtagggtggtttccttaggaactcaggcctgcgggagaaatggttccagcttctggaggctgggtgggggtggggtggggtgngtgnnnnnnnnnnnnnnncnnnnncnncnnnnnnncnnnnnnnnnnnnnnnncnnnnnnnncnnnnnncncnnnnncncccnnncnnnnnnnncggcggcnnnnncccccnnnncncnccncnncccnnnnnnnnnnnnnncnnnncggggcccggggggcccggggngncngngcgcgngcccgcgcccggngngnccnngcgcccgnnnnngcccgccnnggncncggnccggngccccgggcccgcnnccngnnnncgcngccccgnccgnnnnnnnnnnnnnnnnnnnnnnnnnnnnnnnnnnnnnnnnnnnnnnnnnnnnnnnnnnnnnnnnnnnnnnnnnnnnnnnnnnnnnnnnnnnnnnnnnnnnnnnnnnnnnnnnnnnnnnnnnnnnnnnnnngggnnncggnncccnnncccgggcncccngcccgcnnnccnnnnngnccgggccnnccggcgcgccnnnnngggncccngncccccggcggccnnnccgccncccnncngcncccgcgncccnccgccgcccgcngcccccggccgggggcccgcg

SEQ ID NO: 130722 - DNA, 3097 bp, Homo Sapiens
  misc_feature (1694)..(1694): n is a, c, g, or t
  misc_feature (1749)..(1749): n is a, c, g, or t
  misc_feature (1839)..(1839): n is a, c, g, or t
gggctcagacaggtctgaccagtctttaatgggcaggcaggtgcccgaggcagcctccagcatgaggcgggacaggcattgcccggaggtcctctgggtggggagggcatgctcggtgcttgctgccagctggagccagggctgaggcgtgcagggatcctggccctcacggccaccctgggtgcttcaaggatgagggcggagctggcttcactggggcacagggctgggggcagcctccagtcttgccctgctgggcctttcggctccagttgaggaggggccggggactggcccacgtggatgccggggtcttgcaaccatgctccctctggctccttagaagccccctggggcccagcaggacgggccggcggtcccccaagctgggcagtctagagctgggcagcagcgacaccacctgcaggctggcgcccgcctctcccgcagccttcagctccgtcaccacctccgcgtgtctccaccacctgcatggctgcccattcactgacacaatgtagtcgccctccttcaggccagccgccgcggcctggctccctggaatgacggcagcgatgaggacaggcgagtctccccgaagcgtgaggccaaagccgccctctcctcgggtcaggtggacgggccccaccagccgccaccggttcttggctgagacacagacaggggccccagccgatggaagatgtcaggccccttccctgggacaggcgtggcatcctggcctctggcttctggtgggtcttaggctggatgtccggggcctcggcagcctcacagaagtcatcctcacggtcgagctccgcatacttggccagtgagcgctgcagcgtctgggagatcacagcccgaagcaggtccacctcgcgcaggacgcggcacagggcgtgcagccgcagcgcctcctcctgccccaggatggcacgcttccaggtgtgcccttgcctgcaacgcggggcactgtgatgtcacacaccaatgtgggcccgtgggcctgggacgtggcagaaggagtgggcaacgccagggctgtggggctcatcacagccactttctttgggggtgcgcgccacgggggtgaggagctggctgtgcaggagggctctgccacgtgcaaagcaggggccagggatgagctgctcccagtggtctcccacctgctcagaggctgcccagcactcctggggcccctgcgctgggccgtcacccatcaggcacaggccatccagggataggtaggtggcccaactcgtcagcacggggacagcaggtggcaaacagcatgagggtggtgggggacaccctgccaccgttggtgaccatctgagccccagggcactccacccatgggcgccttaccaagctgcctgcgctcctccagctcctgcggcagcacagggcctcggggcttagaggaggtggggggctgcaggaagacctgctcgtgcgtgggtgagctctccctcggtcggggagccgtcgcagaagggccatggctacggtggtagtgggcccagggagcgggaagtactcgggccttgacatgcaccagggcagtccaggagacaggcacgtagtcgtggacgggtggctgggccatggtccggtgcactagcctgtactcggctgccacctgccggtggatgtggcaggcacgcgagggccctcccactctnccaggtggtgcctgcttctccctacccagcctccacctgctccgaccaccatccncagcagcctccctggcacctcagttcctgctgctttgtgccatcccctggaggcagaggctcgggtccccaggttcctgaccagcccccncagggagcaggacaacagctggctcggggctgacacacaaggaaggaggcgggagagctcacgcatgcctggacctgggctctgaccccagctcggccccaccccctgcatcctgacacgggtgcccgagctcacctgggcggcctcctgcgccaggcgcagctgggccaggcagtcttggggggccatggaggcaggtggtgagaggccctcaaacacacattcttgggcctgggccatcatgagctgctccagtgcgcagagggacgcagcgttcatgtctgggcttcggcgcatgggagaagttctccctcagggaggctgaaggccccagcggccttctggaaggcctccatagcgcggcgggcaccctcggtgcaggagcggtcctggcgcgccccaatctgcgtgtggagggcaccgatgttgaagagaacgctgcccttctcgaaggccagggcacgctgctgggccgggaccccagtaagcgagtcgtaccagtggaagaagagcccgaggctcctggcaggggtgaggaagcgcgcatccaggaagcacagctggttgtaataggctgtgagcagctccaggcccgactcattccggctgggggtccgcatggcctgccgcagggcctccagctccctgatttctgcctcgtaggaggcgccgtcctctccaaagtgcactgagatcagctccttcagcggtgtagaccagtccagctccttggtctccttcaaggcaccagggggatcatggggacagtgacagcttcgctcccatgccggccagggtccacgccaccgctgagctcctccagctcctcactgtcagcaagctgcaaggttcggagttgacgtagctcaagcctccagggcgaccgtctctctcacccggttgttagctggtggctctgtagaggttctcagcagccacgtccgcaatctgcaagctcacttgtcaatcctgctggtgaatcctgggccactgcaggctcctgcagcatggcacagcactaggatctacagtcagtggagtcacaagccctgcaagcacgcagggcatcgtcccatcagccaggcagccacagcagccagtccaggccgtctcactccaaggatctatcgcacgcacaccgctgcgcatgggggtccctcggggtcagccagcccaccgctcgcgcagcagctccgcagccagggctagggccgcaccagcaccacaatggcacgcgggctcactgagtgcccgcgca

SEQ ID NO: 130723 - DNA, 905 bp, Homo Sapiens
  misc_feature (68)..(98): n is a, c, g, or t
aaacacagcaacaactttatctgaaccaggatggaaatctctccctttttttgtcaacagagttggcnnnnnnnnnnnnnnnnnnnnnnnnnnnnnnnattttttttcttaatggagatttgatcccagcctggagtgacttcggttgggaattaaagagttttggcttctgggagtaattttgttttcccaattctcagtccaaatgcttacacactggaaaattccaaattaaaagccacagaaaaggaaaggggtttagaacacattatctctttgctcgtacaaagtacaaggcgtttgtttttggatagtacttcacattctgtttcttgtccatgagtcctccaaatatgatgagttcacccctgccttgtaccacggtatgcaggctggtttcaggaggtccaaccacagaactgctattaaatactttccatttgacccgccccttctccttggtgtctttaatgtccagcacgtacatctgcatgggcttgcagttcatactctggtataggggtttgccaacatttagggactgtggagggtggtggcccatgcggcgagcaatgggaggtaaggaatgtccatctccttgggcaggccctgggcgagggatgggcactgtttctccactgctcaaactctggctcccaggagagcctggagaagacccaagaggaggacttagtgctgcagaggccgaggggcctttggaggacatcgctttgatggcttccagactccgacgcagggcacctggggagacggcccctgcaagggcactggccacgtgaggtggggtatgcacaccatttgtctgttcaggagggtgtctcatactttccccaactgtcctattgtccatgccatccatgggattactactggaagcgggtttc

SEQ ID NO: 130724 - DNA, 1882 bp, Homo Sapiens
  misc_feature (119)..(128): n is a, c, g, or t
  misc_feature (163)..(222): n is a, c, g, or t
  misc_feature (229)..(310): n is a, c, g, or t
  misc_feature (323)..(361): n is a, c, g, or t
  misc_feature (370)..(493): n is a, c, g, or t
ccaaggcggcccaggggttgtaatccccgggggtattcaggtttttcacacccgtttggaggggtttccacttcgcccgaagtcttaataaattccccccctttcccaaaaaaggccannnnnnnnnntaatttaatttggaatccccttggatcccctttgnnnnnnnnnnnnnnnnnnnnnnnnnnnnnnnnnnnnnnnnnnnnnnnnnnnnnnnnnnnncgggggnnnnnnnnnnnnnnnnnnnnnnnnnnnnnnnnnnnnnnnnnnnnnnnnnnnnnnnnnnnnnnnnnnnnnnnnnnnnnnnnnnggccccggccccnnnnnnnnnnnnnnnnnnnnnnnnnnnnnnnnnnnnnnnccgcaaaannnnnnnnnnnnnnnnnnnnnnnnnnnnnnnnnnnnnnnnnnnnnnnnnnnnnnnnnnnnnnnnnnnnnnnnnnnnnnnnnnnnnnnnnnnnnnnnnnnnnnnnnnnnnnnnnnnnnnnnnnnngtcagaactgtatttgttattcatacatttgcgttgatttaaatacattacgtacaatttctacattggattagaagaatgacacagggggcagcaacactctcgcagcccagcctccattccctgacactggaggcagggcctatggctggcagagggacggtgttccatgagtgccacccagaagcctcccccggcattctgggcccctggctcttccagagtccacattcaaggcaacctgagcacaggcttgagggagagtggagaaaggccaggaaaggatgcccacactcttgcctgccaggcccaggaccagctcgctcctacactggacccaatttccttctgatcacagagctggtctggatcaagacaatgtggagatctggtgtggaggctgtggccaggtgaggcagccgggctccctgttagacccccaggctctcttgagcaccagatgggcactttaccaacaggtttgggtaaaaatgtctacagagagctatgcacacctgggtccccttctggctcctacagtcaaggggcaagtgttctctcgaacattgttcccaaggccagtgtccgagtcagctgcatgtgattgtcggggctgggattggggcaggcaggcgagctgtaccttcgtccacagggcatgcacatccagctctcagaaattcttcctgtcagccaggtggaagcccgggacaagtggactcttggtggctggactggaaggggaccggcggggaccagcctggaccagctgaccagagggctgcacatctctgctctgcagccgggcaagcagaggacatgcagccatagtcctcactccctttctttggttgtttttcaaaccttcaagatagttactttctgaggttgactgaccaatcgcaaggtgccagaattgtgaaatgtccagtagcacagggcatgaacacagctgcccctccagacacagatggcaccctttttactccctcctgaggccgtactttgctttggtgtagaaatggctcaaacacctggcaagtgggggtggggagtgaggcagcaggggaaaagacacatggaagcaagaagatacgcactgagctgcgcaggacctgggacagtttgaaggcctctctcctttgggcctcacctttctcagggaagccatagagaaatcggcctaggacaagtcagagagaaaagggaaactgccacttatgaggcagaatccacgtcctgttacttccaccaagcagcagcggtagcacagaaaaaagtccaagaacctaatagcctgtcctcttggaagccaagactcatcccagagcccttgcagagacccactcccgaagacaaactgaactcttacatcaaaaaagttggggg

SEQ ID NO: 130725 - DNA, 968 bp, Homo Sapiens
gaggatccttggatgaggaacgtactacactgaggggtcccgaggaggtgactgcttttcaagctcaagcatgtagaagcgggaaggcaaggcttcagctcccctttggatgcaccactgggaagtcccgcctgtcttctaggaggtggtgaggtcttcttccccgttctggaaaatgatgccataaggatcgttcttgatgcgtttgtagacaaagtggaagatgtggggctgtggtcggctgtgcaggtccgccttgattttttgagggtaagtgtcctctgccagctgctgccatgtctcgtcaacgaagagaaagaggctgtactcctcagggtcccccaccttgaacttctcagcgcagatctgacacacatcctcagtggtgatgtaaggtctcacaaggagggtctttcctgtgcaaccactgttgacctcctgaaatgcaactcggaggtaattctggaagtcgtccacagaggggatggtccggttggtggttctccgtttgtgccactgcctcagggtgtctctggtttctgagctgagcagtcgcgctgcttgttcttcttggaaattctttatcagagaaagtgctccatatgcgcttgtcaagtaatagcctccttctccatgtaacagcgatgggtctaggagctccatcatgtactcgatttcagtgtccaattcaagcatgtcacactgggctatgacataggtcaggactggcaagaagtcatcagcgccatacatcctccctgagttgttctccatgaccgtgtaaatgagcttgcagacccgcaggagcagcatgaccttcttttctggcgaatacatcttctgcatggtcatgaacttgactttgattttctccacatccacagaatcaggggtcggcgcgaatacccccagctcctgcggattcctctgccgcacaagctgcaggttctccgtgagttgcttccatg

SEQ ID NO: 130726 - DNA, 1501 bp, Homo Sapiens
ggcacagaataagcaatttattgcaattgaattatccaatgtggttgactgaatataaatatttttattacaaaatattccaggtaaaaattcggagctgcttacaagcttctttagctttaagctcattgcatttcttcatgtctagagcatgggtgacgggctcaggtgtgcctggcctgccccgcagggtcctccttctccgtctgcagtgggtcccactcagtgaggacctctgaggacacctcagtgaacagatggtcccagtcccagccgacatcatcctcccggacttcgtgctccggcgcgagcactttggtgaggagtttcaggtcgatctccccatccagtgtctgaatggctgagtacttcatgaggtcattgtccaggtcacggtaggtcatcacccgctttatctggatgctgaaggaaagagagagcgagaggcgggaaccccaggcaggacctgttccaggagtgctgccgggccaccgtccccagaaccttgtatacagcaggggatgaccagaatgggaataacaaaatgggaaccctggatggagcccaacaccagaaagatccagattgacatcaaggtccactatagatgatatctggagtgtattaattcacgtgttctttgtctccccaatcatatctgatttaacctacctgggaggggctgccacctgcaaaacaaagtcttcttcctgtacttcctccagatccggaatgataggaatatctcctccataatctgatccattcaggctctgtggtctgaggcggaaatcttctatttcttcagaagccttcctcctaaacttcgaagccttcacggaatcacctgcccagcctccctgtcggcagcgaggtaatttagcagaggaagtctctccagtcagagtcaaagaggaattcttgccattgaggtgattctcggcctgcgctgactcctgttgagctcggcgacccatcttggccctcgggaagaaaggccgtccctgcctgcctcccttccatgcataaaacagtgcggcttttgcaggaacttctgcgacgaggtgtcccaaaggaaaaactctaggatgggagcgagtgcgaccccggccggggcttccctatcaccctgtgatcgatctgttctggggaagttcgcactcggggctctagaaaacggagaaaggctcggaaatttcccacggtcctagacgccggcggggacagggtgttttctactttctgaggattttaaagaaagcaaaccccaggccagcagcggcggagcccacagtggcctgggggcggggcggtgaggctgcctccttctgggcctcacccggcgcggcgcgaggcctgccgccctgagtcgcctcagagaagtcggggccggcggggtcgctcctccccacccgccaaatcctggcccccaaggcccccgaattggtcctcacggaggtagccaagctgcagcgaagctcctcgtccaagtcgagcaaat

SEQ ID NO: 130727 - DNA, 1197 bp, Homo Sapiens
  misc_feature (1040)..(1040): n is a, c, g, or t
  misc_feature (1055)..(1055): n is a, c, g, or t
  misc_feature (1063)..(1063): n is a, c, g, or t
  misc_feature (1097)..(1097): n is a, c, g, or t
ggaggagatggcacagaataagcaatttattgcaattgaattatccaatgtggttgactgaatataaatatttttattacaaaatattccaggtaaaaattcggagctgcttacaagcttctttagctttaagctcattgcatttcttcatgtctagagcatgggtgacgggctcaggtgtgcctggcctgccccgcagggtcctccttctccgtctgcagtgggtcccactcagtgatggcacagaataagcaatttattgcaattgaattatccaatgtggttgactgaatataaatatttttattacaaaatattccaggtaaaaattcggagctgcttacaagcttctttagctttaagctcattgcatttcttcatgtctagagcatgggtgacgggctcaggtgtgcctggcctgccccgcagggtcctccttctccgtctgcagtgggtcccactcagtgaggacctctgaggacacctcagtgaacagatggtcccagtcccagccgacatcatcctcccggacttcgtgctccggcgcgagcactttggtgaggagtttcaggtcgatctccccatccagtgtctgaatggctgagtacttcatgaggtcattgtccaggtcacggtaggtcatcacccgctttatctggatgctgggaggggctgccacctgcaaaacaaagtcttcttcctgtacttcctccagatccggaatgataggaatatctcctccataatctgatccattcaggctctgtggtctgaggcggaaatcttctatttcttcagaagccttcctcctaaacttcgaagccttcacggaatcacctgcccagcctccctgtcggcagcgaggtaatttagcagaggaagtctctccagtcagagtcaaagaggaattcttgccattgaggtgattctcggcctgcgctgactcctgttgagctcggcgacccatcttggccctggaggtagccaagctgtagcgaagctcctcgtccaagtcgagcaatcctccatctcgcctcgtngcgattcttggctcnagggcaanatcctaaatgagcgtataaatcgtatctgtcaanctgtcctgggtgaatgtatcgccaaatcaacaacaacagcgagaaaatgaagcgggggcaagaatggcatcaatatggtggccacgcgctccatcggacc

SEQ ID NO: 130728 - DNA, 737 bp, Homo Sapiens
  misc_feature (657)..(657): n is a, c, g, or t
  misc_feature (695)..(695): n is a, c, g, or t
  misc_feature (718)..(718): n is a, c, g, or t
gctataggagaaggtgttatttcggggtgcctgcccccagctgtttcatcttcttttctgaggctttgtctggaagcaggacctccacagtgaaattgaccttcttggcatgaatgaagctgtaggtgttgtcaaaccgcaggacatagatgccaggatcactgcaggtgagggtcccatcttcagggaccaggtgggagttgtacctctggttgggcagcacctttgtcatctcccctgcccgctgcctctctcccatcttggtcttcaggaaaatcccaaaaccaacatccgctccatctgacataaactgccacctgaggacacagccagggaagaggatctcatactccacttggtgggaggagccacgggaaatctgcacgctgtgttcatactgctgtttcacctggtctcgcacataatacttcctggggatgtcacccccgtagttgatcttggatttgcacttggggtttccatcagggtcagtcatggtgcccccatactccacaggcacctggtcagggctgatatgtttcagtaaaacctccttccaatttgctcccaggaccatgatcttcttacgagtgtcctcactcaggaagggtttgatgaggttataggccacaggaaacagtttggggggctttacancaaaaagacgcttcagtgtttcgggatattttcctcanacatgcagagaaactctccatangcctccacagcaggcttcc

SEQ ID NO: 130729 - DNA, 1073 bp, Homo Sapiens
  misc_feature (110)..(263): n is a, c, g, or t
  misc_feature (434)..(481): n is a, c, g, or t
  misc_feature (507)..(557): n is a, c, g, or t
  misc_feature (1056)..(1056): n is a, c, g, or t
gcggccgcctgctcaggtttgataattagccagaccagcaagagggctgataggcattagaagatagaatacatttagaatttagaataaagagtatagcccaatcactnnnnnnnnnnnnnnnnnnnnnnnnnnnnnnnnnnnnnnnnnnnnnnnnnnnnnnnnnnnnnnnnnnnnnnnnnnnnnnnnnnnnnnnnnnnnnnnnnnnnnnnnnnnnnnnnnnnnnnnnnnnnnnnnnnnnnnnnnnnnnnnnnnnnnnnnnnatctagtgggttattcagagatacactggtttatcagtctttttttcccctattcagcatcacttaattcacaatctggtttttgaaaatcagcttttaaaaatgtaagtagttttctcaataataaggcctgtcattttcttgataataaggcctgtagttttctgagannnnnnnnnnnnnnnnnnnnnnnnnnnnnnnnnnnnnnnnnnnnnnnnctgaggcaggatctcgctctgtcatnnnnnnnnnnnnnnnnnnnnnnnnnnnnnnnnnnnnnnnnnnnnnnnnnnnttgggctcaagggatcctcccgcctcagacttctaagtagatgggactacaggcctgagctactgcacccagctcatagttttcttaagacctcttcatgaaccaacagaacccttgtgtatgcattctccacaatagcgaggttcatcttcctaaaattttaattggatcacacaattgtccagctgctcctcagtagcatcatactgctcttgaattaaaataccaaatcctttgcatagtatccaagttctcatgtcttctccctctctcactatattccattgcaccacttggagggtggtcagaaccccagcccttccctgtctcagggccttcacacaaattgttcctttgccaggaaagctgctttttcctccctccctttgctttgctaatttctacaggtctgtctggtcttagtttaaatgttatttcctaatagaggtcttccattaggccccagttaaaaccaggatcctttgttatgctctctcangaacaccttatattttt

SEQ ID NO: 130730 - DNA, 715 bp, Homo Sapiens
cacgtgggcacaagtggttttattgtttctgcccggaagaggaagccctggcagcagcagggacacagagaggacacggcgctgcatcctgccggcagtgtggatgctggtggcaggagtccaggactgtgaagagctgtcagcatatgagctggagccgctgaggagctgcacctaggcctgcagaggccaccagcttgagaagggggtcccagcctcaccgatgccgctttcggatgctctgcagctcctggtagatggtgctgaagctgggccgctgcccaggctcataggcccagcactgctccatgagcctgaacacggcatcaggacacagctctgggcagggcagacggccccccttctccacaaactcccgtgtctgctgattgctgaggttgggatagggggaggcccccaggctgaaggtctcccagagcaagatgccaaagctccacacgtcgctttcggaggagtagcggccgtagttaagggcctcaggtgcggtccacttcacggggacttgtctgaggccccctgaggctgcatagaccccatcggcttcctctcgggacatcccaaagtcactgatcttcaggacattcttctctgtcaccaggcagttccgagcggccaggtcccggtggatgcagcacttgctctccaggtactccatgccagcagctgcatcccccaccatccgaagcagttgccg

SEQ ID NO: 130731 - DNA, 1205 bp, Homo Sapiens
  misc_feature (65)..(75): n is a, c, g, or t
caccttggagtacgtttaataaaaaagcaaagtgcatacagagatttacaacaattttaaagacnnnnnnnnnnntggtcctattatgtggtcccaacaatcaactcaaaagtctatgacaaatagaggctccgatgagctgtttataaatactttaggtacaattatactgaaagtcgagttcgtttgaaatcttcaaaaaaatgttcctgttaatcctcaaatggtgcttgttatagtttaacatttctgttaagtgcgtgcgttgaattacttgttatccaagcgcagcagctgctccttaccatttattgttaaggactttaactggccatcttcttcaacttctactctttcttgaccgttctcgacaattctctttgtagtgatttttctgccattaaccattttagttgaagttgatatcgatttgaagttgcccatgccactaccaccaaatgacgtggaagagaatgaagtgaggcccccgtgacctagtgacccaaatgaagtaaatcctgtatcaaaagaagaaaatccacttccaaaagacggaaatccactgaacgcagagaaaaacgaccccgtccctcggcttctgcttcctcggggaccccttcgattcccaaagaagtcctcaaaagggtcttcaaagaagtcaaatgaaaatgggtcccttccaccaaaaaattccctgaagacatcatctgggttacggaatgtgaagccaaattcaaatggactgtcaaaatgacttccacctcctcctccaccatttaatccttctttgccatatttgtcatagatgtcccgtttcttagcatccgacagcacttcatatgcctccgctacttgcttgaattttctctctgcttcttctttattctcaggatttttatctggatgccacttcagtgccagtttccgatatgcctttttaatatcctcgggtgaggcatgtctctgcacgcctagaacttcatagtaatccaccatgttttacgagattgttggaatgggtccgaggacagaagcggccggtggcgggacgcaggggaggcagggtgacggcccgaatctcctcacagctccaggactgctgcgctggtggtggcggcggctcctcgcgctttcctttctctcctttctccaacccccggccgtaatggccgaattcccgggcatatgtccggtaccgtcgactg

SEQ ID NO: 130732 - DNA, 551 bp, Homo Sapiens
tgcaatttagggcctttattgaccgaggagggtatggaggtttgagggccagtgagcccaccatagtggagcctgacctcagcaggccactggctggagctggaagtctggggggacactgcccaggccagtgcactgcaggtgaggttgatggtgccagggcgtaccacagggagcaggcagaacctctgtaaggtggccgtaaggaataggaagatacccgagtgggccaggcctgtgcccaggcacatctgctttgccgggtacacaggtgcacagtgagcaccaggtaccccagagccagtccaggctggtccccttcctcctctgcctgcacctgaggcaaagggcatgaaagcatcattgtcctggaacttgcccttgtccaggaagttggtagggttgaagcagtctgggtctttgaattgagtggggtcccggtgtgcagtcacaagcaggggaatcacaaaagtgccctggggatacatgcaacttgggttacctgcgggcttggtgagcacctgcaccacctccatccaagacgcttttta

SEQ ID NO: 130733 - DNA, 278 bp, Homo Sapiens
gtgtgagccaccatgcctggctgggctttttaaaaatacggattgctgggctgtaccccccagtgtctagttcagtagacctgagatagagcctgagaatttgcattctaacaagttcccagttagtgctgatgctattggtttagagtaccacacttggagagccactgttctgagccaaaaaacactgtgcactctccattaagtcaagttgttctcttgattaatttttgtcaagctgttgtcagatttgacatttcacagacctggaacatttc

SEQ ID NO: 130734 - DNA, 1090 bp, Homo Sapiens
  misc_feature (96)..(174): n is a, c, g, or t
ttccgagacggcttcacccatggtctgtcttttcgccatttcttcttggccttgcgccggccactggaaccactcctatctgactgattccctgannnnnnnnnnnnnnnnnnnnnnnnnnnnnnnnnnnnnnnnnnnnnnnnnnnnnnnnnnnnnnnnnnnnnnnnnnnnnnntcacttagttgttcagttagagcttcaacttcagacttgctgtcggagtccacgcgctcatccacagagtaggaatcatagtagagactgaagtcatcacccaccaccgtctcccactcctccagggacccggggtcccctttcgtcagggtcacttctcctgaacgccgggcagaacctaactcctccgacaggccacctcctgagttcagcttcctccttttggccagatctgaggtcacctttcccagtgagtggacatcatcactcatgcggaaatgctgtatttcagggggccgcttctcagggaccgggggctgtccatttcctggtttggacatggttttgcgggctcggtggaccttgggctgtccctctgggctcgtggtggctggagggggttcagaccctgctgctgcagctccctgggctcctggcatactcagtagcctcatagccaaactctggacagatggaggtgattttcccgcccctgtcattgacatcttggcccggctaggacaggaaccccccttgctgggggaagaggggaatgactttgtggcatggcccagcaggatccggcccccacggaggtccccatctccctcaagattctcagattcatccccaatgagtggtgtagcccctacaggggtgtcagccccctcatcaccaacagtgacagtgacagaggctggagatgaggggccagcaggctccagggagtcggggttggccttgggcagggtttcttcactacgaggggtgtcccccaaagagccatgaactctctcggtggctcctctggtttccttctccagcagcagcgcccccatctcagcgggggcctccccctcgcgccccccacgcagctcgcgcccctcgccgattcacaccagcctcgactagccaa

SEQ ID NO: 130735 - DNA, 3191 bp, Homo Sapiens
  misc_feature (2986)..(3066): n is a, c, g, or t
tttttattaccaaacccaacatttattgagaacaaaaggaaccagttggcatagaggcccgacttcaattcatcaaacttcaactgaggatggggaacacggggggtggccagccctgaagttgccctcccagggaggaaccagctctgggagggaggggctgtcagacctccagggcctggctgggatctctggtcaggaatgtgtgaaagggtggtggggagagaagatggcagcacccccaggcatgggctgcgagcagctggtggcagaggaggcggctgagctgtggccatccatgctggggagagagggtgtggtccgttctcatgtgttgacagggggcagggagccgagctcgggcagcagctcagggtgtgggtccaggcgggccagacggctctgctccagggcaatggcttcggctgagtgcttgcacttctcagagccacattggcaggtgaaatatttgcttttgatgtcccagaagcggtcgccatagtcaaaccctagctcctccccagtccggatgtctcgggaactgaagaaggcgatgcgtggaaatcgcaggtcttggtgcagcatgaagacccggacgggaatgatgttggggtcacacaggtggttgatgaagcggctgatgttgccatagtaacgggcatctatgcagtacacctctccatccttgttgtctaagtcgaagaggtaagaatcatcctctctcacatcagcctcagcatcagagatcagctccccgacatactcgcagatgaaggtcccctgtgggatggtctgcagggcgcggaccccccagcccatcttggctgttcggtagagctgtagccgcaccttgatgccactctgtacgacccggttcttgcagtttctccagcatgagcacgcctggttacactcgaaaatcagcggaggctcaatcttgttaaattcctggagcaatcgcccatccttgtcataccagcaccggatgctgagctggccgcacaggcagttggagctagagcagtcgtccacacacgtgcagtgctgcaggtgggtgatgttgcgatcgatgttcatggtggacgtctcgcagttctctgagatgtacttgtaatcctcagggcagggctccccatccacaccgttgacacagggaatgggcacgttctcatagccccgagccacgtcccgggcagatgatcttctctgtgcggatggcccgatttcccaccccaagtcggagcttgcggttgagttgaagcgcaaaccacacgtcggagcgctcgggagtcaggtcccatgctgtgtccccctctttgttccgcagctcagggttggccccacgtgacaggaataacagcacgcagtcatggtagctctcccgagctgcgatgtgcaggggggtgtcccccatggtagttgacagcatgggaggtcacagcgcgcattcagaagggacttcggcgatggcggcgctgcccgtgaaggaggcccagtgcaggcagatgttctcctcgttgtcagtgagggtgacgtcggcgccccgcgtcagtagcatgcggatcacctcgatgtgcttgtgctctgcagcccagatgatgggcgtccaccccccactgtcctgggcgttgacgtccacctgtcctgtgctcagcagcaggctgaccatctccaagttcccgattttggctgcgtggtggaggcaggtggaaccgtcctcctccttgctatagacacagccaccacgctgcaccatgtaacgggctacctccaggtggttgttcaccacggcctccatcagtggcgtccgctgctgtttgtccactgcatttatgttggctccagcctgcagcagcacatggcagatctccacggagcccttctgggcggctgcatgcaggggcgtgcgcttgctctgctggtcgctctggaagttggggtccaggttgtccaacagcatcaggatcaccttctgcagctcgccctgcttcacggacaggtacaactgccgagggtggaaacggagcttcttccgcctctctgactcctggatgaccagggccttttccagggcctcccggcctggccccagtggcagccccacggctgaaaggcagcccccattgggcagggtcagggagggccctgagctgtcaatggtgtcagccaggggatcgcagggcgggcgccggggttccccatgccctcgcatccgggcactggctgagaagtgtctgctctcccggggacatcctggtacagggctgggggtgcaggagctgcagtgccggccggtggggtcaccccgtcaccccgggggatggtcacctcttgagcttcagaagcatcctccccacagtggggacagaagaccatcccattcagctgagacacacaggccttgtggaagcggtgggccacacggaagtcagggtggcactccaggaaggtgcccgccgtgcagaagtagccgcagcccgggcagcagtggtgtttgaccatgcgggcgcggtgggtctcacagagcaccatcagggccacacggctggatggcctcatggtctcccgcttgaggatggcggcattgcagcctgacagctctccgtccacactctcagtggccatgcacttgtgccccgccctctcgctgatgcggtcaatcttgggtgcctccatgcggcagctgcacaggggcaactcctcaaaccctcgctctgtctccagcgaagatgtgtcattggacaccccagcgtggttgggggagagggtcccctcgctgggcagctccagggaccccagagggacctccatgtactcactggggcctgaggagcccacaccattcactcctcgtggctccttggcccgcggaggctcccgcttgcgccgtttccgagacggcttcacccatgggctgtcttttcgccatttcttcttggccttgcgccggccactggaaccactcctatctgactgattccctgannnnnnnnnnnnnnnnnnnnnnnnnnnnnnnnnnnnnnnnnnnnnnnnnnnnnnnnnnnnnnnnnnnnnnnnnnnnnnnnnacttagttgttcagttagagcttcaacttcagacttgctgtcggagtccacgcgctcatccacagagtaggaatcatagtagagactgaagtcatcacccaccaccggtctccccctcgtgccga

SEQ ID NO: 130736 - DNA, 837 bp, Homo Sapiens
  misc_feature (108)..(117): n is a, c, g, or t
ttcatgaaatgacatttattgtttaaaaaagcgtgagtccgggatttagaaggtggggatggttaaaaaagtttgtgaatttcctaaaaccactcaattgtacgcttnnnnnnnnnngcaagcttgagctgcctaagtcccgctcacacacactggacttgtactaaatgctcaacgattccattctctcagactatggaacattctgtcacatttttttccttcaggagatttccctaagaagagctgtttgcaaaatattgcacttaatttgaatccagggggacctgatgtctcctggaagaaaacgtacactcacatgccttcctgcctgcagcagatggcgggagtggtgggacaaggggctcaacatcagtttccatgaacattgtttccatcttcctctttgttatacacacagagacacagatttaaaggaaagtatcatctgggctgaaggcggtgaatggtatcccccaaacagggatgtgaacttttgaatgttttcagctcagaggcagtatggtcgtcctaatacctcaggacttatgttcagtgagatgttaagagacaggtggcaaccttggctcaaacactggacttaatttattttattcttgctagtctttcacttctcaaagacgatgctctcaatcttcatccaggtgaactgctcccactaatctagccaccattcagtcacaccctacgtcctcgtttcctcatgctttcagcgttccgacacctcagtgcacttgaactttagaggctatggttcggttgtccttcaaggaaaaaactgcaacatgaccatcatttgttttcatttcctgagta

SEQ ID NO: 130737 - DNA, 704 bp, Homo Sapiens
gccaaagccaaaaccaaccaaacaaaaatggaatttattggctgctgcaattcaaaaacccgtatatatttttagcttcaggcatggtgtatgtggctgttcaaacattatcttcagtcttttactgctctccaattctcagatgcatttttgctgtgtggacttcattctcacctctgtaagagtctagttcttcttctcagcattaaaaccaatgggggtgggcggggggagagtatttgttcctattagctcttgcaatcctgggactctaattgaaccatctttggtcatctactgacatctgaatcattaactgtggcttgagggatggatcagaggctgagtcaggcctgtgtcacacattccattcctgagtagaagacggaatccactcagtacatttcactggagtgtactattaccagtaaaagggggtaaaaaattctgggaggccaaaacgacaaatgtccagcacaggcttctctccagagtagacatgctcaaggtgacctagctgggaagaagtcccaaaggccttctcatacttgctacactcattgggttttctctccagtatggattctttgatgctgatgaagatttcttttgctagtcaaggttttcacactcatcacatacataggaagactcctgagtatgattctcagatgctttttattgttcctgagcatgaaggtttt

SEQ ID NO: 130738 - DNA, 776 bp, Homo Sapiens
  misc_feature (751)..(751): n is a, c, g, or t
gcggccgcctgtcaggtaataaaagttgtctcagagcagaccttagataaataatgcatgacagtctgtgacaaagactggcatctagtcttctctcttgtgagaccagttcattttccctggttgagattcccaggaaggggattcatgatgttcctttcagatgacctgcccttagagaaagaggggcaagagacaggagggcaggacatggtcagagagaccttggttcaaagccctcagcgtgccaaaccaccatactttggggtattgttttctgagatccaatattacttaacctctcagaaaagtgggaatggtaactatagactcagtggggttgttgaggtttagatgaaaatacatacaggtgctccttgatatacgatggagccacatcctgataagtgcatcataagctgaaaatattgcaagttgaaccatggtaaatcggggaccgtctgtgaatacataggtcagaacggtgtctggcacgtagtcaggatttgcagttgttctcactcagcattgggtcttagtctgtggtgggatagagcagtgaataaaacagacccgatttgggcactgatgtaatttatagtcaggttagtaaggcagatgtagattaatttcacatgtacacatttaattgcaattataagtgctagagaagaaaagcatgagatgctgagagaatgggtaacagggtttctaacctaacagttatgtggccctgggtacgtgactttcnctttcagatcttgaactccacctcg

SEQ ID NO: 130739 - DNA, 1202 bp, Homo Sapiens
  misc_feature (883)..(883): n is a, c, g, or t
  misc_feature (914)..(914): n is a, c, g, or t
  misc_feature (919)..(919): n is a, c, g, or t
  misc_feature (943)..(943): n is a, c, g, or t
  misc_feature (963)..(963): n is a, c, g, or t
  misc_feature (971)..(971): n is a, c, g, or t
  misc_feature (984)..(984): n is a, c, g, or t
  misc_feature (988)..(1086): n is a, c, g, or t
tttacattcatttcctcattttaatcctcacaacaaccctatgaggtaggtattatcaccatttacaaatgagaaacaggctcagaaaaattaggtcacttgtccaaggtcacacagctagtcagtggtggaagtgggatttgtctgctgctgaaagcccatgttctttttattgtacccatctaggtgagccttgagcaaaaggtaatttcactgcccaactctgcaaagagcaccagggagtcgaggttgccagccacactcaccgctggtagggatgcatggaagccgacttgatgttggtttttattccacttggcattttccctggttgacctgcctgagccatttgtaccccactgagcattggctgctgctggcttggagctcctgccatctgcacctgctgtaatcctgaggttcctgcaaggatcgtcccagctcctggctggcctgcctggccaggaccactgctgcctgaaggtctccaattagatagtcctttcccaaaggcaacagctgccaccaaggcattagtgtctgtagggttaaaggtctgcttgttcggccggagacctccactctctgattctcgctcctctttgctgattttctccagaaggtttgaacacattttattcaagctctggatctgcttctgggctgcatctgcaccaatgcgggcagcatctgtcgtcagttgcttctcctgttcttccacttcagggtcaggcttggttctcagatggtcagggactacctcatggctgaaaacaggcacccgtccttcagtctgccgcatgagatcttcatctcggtctggagacaacaccagaggaatgatgacctggttacggaacagcggtgttttttcatgcttcangaccttgttcagagtgttcacctgtccaganagcanggcaagctgtccacgacagatggncaggtcagccggccctcgtngcgattcntgggctcgagggncaannnnnnnnnnnnnnnnnnnnnnnnnnnnnnnnnnnnnnnnnnnnnnnnnnnnnnnnnnnnnnnnnnnnnnnnnnnnnnnnnnnnnnnnnnnnnnnnnnnaaattgtaagcctggggggctaatcggtgactactcacataatgcgttggccacgccgcttccattgggacctgcgtgcacggcatatgaccggcaccgcgggaaagggttggctg

SEQ ID NO: 130740 - DNA, 1070 bp, Homo Sapiens
  misc_feature (566)..(575): n is a, c, g, or t
  misc_feature (827)..(946): n is a, c, g, or t
tttttgaacatcaatttaaataactttattcagaggaatcctttggtccacttctgctgactcaacccctgcccatgccaacaaaggagtactaagaaaggcaggttagcctgaatgtctaaattcaatttgttcaactttataaaagcaggcaaagctactgggggttgccccctcccaccatcattctggtccaccatttgggccacaggcttagggaaatgaaggaaagtcgttttctttgaaggaaatcctggccaaagtcgagaaagtgggcaccattatgaggtcaactaaaccctgatggcagtgtgaagtgcaattcccttctccctccaaaataagaaacatgaatccaggggaaggggctttttcgtgtgctaaggaaaaaccctttcccacatagtcctgcctggcagagccacttcctgagaaagcctcgtgtgtataaggtggggtaaaggataggggactttatgactatttgacaggtaaaagccaagttggctccttagaggatggaaaggagagcaggcccaagcttcaccagagctgcaggtgggcannnnnnnnnnccttcctggcccagaagcttcttcaccttgcgccttagagggatagccagaatgaaacccaggcaggagggcctgcaaaaacagtgtgcctctaagaacacagaggttgctacagtttctggcagcacaaaataagcatagccttatttgatcttgtgtccatcagctcaccattgacgtgaggcagtatcagattagggtaagttctggatcaaggactgtggagggtggtggggagaaggatctgtagannnnnnnnnnnnnnnnnnnnnnnnnnnnnnnnnnnnnnnnnnnnnnnnnnnnnnnnnnnnnnnnnnnnnnnnnnnnnnnnnnnnnnnnnnnnnnnnnnnnnnnnnnnnnnnnnnnnnnnnaactccccagagagttcttcagatcagccacttgactcagcagtgcatctaatgatgcctcaagctgcttctcctctctctgcattgcggcggccgaggcggctgccacgatttcacttccccc

SEQ ID NO: 130741 - DNA, 883 bp, Homo Sapiens
  misc_feature (286)..(286): n is a, c, g, or t
ccggaagtgaaatcgtggcagccgcctcggccgccgcaatgcagagagaggagaagcagcttgaggcatcattagatgcactgctgagtcaagtggctgatctgaagaactctctggggagtttcatttgcaagttggagaacgagtatggccggctgacctggccatctgtcctggacagctttgccttgctttctggacagctgaacactctgaacaaggtcttgaagcatgaaaaaacaccgctgttccgtaaccaggtcatcattcctctggtgtttgtctnccagaccgagatgaagatctcatgcggcagactgaaggacgggtgcctgttttcagccatgaggtagtccctgaccatctgagaaccaagcctgaccctgaagtggaagaacaggagaagcaactgacgacagatgctgcccgcattggtgcagatgcagcccagaagcagatccagagcttgaataaaatgtgttcaaaccttctggagaaaatcagcaaagaggagcgagaatcagagagtggaggtctccggccgaacaagcagacctttaaccctacagacactaatgccttggtggcagctgttgcctttgggaaaggactatctaattggagaccttcaggcagcagtggtcctggccaggcaggccagccaggagctgggacgatccttgcaggaacctcaggattacagcaggtgcagatggcaggagctccaagccagcagcagccaatgctcagtgggggtacaaactggctcagggcaggtcaacccagggaaaatgccaagttggaattaaaaaccaacattcaagtcgggtttccatgcattccctaaccagcggtgagtgttggctggcaagttcgaattccg

SEQ ID NO: 130742 - DNA, 2558 bp, Homo Sapiens
  misc_feature (1658)..(1670): n is a, c, g, or t
  misc_feature (2448)..(2486): n is a, c, g, or t
gtcctgcgcattgccatcattggaagacctacctactttagctatgcatttcaagagctcacacctatattgctggcatatagtcaacatggtagtagaccatgctctgctgatttgatactttagattctgctatattatgtactggggacagctttttgtcgctttagcattgcttcctagtttatcagcatgatgtcaaatgatctttctaacttagtgttaggagtcaatgtactttgtccatctgtaacctctttaggttgtctaagagttagagtagtactgaatttcagaccgttcaaacttgatcatcacataatcctttaaatattacttagccttaaagtaaccatataatcctgccttctgttgtcgggggatggggggagacgatggggaaggaaatggaacaagttgtgtttgtgttagcatgtgggtgatgtaaacttcaaattgggagatgttccgacccccactcccatataagcattcaatcagtgtaacttgcaaaatgcataaacatccgacagtttgaatttatagtgttgatggaagaaatcatttttaatgtgtactgtaaaacttgaaatactcaggagctgagtgaatatgtttgttgctacttacaatcccgacctgttagtcccagtagttttgttttaacatggtctttttcaactttgtttcctgtttaactacagatgacttctgttgtagactcacaagtttaactgttgtattataacagtattacatgtcaacggtgtggttatgacctttatttatataaaaaccaaatatttagtcaatttaccgtgtcttaatttaatctttgtacaccttccatttttaagtgcttaaatgagtactatattgcaataaaatgtagtgatataattaaccagccattaaaaatttacttctacagatacagtgtcaattgagtttatatattaggtacttgcatactttttatgattactatgaaaattagagcaattaaaattaatggtttctacaattaatctgagttctacaacctaaaattgccttcagtttactggcatccctggattagggttagacctgatattgtggctgacacagaaaggcaacaggaaattaacttcattattttcatattcataatatggcatatgagactcaccaggcaagcaaatccccagactggttaaaagtaaaaatttaaaagctgttagctatattttgtgcactgaatctttaatagcaaattgtctacaggctgcagttagagactttgctggaatatccatttctccttttagtccgtgccatttttgccacccctctaacccggggagagtagaagaggtgctgttgctgatgtgggtatggcttgaattcagttaaatatattaaaaagaaaacaattccttcttaaaccactttttcctctaggattgcaaggcacagttctactccagaagaatgaaatgtggttgagcacttcctcaaataggtttatgatttttataatgatcctttaaaatgatctatgaatgatttattagataaattctatacatacaaagtacagattcttcatttagcattgatttacttcttagttttcatctttctgaccatccaccgtcttttaaacctcttggcannnnnnnnnnnnnggattccccaagcattattcaaaaactggacagcagctcttttcactggtaacctcttgttggcaagagacaggaacttatttacagtagtcctgttggttcctggcccatataatgaattatgtatgaaggcttgtgctgcttgttgccttgaatctctcagatcttggtcttttagccttacggccaagtagcttttattctggctgacagactgtactttttgtactttaactttcttggagtcatttcctttttcacagtcttcatttttcttttgcaaattaacttctttcacctttcctggcgatttcttgatgttagtctgtgaagctgtggttaacttctccaaaatagtgtctggaaggagttttcttttcttctgttcgatgaacagctcctcgcgtcgcttcctcttctccttcaggagcgttttatccctgcgcacggtctcccgcactcgccgctcctcttctctcgcttccgcctgggcgctggcgaaagtcagctcctccggggcctcatcgtcaaactcatcgtccccttcctcgtcttcctccaggggctcggcggccgcgccgctgctgggctgcccgagcaacagcccgtgctccgcctcctcctcctccgaggccagctggccctcgtccaccatcgcctccgccgacgccggggcgcgagacgctcgcggtcggagctgcaccatggcccacgcagcgctagaccccccggccgtaatggccgaattcccgggcatatgtccggtaccgtcgactgnnnnnnnnnnnnnnnnnnnnnnnnnnnnnnnnnnnnnnncgcttcctcgctcactactctgctgcgctcgtcgttcgctaacggccgagtagcgccctataggatcgatca

SEQ ID NO: 130743 - DNA, 674 bp, Homo Sapiens
agagtccaggtctgtcgcccgcgtcttcgtcggtggcagcagggctgactggccacggcggccatctgctagagcgcatttcttcccatgaaacgccacctcctccgaagtgcggagcgaacgcagccaaatctacacaaagactgacaagctggatccactcgacggaacccagggccaaaaaacggcggcgagcagcgcctcgggcccgcgattaccggttttctgagcaccggacagcgtgagccgtgccagccctgtctcgccatcccagccgaggagggcagcgcgatggctcttccctgccttgaaatcaaccccattgccagccgctttcgccggcagagcattttccgtggggtccatccggctccaaggcggcctgcgctggccacgtggaaagaaacacgcccactgcctacaggccacgcccttcctcccttcgcgcatgcgccccacccgtcctgaggacctccgaacctgcagggggcgatgaaagtaggcttgcgctccgcttgtagctgcttccgggtcagaggtcagacggtctagcgctgcgtgggccatggtgcagctccgaccgcgagcgtctcgcgccccggcgtcggcggaggcgatggtggacgagggccagctggcctcggaggaggaggaggcggagcacgggctgttgc

SEQ ID NO: 130744 - DNA, 1022 bp, Homo Sapiens
  misc_feature (478)..(478): n is a, c, g, or t
  misc_feature (690)..(890): n is a, c, g, or t
tccagatcaaccttgggaaaatcttttattagggaggacagcctgcaaaatcctccctttaagagcccaggccagcctagaacctccagaccacagaaggggagtcctggggacaggactggtgtagacaggcatctccaccgccccggttagccagtacctaacacccactcctgccctcggccgatgtggcaaaccggggaggcttttgtgtggggccggggctgcggccatggcagccaccctccagctcccgggggctggggaagacgctggggtccccgtggaggctggagcggcgttcaggtcctgcggtcactcggcgtgctcctgcacctcttccccacgcagggcctgcagccggctgcccacagtctgctgcacggcctccagcccctctgcatccagctcccgcagcagcagcaggaatggcagtcaggacgttcctgcccctgtggctgctcgaggcatccctggnctgagagggaaggaaactggcccccgggaaggcggcttcaggccacgttcatcctgggcgccgctggttgcctcctcctcgctgtccagcgggtcccggccagtctcagcagcggagctgagggagctcagtgtgcagcatagcttggggccgccgtggcctgtgccctctctctctggggccgcagtgatcctcgtgccgaattccttggnnnnnnnnnnnnnnnnnnnnnnnnnnnnnnnnnnnnnnnnnnnnnnnnnnnnnnnnnnnnnnnnnnnnnnnnnnnnnnnnnnnnnnnnnnnnnnnnnnnnnnnnnnnnnnnnnnnnnnnnnnnnnnnnnnnnnnnnnnnnnnnnnnnnnnnnnnnnnnnnnnnnnnnnnnnnnnnnnnnnnnnnnnnnnnnnnnnnnnnnnagctgcattatgatcggcaacgcgcggggaaggcgttgcgtatgggcgctctccgcttctcgctaatgatcgctggctcggcgtcggctgcggggacggtcactcctcaaggcgtatacgtatcaagatcag

SEQ ID NO: 130745 - DNA, 1027 bp, Homo Sapiens
  misc_feature (50)..(50): n is a, c, g, or t
  misc_feature (145)..(145): n is a, c, g, or t
  misc_feature (169)..(169): n is a, c, g, or t
  misc_feature (277)..(277): n is a, c, g, or t
gaggccagctcaaatctcttttaaaaagccagcccacctagactgccacncacaaagggaattcttgggccagactgtgtaacaagcattctcccgccccggtttagcagactacaaccattcctgccccccgggccgatgtgcnaaacggaaaggctttggtgtgggnccggggctccggccatggcagccactccaaatctcccgggggcttgggaaagacgctggggtccccgtgaaggctgaagcggcgttcaggtctgcgggtcactcgcgntgctcctgcactctcccccaagcagggcctgcagccggctgcccacagtctgctgcacggctccagcccctctgcatgcagctccgcagcagcagcagggatggcagtcaggacgttcctgcccctgtggctgctcgaggcatccctggctgagagggaaggaaactggccccgggaaggcggcttcaggccacgttcatctggagcgccgctggttgcctcctcctcgctgtccagcgggtcccggccagtctcagcagcggagctgagggagctcagtgtgcagcatagcttggggccgccgtggcctgtgccctctctctctggggccgcagtgatctcctctccctcactcagtgcacgggacagctcctcctccgtcacagcctggttgtccagcttctgtaggcgcggcagggtgcgcagcacggtcatgcggtagcggtgggggctggtgccgcagcacgggttctcggccatccacagcacccgcagacgcggcagccccttcaggtagaagagctcagccaggctggggatgcggttcctccgcaggtacagctcactcaggcgctggcaccggctcacaggctccagggtggagatgctgttgacactgagcgtgatcacctccaggctgggcatctcctggcaaatggagatatctgtgaggcggctgccccagcagttgagcttgcgcacgctgtgcagctccgaggccttggcccgggtcagaaccatcttccgcgt

SEQ ID NO: 130746 - DNA, 624 bp, Homo Sapiens
cctgggatagagggaaggaaactgccccgggaagggggcttcaggccaaggtccttcttgggcgccgctggttgcctcctcctcgctgtccagcgggtcccggccagtctcagcagcggagctgagggagctcagtgtgcagcatagcttggggccgccgtggcctgtgccctctctctctggggccgcagtgatctcctctccctcactcagtgcacgggacagctcctcctccgtcacagcctggttgtccagcttctgtaggcgcggcagggtgcgcagcacggtcatgcggtagcggtgggggctggtgccgcagcacgggttctcggccagccacagcacccgcagacgcggcagccccttcaggtagaagagctcagccaggctggggatgcggttcctccgcaggtacagctcactcaggcgctggcaccggctcacaggctccagggtggagatgctgttgacactgagcgtgatcacctccaggctgggcatctcctggcaaatggagatatctgtgaggcggctgccccagcagttgagcttgcgcacgctgtgcagctccgaggccttggcccgggtcagaaccatcttccgcgtcagcttcatggcggccgc

SEQ ID NO: 130747 - DNA, 667 bp, Homo Sapiens
  misc_feature (550)..(584): n is a, c, g, or t
ttttttcaagtgtttgctcaaaaatctttttactgataggcatggctacacaatcattgactattagaggccagaggagaatgaggcctggcctgggagccctgtgcctactagaagcacattagattatccattcactgacagaacaggtcttttttgggtccttcttctccaccacgatatacttgcagtcctccttcttgaagattctttggcagttgtctttgtcataacccacaggtgtagaaacaagggtgcaacatgaaatttctgtttcgtagcaagtgcatgtctcacagttgtcagtctgccactccgagtttattgggtgtttgtttcctttgagatccatgcatttcctggttgaatctcctggaactccctcattaggtatgaaatagcatgatgcattgcataaagtcacgaaggtggcaaagatcacaacgctgcccaggagaacattcattgtgataagcaggactccttatagacaggtacccccggccgtaatggccgaattcccgggcatatgtccggtaccgtcgactgnnnnnnnnnnnnnnnnnnnnnnnnnnnnnnnnnnncggccgcttcctcgctcactactccgctgcgctcggtcgttcggctaagccgagctagcgccctatagtgagtctatacactt

SEQ ID NO: 130748 - DNA, 934 bp, Homo Sapiens
  misc_feature (818)..(852): n is a, c, g, or t
  misc_feature (877)..(877): n is a, c, g, or t
atttctcagatttccttttcgacgccccaaaggtctgtaactgcttttcgaaattttttgccttcttcttcattggcaaaataagagccacttgaccaatattccccagcaaaggtatgaaatatcctctaggactattatatacaaggttattgtatagctcttgttcccacgatagtttcccatccttaatgtcagatattcttcacaatcaagatctctgtggcttgtccttaacaagacaagctacaccactgcacttctttgaccacatacagttccgatctgctgcatataactgcaccactgctgaagacatagtcacacatttcttgccgaggaaagtgaagagggactcgttctcctgcggggtgagcaacagagaccccacgttggtgaccctccgcggcgctggcggctgctgctggacggagctcatggtttcgccggcggggttgggagtccagggccgtctcctccggcgagtgggcgagagctcgttccccctctcggtgacaggggcggggagaagtggagtcagaggcgccacatctcgcagctcctccggagcggggaggaggacgaggtcgagggaagcaggcgctgacggcgagccaccttcgcgccgcgctgagaaagggaagctcccggcacccgcccggccaggctagggccggatggtcgttgtcctcgcactccggcgactgcgctaaactcccaactcctcccccaaccctcccgcagcggcggcggcggccgcacaatcccccggccgtaatggccgaattcccgggcatatgtccggtaccgtcgactgnnnnnnnnnnnnnnnnnnnnnnnnnnnnnnnnnnncggccgcttcctcgctcactactcngctgcgctcggtcgttcggctataccgagctagcgccctatagtgagtctatacatt

SEQ ID NO: 130749 - DNA, 2106 bp, Homo Sapiens
ccccttttctccttttatgggcccccttggggaaccccccaagggaaaacccccgggaaaataaaagaaatttgttttgggaggtttttttggcacgccccttttgtggcccccccatttaataggggggcccccaaaggggaaccccagggctgggggctttaagagtgggttaaggatgttggggggtaagcctccccaagcccgaaatccctttcggggaaaaattattttgcctttaggagttggggttttcaaaaggagggcggattttcccccctaggaggaatcgggccaatgaatagagacatttttgggtgtcatacttagagtgggccaggggtgctgctaaatatcctgtaatgcacaaaataggaaacagttttccttacaaagaacacttcagcccaaaatgtcaaaggcatctcggttgtgaaaccttgttctagagcctctccctgctcccgtgctgtgaggatcttaagactcctaaactcacagatgattgttttcaacctatttatctcaccatcctcaatgatcagaagtccaccttgagatggacttactcctagttctgccgcattctgggtttctttccagacccctcttcctcctctcacctgggccagcagggaggttggcagagggcaggaaagatgccccaaaacttaaatggaatgtcatcaggtgaagagctacctcttaccttaactcttattcggtgggaaacaaggttcctaatagggatagagttaagggcggaggcaacagcaggatgaggataattaagagaacctgaattaaatttttaatattttaaaaaaggaaagttgctgggaagctggtaaacagaaacagaagattagaggcctaactagaaagagacactggtgttagcagagagatattgaggggctgtaagcctaaggtttgaaatctaaagatagagtggaaaagggagtaggcacccccaccagcccctgcttgacatctgctttagttcattccagcaggaaggaggagaagggcagggaggtagggagcttctcagcaaagccagcttcagctttgataatctcacccacctaccccatttaaggagttccaggtttaagagtttaaaaacaggtggcacccagaccatcattcaggagacaggaactcattccaggttcctagagaactcctatctcagacctgagggtttccagggcttcagctgagctcctctggctaaccagtagtcacttgatcagtcctgctgccttgaccccatctccaggaggggctatggccagagggagtagagggagtccagcccccaagccttgtgaggcactgttaggcagatagggaaaagaggggtccttagatcactggttcaaggagggatctggtaggggcagcatttcttctgggctggaaacagaatgggggtttcaagatggcagaaccattccattattggagctataagcccctagaattgctccatggcctatctcggtttcccttggatctcatctgctcctgaactgcacctgtcatggcaagtccatctccggcccccatctcccctgagccaatgtgagtcaggtgaacaaaattcattggttccccaatcatggtccggtcaatccgtcttctcttcttcttcggctggggtttctctaccacacagcagcccagtttgtgccaaaattcactcatgttccctgatggttccagcttcactcctctgtctgaggccccaaagggctctttccctggtgtttggacaacccactcctcactctccccagatacaccaccaccctgggttcactcagctggatgggtccagacaaagtggaatccctggaacctttaactgagcagtgaaggtcagtgtctcagagcctgagagatgaacaggaccagagagagaggtgggcaggcaggcacaaggttatgtcttcctcagactcggaaccctgctcttctccaccatccagacgttcagctacagctggtgggggtgagggactctgctccgtggccgccagtgtgggcttcccgggctagctctgcggcgaggtgggggagccgagtacgagccggcag

SEQ ID NO: 130750 - DNA, 823 bp, Homo Sapiens
  misc_feature (771)..(771): n is a, c, g, or t
  misc_feature (796)..(796): n is a, c, g, or t
ttttttggactagaatataaaaatattttttaatataacaacaacaaaaagaagcaaaatacacattgctgcttcatgactcctacaagaggaatgcctgcagaaagctgtcttagatcatgctggccagctaaatggccctaggggctcagtgctgggggccagggcaaggagggccagggtggagtctctgggaataggtggaaccaactgcatcacacaggtagcgggaatgcttcctagagaacaagagatggggcaccattgaatgcatggcgagtgcagcgtggtctccacctcagcctgaacctcatcacctctgcggaagcatgaggcagtgccagcactgccctctttgtcagacccactggctgactgcacagacttcaactcacaggctgggcaatgacaactgtcccactctatttgtactcttggcccccatctctgccctctcacactgcactggaatggcatgctgacttggctgcacaatgggcttacagaataggtctgccatgaacattagagaagtcacgtgcctttagatcagagatggctaaactgggatccagggctggttttcagagatccatgaatcccctgaattatatgtccaactttgtacatcaacgttccctgggcttctcatcaacatattaaagaggctgtgactcaagaagacaaaacctattactctgaactccagacactcagcctttatggctacctgtcccatgcaggaacttgctggaagtggcactgatatcncattcctgtgtacagagacttccangagcagagagcatctttgggagatctg

SEQ ID NO: 130751 - DNA, 1307 bp, Homo Sapiens
tttttttcggaaactacacagaccatatgttttatttaatgtgaaggcacaactttaacattaaaagcaaagcgttttagttatttatgatgtaactgtcagtaccagctcataaaaatatatttttgcaagcatatcattgaagactctttcagattgtcaattcaaaagtcaatttaaaaagtcgaagtctatttgtagaaaatcaatgacacattatagcagttccacataatattattgctggacaatctgttcaccagatatcacagggttttcttcatttgttgcacaatccaaatggtccatcatctgatagctgttacctttccagaactttttcatttccttacgtctccaggcaacaactgaggcagtaataagtgtgcaaggtactaaatagaggagagcaggttgcccctttttcatcagcaccagaacaacaaatgtaagtatcatgccaatagcataggcaactgtagacgaaacatagtatatgtaagaagaaccagtctgaacatcaaatcttctacagtatgcaatcaacaggcctggtacaataatgtctccaaaacccaatattgaaacaggcatgaggcacacactcattactgagaaatagatcagttttggtactctgatgactactggcaatttctcatggggagctgagggttgaccagtggcttccaccaagtttccatcattcttttcattatttccaaaaggtccagctgcgagttcaaccatgatactctcaccattctttgtgatgaatggtgttatgaaaacaaaaaatacatcatagaggaggagaaggcctagaagtatcacacatgacttgaagttgggcaacttcagtgttttaattaaattcagacagaaagcaatccccaagatatcctgtaaaatccaagcccacctgtcttcatttcgaaacacagcccaaacaacagctactgctatgcacagtccagagagaaaaataagtctcacttccatgtttttgccacgacatgcaatcgtgcattgtccatatggtatcttatgaattagtgcagcaagacagttgtacagactcattgctgatgctatgcagaaaattgctatcataacataaaccaaccatttgtagaagaaataaagtaagaccatcataacacagcagatgaccacaaatattacaactgtaagaggactaaaagttaaatattcttccttctttttcctcatttctctatcttcagttgtcactgctttcaagttttccaattcaactagtccactccagtatccacctaatgcca

SEQ ID NO: 130752 - DNA, 747 bp, Homo Sapiens
  misc_feature (40)..(40): n is a, c, g, or t
ttcggcacgagtttttgttttcatacaccattcatcacanagaatggtgagagtatcatggtgaactcgcagctggaccttttggaaataatgaaaagtgtgccagtagtcatcagagtaccaaaactgatctatttctcagtaatgagtgtgtgcctcatgcctgtttcaatattgggttttggagacattattgtaccaggcctgttgattgcatactgtagaagatttgatgttcagactggttcttcttacatatactatgtttcgtctacagttgcctatgctattggcatgatacttacatttgttgttctggtgctgatgaaaaaggggcaacctgctctcctctatttagtaccttgcacacttattactgcctcagttgttgcctggagacgtaaggaaatgaaaaagttctggaaaggtaacagctatcagatgatggaccatttggattgtgcaacaaatgaagaaaaccctgtgatatctggtgaacagattgtccagcaataatattatgtggacctgctataatgtgtcattgattttctacaaatagacttcgactttttaaattgacttttgaattgacaatctgaaagagtcttcaatgatatgcttgcaaaaatatatttttatgagctggtactgacagttacatcataaataactaaaacgctttgcttttaatgttaaagttgtgccttcacattaaataaaacatatggtaagagtagtttcaaa

SEQ ID NO: 130753 - DNA, 1033 bp, Homo Sapiens
ttttttaaagtgacccagttttattttggttttggaggccagacagggcattgctccacgggttcgggctgtacaaccttcccctccttgaggtgggaggcccagcaaccacagggcccaggcagcggggtgggaggctcaggagatggtggctctggggacccgatcccgaggagagagggggcagcaggcagaggcctgcaatggctcagattgggggaagagggcggcgagggggagaggacacgatccaagaaccagagtccgaaagctgaagctggtccggtctctttcactttacggccgaggctggggtcagagaagtgaagccaaactgtcctcccgcaggaggcaaggcctggagggacgccagggtcccagtccggtgccgggccctgcgcacacagccgccgcctccaccctcgcggagggcgcgcgcggggcccagtcgctgggtgcagggtccggcgggcagtcgggccctttctcctctccggcacgccgggcgggcgccggccgccctcagcagctcacggagccggcgggcggcgcggaccccaagtccgagaagcagtcgaactcgctctggcccaggaagagctcgggcagctcgcgcacgcggtgcagcccgagctccagctccagcgatgtcagcgcctcctcgtcgatgagttcggcgtccatgccgcccatggcgtgcgctggcggttgcggggctgcggttcttggggcccgctgccggccctgttgtctctcggtgctttgttgggtttggtcttcttgtccgtgtatgcctcttcatatgacgcctttgctctatttctttctccgggctggcccgcctgtatggttcgtttgttcaccgtgtcttgtagcccgtttgtcacggccctgtttgtgtcggcgcgttcattctcctgctgtgggcacttttgttggtgcacgccgtcttcctgcccgttattgcgctctttggctatccttgacctgcgtgcctcacttgttcgttttcatctttcttctttcccgcctg

SEQ ID NO: 130754 - DNA, 828 bp, Homo Sapiens
  misc_feature (138)..(138): n is a, c, g, or t
aacacatcaacaccacgacgtctacgattacttgctattggccctcggatacatttaagagaaagagacagtcactcttttttttcttaaatgatatacatataaacagttatttttatcctattataattgtctttngtctttatctagtactatgtggaaagggtttgcatcatagatttttcccagccttataatataccataagctcctacttccctgcccctccctaatcagtattctttcaagagttctttggtgaagccatctatctgaaactaaaatgaaccaaacccatatttcactggtggttggagaaaaccatggccaaaacggttgtggcaggtcttcaatcttgggagtttttaagaaggaatgtgccagaggccgattcccaagaacagagttttcttttgttttgcagaggcattcaatgtgtctagtgcttgctggccacagcagttactaccacagagccttctgggaggggccgttgtgttgaaggaggctcctgcctgagggacagcatcaggcagtgggctctgtagagtgagaaccaggtggaggccttctgtgcccagctcagagttctgcaccacgccaggactgcccaggccaagggctactgacgcaagttccactcattccactctgtggggggcgccttgggcctctcctggaagggctcttggagaaggaattggagttacgtacaagtgacctaaatgggaagcttttctagatgagattggattaaattccatgtgatttctctttccctttaatccaggttgggactcgtttctttctggtggatcacagctgccc

SEQ ID NO: 130755 - DNA, 1339 bp, Homo Sapiens
  misc_feature (600)..(600): n is a, c, g, or t
aaaaactaagaccattgtttgttccatagaaagctcaagttcagatacagagttggccagatgctggtctgccacggaggggtagagccttccatcccttccttgttccagacacagtgtgtcacagaccccagcagactctgttcattgtccgcagccaagccaccaagaattggtgatcatttgacaaggggcagggcagcccttatagctgtttccaagctaggagtgggctattcagagatattggaggcttggtcccaacaccacaggtagatgaggaagcagctaggtaaaggctcagagatgagaggagtccatcttccaaggcagtgggataaacagccaaggcactaatatggtttggcacctgggagcttcaagtaaagttgagcatgctgcccactgaaaagccaaggctctcccagacacgggtgggcttcacctgagcacggcccagtgccatcaaggccaggggccctgtgtcctcaggatgctaacccaggcctgcattccctgcttcatctcagaactgatcaaggcatgactacaaggataatgattgatcctgaactgatcttggtgagcaccggctttcanaggaggcatcttgggagccttcccttgctccaagtaggcggctgctgtgactgggagctcccttcagagcctgcacggtctcctgaaagtctccgggtggcaagctctgctggggaccaggtttgactttgttaaatagcaaaacagatttagagtcaaactgagcccagaaacggagaatcagactggatggtgctgagtctgggggaaaatctggtgtgaccaggtaataatggagaccaatttacctgaatggctcgaacaggctctgagagcaatgggaagaaaaggttctccaaaatgtttctggcaatggcagccacagtgggatagctaagggcacagtccaccaagcactagggtggtcaacaatgaaatgaacatctctggctcttctgcagtcagaaactgaggctcgggactctataatcagaactccttcaggctcacttgggctcccctccacccagaatgtcaggaatctgtacttccagagaaaacactaccaccaagcagcagctctcaggaaagctagaaatctccaccccaaatatttcaacctcaggctccaacttaggtacctatgatttaaatactctccttttaaatactttgtaaaaactgcttttccgagccccttttatgctctgcagttgccatatccactaggtggtattgcaaataagtaaagcatcctggccatgacgctgctagtgagaatccctgaccaaagtactct

SEQ ID NO: 130756 - DNA, 1202 bp, Homo Sapiens
  misc_feature (646)..(646): n is a, c, g, or t
aacagtacagctctcagaaaattgtatttgcacaattcactggggtaaccggacaaaggtgctcaaagctggaggcaactgctcaggggggttttggctgccctggaccacccagccactccagggactgagggatcaatatcctgggcacatctgttacccattcatgactcataggacgtttttgggaagctctgttctcattcattctgtatgcttcagctgagtgagattgtttttaatggaaatttgacttttgctctcctgcttaaaacccagtggcattccattgccttcaagataaattccagaactttaatatggcttaagaccccacacgatctgactcagcctcaccagcctcatctctgtattctcaccctttctgtctctgtgcttcagtctccctggttgacattcagttctcccaacttgccggactccatttatctggaattactctctccccactctcacctctcctcttgttaattcctgctcatccttcagagctgagttctcaagtccctctgtgagttccttgattccatcagatgtttcctccatcgaagaccatggtttccctcagatcccttattacaatggtagctaaatgtctgtgtggcctgcaacagtataatctccnagggataagtgtgtgctttgttcgcttctctactgttggtgctctttggagtgctgagtgcccaatacctgttggttagatgaattatgtgccagttcttggtgctagggttatagcattaatcaaatcagacatgatccctactctttggagcttacactgagatacagacaataaagaaataaacaagaaaccatcatgtagtaagggtgatgttttagagagttactggagaccttctttagttgaataattggggaagggctttctgaaaaagtgaaatttcagctaagatgtgaatgaaaagaagcagacagccacctaaaagtatctcaaggaagaacattccaggtggaggtcacagagaaatattacacagagagatattcctgtcttaagacagaaataagtctgctggagctgtttaagcaagtgaaagggggacagagtagtaatgaagtggaggggttggcaggagtgaggccatgtggagcctgagcaccttggttaaagagtctggcttgttttctaagtgtgaggtgaaaccattagaggc

SEQ ID NO: 130757 - DNA, 813 bp, Homo Sapiens
  misc_feature (742)..(742): n is a, c, g, or t
gaatataaatattaatttatatcacatgtaggcataacacaacacaataaaaaagataactgtattggtgggtagggagaaaatagaaaatcaagtcattagaaattcaggtcttttttccaacacaaaacagaagtgctcaactgccatctgtatttaactgtaaacatctcattataaaccaaagaagcatgtctcatgatgtcaccggatgtggtactccctgaagcatttggcatggacacccttctggcacttctcacaccgggtgttggtctgtgagtggcagagggcacaccgggtcctcttgtcctgatggataatccagtgcccaatcatatcgaagcggctctcagtctccaaccgcctgcttcgcctcccttgagatgttgtgtcagcattgctctccagatacacacaggcaatgtatctccggaaggcaaggaggtccacctgggcatcttggcagcagattctatgcagctgccatgcattgttgagggcagcatcaatgacatagccaaataaagcttgagtaccacttcatgcctcggatcttcaccttgtacttggcaatattctgatccatcctaccaacgccacccaccttctcctgatacagcttcaccagtgatggctggtggacctgagtccgcgttttagctgctccagagtgacgactggtcagcctcactggctctatgcccacagcattggagcaaatgttgaccacgctgctatnctgccagcggcacacgatgatctcctcactctcatcgactttgtaatcaaatgaacccctcttcatttttt

SEQ ID NO: 130758 - DNA, 625 bp, Homo Sapiens
gaagttaaatttttattatcctcattttacaaatgaagaatcagaaacatagaaacattaactctcattcctgatcacataactggtaagagctagagctgggctatgcttcagagagtctggctccagagcagagctcaactggatctggaagggcaaacctttcatagagaggcttgtcctgatcacataactggtaagagctagagctgggctatgcttcagagagtctggctccagagcagagctcaactggatctggaagggcaaacctttccatagagaggcttgtccttgttctcttaggttaagacttcagagttccaatatcccaggatgctgctcccaggatggtgggtgttacagatggaggtcatgatgttgagggaggctgggagcccataggatgagacacaagaaagatctcttcatttccaaggcaccccattgctggggtgagcccatgaagtccagagagcaaacgatatcttaccattagattatctagattcaggtacttgtcatatgtatttaactttggttagccccaggtaccttacatacattcacccatgtgtctcagatgctgcaggggatttagggaagttgagggtgaccattttgg

SEQ ID NO: 130759 - DNA, 1805 bp, Homo Sapiens
  misc_feature (347)..(382): n is a, c, g, or t
  misc_feature (951)..(960): n is a, c, g, or t
  misc_feature (1219)..(1227): n is a, c, g, or t
tttctctagtaatgactttattcatgaatctataatggaattcaaaatagcaaagaacatgaaaatgttcagattaatatttattaaccaaatgcatcagaaaatacatctattttcacatatcaaaagtgcctaaaatgcatgtgagaatataaatattctccactttgtggaacttcaagataatgaaaaattgcttaatacactttgccacaaaaactcattacactgcaaatacagaagaaataaaataactcattacattgcagatacaaaagaaatcaaatgtaactggcaaaataaccatttcatggctaatcttttggtaaagtgctattttcacactnnnnnnnnnnnnnnnnnnnnnnnnnnnnnnnnnnnnttctgaaccatcattctgaaagtctgaagcgttttctttagtattcactatgttcatcacattcatgtgttcccaacatgagactaaacactatctcaaaatcttaaaaaatctttccattcacagattatttcctggaagttaaaaattattacatcattgctaaatgaagcttttcacaatacaggcgtgtattatatacaacaaataatttttcattgttctaagccatgatctttgttttaaagctgtcccgttatatttttatagttggatggtgtggtcagtacaagattcatacaccagcatactagtttatttgagcccatgtaagaaaatagggtcaatcacctaagggcaatgaatggcatgttatcaagaatctggcgagatgaattccctgaaattcataactgatgtgttaacggaaatcagtgttgctgaacagtgatttactcatttcctttcctcaattacctctctcaattcattaacaacattaaccaatgagaggaaattagttggaaaattcactaacagcattagccactaagaggaaatcggctggnnnnnnnnnnctaatctgaacaaaggtacacagatgcaaatcttaagcagattaagtaagaccaactaaatggcataggtaagcatggctgtggccacccatacacatacacaccacctcatatttagagtgtgaatatctatcattgcatagattccaccacgtggaagagctctatgcctgtgggtgtatataccctagagatcagaatggatggtcttacttaatctgcttaagatttgcatctgtgtacctttgttcagattagnnnnnnnnnctccagccgatttcctcttagtggctaatgctgtatagtgaattttccaatctaatttcctctcattggttaatgttgttaatgatatcgagagaggtaattgagcgaaaggacaatgagtaaatcactgtcagcaacacgtgatttccgttaacacactcagttatgaatttcaggcaattcatctcgccagattcttgataacatgccatgcattgcccttaggtgattgaccctattttctaacatggctcaaataaaagctagtatgctgtggtatgaatcttgtaactgaccatagcatccaatctataaaaatataacgggacagcttaaagaccgagagcatcatgtttagaacaatgaccaaatcattggtcgttatctaatacagcggctgttatggtcgaaaagcttcatatttagcctgatgtgataaattttgaacttccaggtaaaataatctgtgaaatggccaaagatgccaaggatttggagatagtgtctgagcctcatgctggggaacacttgcatgtggatgacctagtgatactaagaaaaaagcttcaaactcccga

SEQ ID NO: 130760 - DNA, 1009 bp, Homo Sapiens
  misc_feature (896)..(896): n is a, c, g, or t
agcattgtaacttgaacaggtgttaaaaaagcaggctggtacggtcggaattcccgggatatcgtcgaccacgcgtcgactatgcggagcccacctggaacttgaaagacctcatggtgctgaatgatgtgtaccgcgtgatggcagtggatgcactggcctcctcccacccgctgtccacacccgcctcggagatcaacacgccggcccagatcagtgagctgtttgacgccatctcctacagcaagggcgcctcagtcctcaggatgctctccagcttcctgtccgaggacgtattcaagcagggcctggcgtcctacctccacacctttgcctaccagaacaccatctacctgaacctgtgggaccacctgcaggaggctgtgaacaaccggtccatccaactccccaccaccgtgcgggacatcatgaaccgctggaccctgcagatgggcttcccggtcatcacggtggataccagcacggggaccctttcccaggagcacttcctccttgaccccgattccaatgttacccgcccctcagaattcaactacgtgtggattgtgcccatcacatccatcagagatggcagacagcagcaggactactggctgatggatgtaagagcccagaacgatctcttcagcacatcaggcaatgagtgggttctgctgaacctcaatgtgacgggctattaccgggtgaactacgacgaagagaactggaggaagattcagactcagctgcagagagaccactcggccatccctgtcatcaatcgggcacagatcattaatgacgccttcaacctggccagtgcccataaggtccctgtcactctggcgctgaacaacaccctcttcctgattgaagagagacagtacatgccctgngaggccgccctgagcagcctgagctacttcaagctcatgtttgaccgctccgaggtctatggccccatgaagaactacctgaagaagcaggtcacacccctcttcattcactt

SEQ ID NO: 130761 - DNA, 816 bp, Homo Sapiens
ctttcttttccggaccctgcagtggcgcctaaagtctgagagagggaagtcgcctctgtgctcgtgagtgcatggggtataagagccccacagtcttcgttataacctcacggtgctgtcctgggatggatctgtgcagtcagggtttcttgctgagggtacatctggatggtcagcccttcctgcgctatgacaggcagaaatgcagggcaaagccccagggacagtgggcagaagatgtcctgggaaataagacatgggacagagagaccagggacttgacagggaacggaaaggacctcaggatgaccctggctcatatcaaggaccagaaagaaggcttgcattccctccaggagattagggtctgtgagatccatgaagacaacagcaccaggagctcccagcatttctactacgatggggagctcttcctctcccaaaacgtggagactgaggaatggacagtgccccagtcctccagagctcagaccttggccatgaacgtcaggaatttcttgaaggaagatgccatgaagaccaagacacactatcacgctatgcatgcagactgcctgcaggaactacggcgatatctagaatccagcgtagtcctgaggagaacagtgccccccatggtgaattgtcacccgcagcgaggcctcagaagggcaacatcaaccgtgacatgcagggcttccagcttctatccccggaatatcacactgacctggcgtcaggatggggtatctttgagccacgagacccagcagtggggaggatgtcctgcctgatgggaattgggaacctaccaga

SEQ ID NO: 130762 - DNA, 1347 bp, Homo Sapiens
aatatggcacagctgcaaatgcctcatatctactaacattttgcagcctccaacaacaataaataagtgcttttattttctctgtttcataggtcaggaaactgaggcaccaagagggaaagtgctcgtgagatccaggcagggaattcaattccagccgcctggctgtagagtctaggcgccctcagtggagccagtggacccaagagctgacatcagaggctgaaatccgagctgtgtggcatccctgtggtcactcgtcccaactgggtgttgatccaggacctgcaggctcacgagctctggaccctctgcagctgatgttttcttcttacaacaacggacatagaaaataataataacaaaaatagcagcagcagcagcgtcagcagaaaacatggaatgtctgccaatgactctgaagcaccagcactttcccagagggcacagggtgagtgctgtgattcccgctgtgttccatgtagcaggtgaacctctgctcctctccttggcaaatcctggtggccacccaggtctggtaggttccattcccatcaggcaggacatccccccactgctgggtgtcgtggctcaaagataccccatcctgacgccaggtcagtgtgatattccggggatagaagctggaagccctgcatgtcacggtgatgttgccctctgaggcctcgctgcgggtgacattcaccatggggggcactgttctcctcaggactacgccggattttagatatcgccgtagttcctgcaggcagtctgcatgcatagcgtgatagtgtgtcttggtcttcatggcatcttccttcaagaaattcctgacgttcatggccaaggtctgagctctggaggactggggcactgtccattcctcagtctccaggttttgggagaggaagagctccccatcgtagtagaaatgctgggagctcctggtgctgttgtcttcatggatctcacagaccctaatctcctggagggaatgcaagccttctttctggtccttgatatgagccagggtcatcctgaggtcctttccgttccctgtcaagtccctggtctctctgtcccatgtcttatttcccaggacatcttctgcccactgtccctggggctttgccctgcatttctgcctgtcatagcgcaggaagggctgaccatccagatgtacctcagcaagaaaccctgactgcacagatccatcccaggacagcaccgtgaggttataacgaagactgtggggctcagcagcagctcccggaggtgcaaaagggaagatgccagccagaagcaggaagaccgggcccagccccatggccccgacgtcgccac

SEQ ID NO: 130763 - DNA, 1075 bp, Homo Sapiens
  misc_feature (43)..(73): n is a, c, g, or t
  misc_feature (129)..(525): n is a, c, g, or t
ggaaactgcaggcctgggtggcaggagtgagactctgtcctcnnnnnnnnnnnnnnnnnnnnnnnnnnnnnnnaacaggaaataatgataccaattaatatggcactgttaagggcccccacaaccctnnnnnnnnnnnnnnnnnnnnnnnnnnnnnnnnnnnnnnnnnnnnnnnnnnnnnnnnnnnnnnnnnnnnnnnnnnnnnnnnnnnnnnnnnnnnnnnnnnnnnnnnnnnnnnnnnnnnnnnnnnnnnnnnnnnnnnnnnnnnnnnnnnnnnnnnnnnnnnnnnnnnnnnnnnnnnnnnnnnnnnnnnnnnnnnnnnnnnnnnnnnnnnnnnnnnnnnnnnnnnnnnnnnnnnnnnnnnnnnnnnnnnnnnnnnnnnnnnnnnnnnnnnnnnnnnnnnnnnnnnnnnnnnnnnnnnnnnnnnnnnnnnnnnnnnnnnnnnnnnnnnnnnnnnnnnnnnnnnnnnnnnnnnnnnnnnnnnnnnnnnnnnnnnnnnnnnnnnnnnnnnnnnnnnnnnnnnnngctggctctctacgtggcagagcagcaaacacctcatacctactaacactttgcagcatccaacaacaataaataagtgatgttattttctgtttcataggtcaggaaacagagggaaagtgctggtgagatccaggcagggagttgaatcctggccgcctggctgtagagtctaggcgccctcagtggaaccagtggacccagtagctgacatcagaggctgaaatcccagctgtgctgcatccctgtggtctcctgtcccaactgggtgttgatccaggacctgcaggctcacaagctctggaccctctgccgctgatgttttcttcttgcaacaagggacacagagaataataataataacaaaacatggcatagcagcagaaacatatggaaagtctgtccgttgactctgaagcaccagcgccttcccagagggcacagggtgagtgccgtgattcccgctgtgttccatgtagcaggtgaacctctgctcctctccttggcgaatcctggcctcgtgccgaattcgccacccaggcctcgctac

SEQ ID NO: 130764 - DNA, 999 bp, Homo Sapiens
  misc_feature (783)..(783): n is a, c, g, or t
  misc_feature (798)..(799): n is a, c, g, or t
  misc_feature (801)..(802): n is a, c, g, or t
  misc_feature (833)..(833): n is a, c, g, or t
  misc_feature (858)..(858): n is a, c, g, or t
  misc_feature (865)..(865): n is a, c, g, or t
  misc_feature (938)..(938): n is a, c, g, or t
tttttgaggaagaatagggttattaggtcttttaaaaaaaattcactaacttttctctagtggtctcatcttctattctgtaaatggctcttagaaggaaatgttttccaggtacagatacctaaatgggtatctatctcacaatggcctggagttctgttccctcctcattccttaatgagtgcttgtcctgctgtgcccttgcattgtttaatttgttgctcctttttacgaaactcagaaattcttgatccataaagtagggcttttctgacgatccatcatttgtttccagatcaacagcaaaacacaggaaaagtgcatccagcacagtttcaaacacagataaaaaactatgggctactaagtaggcaaaaaaagctaccaataacagagggactgcccacacctggaatgcccgattgtagttaaaagccatgagtcctccaaaaacagtgaaacacaccactaacacctttcctagaaaaattatgaagtctccaaagcagttaatagatgtaaagtgacttgagttcttggacaagattttgaatgcatcttttgctgatgtacagaaatctgtcccattaatagcagttgtagtatatgcattctggttgagatggagcaggtatttgtcaagacaccagaaacagcagtagcagcatcggaacaggtacctggacaatgcaccatgctgctgttctttcagtgcgttttgcatgtacatgacaatgattctcggaatccctcaccacagagattaaaatgacccttcacaantggtctttgaggtannannagagatggagagaacgaaggatggatgatangaggatcattttacttctgtgaatnacagtancactgcccactatctcgtgcgaatcttggctcgagggcaattcctatatgagtcgataaatcgtatcagtcanactgttctgtgtgaatgttacgtcaaatcaacacatagagccgagatagtgtagctgggtg

SEQ ID NO: 130765 - DNA, 1004 bp, Homo Sapiens
aacaatactggagagtaatttttaagctaatgataaaaatttcaaatatgaatgatttcaaacactttagtcttcttccataatccttaaacgttcaggatatcagagtaatgacaggttgtttcagatctcaaattaatagaaagactaatttgtttagtaaggtgggttgccagatccttaaatgtgctcttaactggttccctgtgaaattaaacattggtagttatgtgtttttgaaacaccttgaaattgtcttacataaagtttggttgtggtgaatttatttaaagtattttctttgaaaaaagtttgctaagtagatcctccaatattaaaagaaaaaggtatctctggaataaagtaagaggattgtaatgaaagtaagaggataattgttcatccatcaagccaactcaagctagttctttctttccagtgcagcaacacattttagggcaacaaagttcagaatggatacaatggcctgttcagaaagcatgcaagttatatcagatcatttctttaaagtcagtgtgataaatttgttaactagactccgaccatagaaagagagagatacaggaagtcaatgtaaattgcagacatgccagctctgttggttcacattacagctacctaatgttgggcttaatttctttttcttcttcttcttcactatcatcaacctgttggatgaccagatcagcagacccatcttctacaatctccacataggatctattctcatcttcactcaagtgccatctggaatccttatctccattgttcgaaaatggctacttagatggtctagcctgctaaatctttttccacaagcttgacatggatagggcctttctcctgtatgacaacgaaggtggcgctttaggtctgccttccgcttcaccacatgtgtgcagtacgggcacttgaatcgcatccgaggcagatcatctggaaagcttttggatgtgacatcagatcctttgacgtactgatag

SEQ ID NO: 130766 - DNA, 1250 bp, Homo Sapiens
ttgaatgaggtcatctcctgaagcttctatagcaggaatgccgatccatgatgaaggacaggattgcatttattttctttagatgatctaccattgaacagtagagacagggtccctcacggtctgtatccaaacagaacccggatttttacagactgatcgaggcgtaatgctcagaactacatctctttagaggctcactttgcaaggaaaaaagaaatcattctgccctagaagggggctgtaggaagtattcacaatgagtcaattaatatcaagatctcctgttccaggaaactgttactaagtattacaaaggaaattttatgtgctcacgtaagtttagaaaacactggcttaaagctggtatagaattattctttcctagagaaatatttacagcattcactatgctaatatgaattgtgatccctagacagaggcatctgatgtgaagtaagtctcaaacttatttgactatagaacttatttttaaagtcctctgaagggaccagtgttttgaggaaaacattatgggaggtatgggactggatcaaaagctaatgaggatattgtaaggggtattgtcctggtgtggagtggctgcagcacaacttgaagagatcaatttctagagtttcatcgcacatctgctgaaatcagtcatttaaaggtagggcaggagatagctccattttaaataaatgtctcagataattctcatgtccattgagggcagaggtcccaccagtgcagagatgggttaagaaccgctcaatgatgtaacttcctaggtcactgtcagtcacaatgccataatccttttcataaagccctttctactcccagcactctcttcaaagtattcttcacttctgagttcctaagactacagataaggggattgagcatgggatttaagaggctgtgaaacagcaggagatatttcttctgctccttggggttcccatatctgggtccaacatacattataatggctgtgccataaaagagtccaatcacacagaggtgggagaagcaggtgcagaaggctttcctctgaacttcccttgattggatctgaaggatagcacagaggatgcacatatatgaaactacaattgtggacaagggtcccaccagcccagaaattgctccggccaagaccatgttctcattgatgtgggtatctgcacaggcaagtttgagaacagccaagatttcacaaaaaaagtgataaattttctggg

SEQ ID NO: 130767 - DNA, 256 bp, Homo Sapiens
  misc_feature (100)..(100): n is a, c, g, or t
ggacgttggacgctatttttattttaacatctcatattgccccaggttctctgagtcaacaccctcaaaggggacagacagaaacagaaaggaacttttngggctgattataaggattcagctggccttgggaaaagtctaaacatctttgaaacacaattggaaagtaatccaaacagcctgtgagctcaggcttcccagttagaactgcctgtcccaagttaatcttgcttagttttttggggggcatcatacc

SEQ ID NO: 130768 - DNA, 1132 bp, Homo Sapiens
  misc_feature (488)..(497): n is a, c, g, or t
ccaagcaggaaaacatgttttctttgtagtcataaagttatcctggccttccagggaagcgctagtacataagacgtgcttgattaggatctaaattctctgtagccccttgcctctattaactctatgttgaggcttcatttttgttccgtgttctaactttcacaattttccatgtgtcaaaccccaccaactgtaaggcatcgagaggaggcagaggggtgcaatgggcctgctcccaagatgtttccccctgaattccaaaaatagggcaaagtggacaaagtggagcttggcctgggctcactcggcttttgcctatgagtgatttcttgtggctccttgctgtttaccaactggcccaggaatttactgtgtaaggaacagattccagaagtcatgtagcttctggttgcggcccctggcaaaacgcattttcaagtgctttctacagcacgtacaacactagaaatccatcgtgtctgccnnnnnnnnnnctaaattctatttttgttttaaaaaatgctcacttcccgtgaaacacctccgggcaagtgcaaaatacaaacatcaattacaatccattgagcccctgagaaaggccgcaagcagcgattctaggcacagaaaactggtcagtggctctcagggtgacaggtgcaagaatgacccagggtgctgttactgaactccaagccccctccccgccctgagagtcatgagtgggccactgaccccagagatggtgggcacatagggggcggggaggagagaccctgctccaagccaattccaaaggggaaggatatgagccgggcaagtgcctgtgggagccgcagactcgggcagtggacaagcccaccacataggtcgctgccctttacaaaaagccccacatatatcccttctgctctccaggaatcagctccactttctggaaacacattgggtggactggatcagtgtccaagtacagaccccttgggaaatcagctgaaagctgcagcccctgcctctgctccaacacagatgtgtgaccacattcaattcacataatgaagacagagaggaggcagccttgaactcatgctaggaaacagcaactgtgaaaatagtaaatgctattactggc

SEQ ID NO: 130769 - DNA, 736 bp, Homo Sapiens
  misc_feature (707)..(708): n is a, c, g, or t
tttttgaagatcaaaaacaggcttgttttatttatacacagaacaacttatgtacagcactcaggtatggactatgtacatgacaatacaagaggcgtttgtttccacggtggtcactatataaattaagattataaatacgagggggtaagccccacctgagggcacagaaccttttctccaagactcttcagggatccttcctgcctctctctgcacagcagaccatgaggcccgtctggcaacaccacaaggggacctgggccggggcagcagagcagcccccagacagcgaggacaccccagtgcgggacgccagcccagcaccaaagggcaggttcctaaacactcatgttcattccttcctcacattctaacttgttagaattagaaaaatggtttttatgtaaacagtgttgttctaatcactgacaacatattaattttaaacacttttgatccaaacccaactccttgccaggagtaggacactgaggacttggggtggccctgatgtccttgaagccacagtcagctgtttatcctcctcatgtcccctccccacccaagttccagcttgcctggggcttgttctgggaccctaagaaccccaggatggccacaccgccaggccagcagggccaatggtcatgcagggactgcgggacaggttcccatcatctcctgtgttagcccattccacctgnngaaaccaagcgactgccgtggctggctt

SEQ ID NO: 130770 - DNA, 773 bp, Homo Sapiens
  misc_feature (42)..(62): n is a, c, g, or t
  misc_feature (207)..(239): n is a, c, g, or t
ccctcactaaagggaataagcttgcggccgcggctgtaggcnnnnnnnnnnnnnnnnnnnnngaactttcaaaatgtattttaatctcattccaaaaagaaataaaatttctagatacaaatacatctcattcaagtcactttttaacatacattctgcaacttaaaatattataaggattcaatattttcatcttttataatctcnnnnnnnnnnnnnnnnnnnnnnnnnnnnnnnnncaatacatacaggtagtcagcaggtttacaaagtaatttctttaaagtctgatcagtattgataaatattttagcctattaaaaggaactagttaggatcacagaataaaacaaaatatggcaggtccaaacctaatggcaagattacaaatgttcatatggccaatcattttaaaagaactctcaagttgggtggaatatgttttaaaacaatactcttgctattctcaagcagcagtagttatatattttaaccatattcatctccattaaatttaaaataactatgcagctttctttactgtaatatacagtagctatctcttcctttctgttggattttattgtttcaagagtaactaataaattaccaacagaagagactttagcccctttccctcccctaaagcatggctcagtttgaagattgttctataggcagccactatgactatcaccagtaccataaaaccattaaaagcattcaataactagagtcatgtgagatgtttcatagactgctggaggtttctg

SEQ ID NO: 130771 - DNA, 185 bp, Homo Sapiens
  misc_feature (175)..(175): n is a, c, g, or t
ggcacgaggtggaaaccccaggcccaggaggtagtcaggactagggacattccagagcgctgagggtcacgggggctcccggaggacctcagaagccacaggccacatgtggccatgcgaagctatagtgccaggctgaggggccctgctgtcctagggttacagggaagacccnaggcggccgc

SEQ ID NO: 130772 - DNA, 727 bp, Homo Sapiens
  misc_feature (16)..(16): n is a, c, g, or t
ccactggattgtcccnagtggactgaaaggtgtgctctcgagtcaggcgcttagtcccagagagagctgggtgccgcggggctcgtggtctgtgcctactcagggaaatgacttagtttctcccaggtgctctgttgataaggatggaagcagaactactttgagacacaagcaacaattggaagagtttttttatatgaactgaaatagatctaagagagcctggttaacagtttcctttaataccagttcagattaaatggttactttaggaacctgtgttactgtgtgagcacccacagaaacaagcaaacttatttcctacaaaaaatgaggggataataaccgatcagagtcacagtcgtttcaatataaacccttccgaaagcaaaagcagggaccacatgagcacacaagaagccaaagtttgtcagtgatcttaataaattaagactgagtaacatcctgcctttagaaaaaaataaccccgaggtggagaccagggcaggggaggtggcggagaagcatcgggccagatcaaccgttaataacatgcttctgagctatgtggatgtataaatgaaaacacccccaactaggtattgtagaggctggaaaaagatgtgatgggattatacaggtgatgcatatttttgttttgagactcaacaatgtgctacaaatgtgatacttaaccctgaactgcatgtattggggattgtttttt

SEQ ID NO: 130773 - DNA, 1188 bp, Homo Sapiens
  misc_feature (58)..(79): n is a, c, g, or t
gggaggctgaaattagcctcaactaaagggaataagcttgcggccgcatacgcggtcnnnnnnnnnnnnnnnnnnnnnnggtggatgagcactgggactttattacacggcacggcactcgtgacaacggaaggggtgggcagaaatgcaggccggaacattccacagtccagggacggttggtcattcagaaagtatgtatttccagaacactcagtagtaaggccgtctgggattgttcagggggttgggccggaagcggtaggccagcatcatcctcttgcggaacgcctcatactcgtcgtcctccttggagagctccgccggccggtcaatgccgaagccagcgccgtccactgtggtggtgcccttgttcactgggttcttgatgccctggccctctgagcccagcccctcgccctccttccagcccatcttcatcagcatctggtagccgatgttctccacagtcagcttgaactccttgtactctgagtagtcaggctcacggccctccttcagggccttgaaggtctccataaacttttccagctcgtctggaggcaggaagtctccgatgaagtgcttgccccggcccatctttgtcagctgctcggcccattccctggtcttatccatctccatgcgccgcagctggtgctcccaggtgcccagctcgctgtccacctcctcatcactgtcatagccgtgctggtgctgttggactgccttctcccacagcagctgcatgtcctgcatggcccgcttgtgctgcatgatcatgtcgtacatctgctgcatctcctgctgctccttcagctgcttcttctgggcgtctgaaagctctgtgacgcccactagacccacaggcttccccttctcatagccgagccccttgaggtcctgaactgacagaggcgagggagaggcatccacgtccctctgcaccagttcagcaggtgggagctctaccttatcctcttcaggcccccaccggctcttccgcttcctcttcacggtggctgcggaggctggcttcccgggggcagctggagcagggatgatagtgggcgcaggcgtggacgagcggggcaggtggtggctgggggtaagaccctgacagggcctcaggagggacttgcgcttcagccgcctcggccgattaacacccagcctcgtactagccta

SEQ ID NO: 130774 - DNA, 1502 bp, Homo Sapiens
tttcttgtggccattcccaggtttaattacaaaccgatccgaacatcccatctgggtcgacagctgggagggcaggattggggggaagctgctgggcgcagcccaggccaggcaaccacgtccttcccctgctcccaggtggagtaggggcctcacgactgcctcgatatccactgtcttggagcagcctggctaccccgagatcccaggtgacctcaaggctgcctgcacttcagcgccagcatgtatcctggcctgagaaccccaaagcaccttaagcgtcccccctcaaagacaactgtgcacccagtcctcaggtgggaagaggaagcccagccaggcccggaatccgcctcctccccagggtcctgggagctctgactctccggggcgttagaccgaaccagccaggcgagagggggacccacgggccagggctccgaggcagcggctgcttctggatatattttctttaaaggcgaaatgtttccgtctttggtatgaacaccctcactccaggcaaaggagggggtgggcaggggccccggcaggaggaggctctgcccagcccggggccagctggaggaaggaccatgccagaggctcatgcggaggaaggagaggcagcggtggttcggcctgacccaggatccaggaggagggctgagagccccaaggccatgacaggcaggagctggggctgagaaacaggcaggagccagggcttagaacaggtcacctggctcagggctcccgtgagaccacgccaacgcagggtgcaagctcactctcggcggccacgatgggctgcccgttctcgcaggtggtggtcgatcaggtggctgatgctctcaaacagcacgtccttcgtccgtaccacgccctcggggtccacgagcagcaggtgcttgggctgcccggcgtgcatgccggtgaggacatactgcccggggttggtgacgctgtctcgcacaaggaagtccccgtcagctcgaagcatcctctctgccgcccggcggctcatccggccgtggtaccagggctcctgacgcagctgttcctccgtgggggccacaggggcccggcgggtaggggggctgggccactggtcctccaagggaagaggggctgctgtcacgcctgccgccactgagcactcatgcaacttcagggcatcctcaaagggtcgcatgtcaaacagatcctttttggggctgtcctccggctcgggggcagtccagacctgggtgttgacatacaggtgctcctcgtggtcacggggggccacacgggcgtccgcctgcacgtagccgtcccccggtggagctgtaccggtggaccccacgtcccatggcaggctgcaggcatctcttagagaaggagatgggcctggtcgagggccgtgagggcgcagggctgtgtcagggccagcctggagtcactagcccgcccagcggcgcctcgtgccgaattcaaaccaggcctcgtacctagacttaatt

SEQ ID NO: 130775 - DNA, 1371 bp, Homo Sapiens
ggattttcacctatgctaaagtattggcactgatcgcggtcatcgttgcaggcattgttagacttggccagggagcctctactcattttgagaattcctttgagggttcatcatttgcagtgggtgacattgccctggcactgtactcagctctgttctcctactcaggctgggacaccctcaactatgtcactgaagagatcaagaatcctgagaggaacctgcccctctccattggcatctccatgcccattgtcaccatcatctatatcttgaccaatgtggcctattatactgtgctagacatgagagacatcttggccagtgatgctgttgctgtgacttttgcagatcagatatttggaatatttaactggataattccactgtcagttgcattatcctgttttggtggcctcaatgcctccattgtggctgcttctaggcttttctttgtgggctcaagagaaggccatctctctgatgccatctgcatgatccatgttgagcggttcacaccagtgccttctctgctcttcaatggtatcatggcattgatctacttgtgcgtggaagacatcttccagctcattaactactacagcttcagctactggttctttgtggggctttctattgtgggtcagctttatctgcgctggaaggagcctgatcgacctcgtcccctcaagctcagcgttttcttcccgattgtcttctgcctctgcaccatcttcctggtggctgttccactttacagtgatactatcaactccctcatcggcattgccattgccctctcaggcctgcccttttacttcctcatcatcagagtgccagaacataagcgaccgctttacctccgaaggatcgtggggtctgccacaaggtacctccaggtcctgtgtatgtcagttgctgcagaaatggatttggaagatggaggagagatgcccaagcaacgggatcccaagtctaactaaacaccatctggaatcctgatgtggaaagcaggggtttctggtctactggctagagctaaggaagttgaaaaggaaagctcacttctttggaggcacctgtccagaagcctggcctaggcagcttcaacctttgaacttactttttgaaatgaaaagtaatttatttgttttgctacatactgttccagacttttaaaggggacaatgaaggtgactgtggggaggagcatgtcaggtttgggcttggttgttttagaagcacctgggtgtgcctacctactcctcttttcttttaaaagggcccacaatgctccaatttcctgtctcctttagagagacatgaaactatcacaggtgctggatgacaataaaagtttatgttcctaca

SEQ ID NO: 130776 - DNA, 1258 bp, Homo Sapiens
  misc_feature (1182)..(1201): n is a, c, g, or t
ggggactgcagtacttggagagactctatatgaaaaggaactccctgacatccttgccagaaaaccttgctcagaagcttccaaaccttgtggaactatacctgcactcaaataacatagttgtggttccggaagccattgggtctcttgtaaaactccaatgtctggatcttagtgacaatgccttagaaattgtttgcccagaaattggtcgtctgagagctttacgtcatcttcgattagctaataaccaactgcaattcctacctccagaggttggcgatttgaaggagctgcagacactagacatttctaccaatcgtttgctaactttacccgagaggcttcacatgtgcctttctctgcagtacctcactgtggaccgaaatcgtctatggtatgtgccgcgccatctctgccagctgcccagcctcaatgagctctccatggctggaaaccgtcttgcatttttgccacttgatttaggtcgatctcgagaactacagtatgtatacgtggataacaacattcacctgaaaggcttgccatcttatctgtacaataaagtcatcgggtgcagtggctgtggtgctcccattcaagtttccgaggtgaagctgctttccttttcatcagggcagcgaaccgttttcctcccagctgaggtgaaggccatagggacggagcatgatcacgtcctccctctgcaggaattggctatgagagggctgtatcatacctaccacagcttgctgaaagatttgaactttctgtctccaatctcattacccagaagtctcctagagctgctgcactgccctctggggcactgtcatcggtgtagtgagcctatgtttaccatcgtctaccccaagctctttcccttgagagagacgccaatggcagggctgcaccagtggaagacaactgttagttttgtggcttactgctgctccacccagtgtctgcagacttttgacctgctgagttgataaacactcaagaacctcaggagcgctgccagcttgacactggggaatccagccagtccagcacactcttccatcctgtcctgtccaatgcgggggcactgcagaactctctagaaatgtcatgattgagcttcagagctaaaatgccttcacccttcccccaagttggaatatatcctcccccaaattnnnnnnnnnnnnnnnnnnnnctgagcaggcggccgcaagcttattccctttagtgagggtaattttagcttggcact

SEQ ID NO: 130777 - DNA, 2020 bp, Homo Sapiens
  misc_feature (1908)..(1942): n is a, c, g, or t
ctttcttacaaataaagtttattgctgaatttccccattaacattatagaaaacactgaaatttcacaaattattgagagcccaacagttaaacatactttatttaaaaaagtacaaaagtgacattagaaatttttttgaagaaatgtgtatcatctaacagaaaagaaatatgaaccagataatgaatggcacaaatatagcactaaaggggtactcactaaaggggtactcagtcaccacccagaaattgtccgagttatgaaatagattcattttgagaagttacacattcagtttgtttatgaactagcctgtcttgtttctgcctcttgtaagaaaagagctaggtctttatgctgctaggacaaaatactgtacatgaattggagaataaggaggggtcatccttctccccggtaccggaacaagagaacagttagtacagaaatggctttggcactttaacccttagacattgtcccaaaccttgttacttgagtattgtagccttaccatgattttttttaacaccgtatcatctccatactttttatttacaaattatatatacacacaataatacaattccttcattctaaaacaatagtagaccccaaacaggtctacattaagtttctgtattagcagttcactcagatagcttcgtttgtttgttgttgtttccacataaccgcactgatcatgccatacagttaatttttatttgtttatgctaccttctgagattgacttaaggctctagtttaatgcaaatggtttagtcttaaaaggagtctcacgtgaggctaaaatcacacaccaataactctctcctttgaagctgtttctccttgttggatggatgtagtgtcttgtctgggtaatccatagagatatatggaaacacatacaagaagagtacccagggcaaaggtgagtgttatctgtaatccaaacagcattactgaagcaatggtggaaaggacaatggccgctgctgcagaaaagcctttcatgatgttgtctgtgtacttaaccacaacagaagtgtagaggccaccaacacttgcaagaaagatgacaaaccagacataatatgtgtaaccatagaaaaatcctttttctttaatttcagctccatctgacaagtagacgccagctaatgtcacaataatccctgatagatacatttgaatgtttctcacccaaagagaagtatctgaactctttaaaactttttcaaaatatactcctgcaaatcctgagcacaatacagcaatagctatagcgccaaaccctaataatggattttgttccaccaccacttttgtagcttgggctggtttccactgtacaagcgtaactccagcacacagcataaaaactgaaacccactgtaatttgctgagtgtccggtttaacattaaaacagtgcataaagcagtacacggaatcttcaactggtaggtcacctggtacactgctgcatccagattgctaagagctaggaaagccatgttgttctgaacagcatacactaacgatggcacacttaacttcaacagttccttggggctccccaagacattttctcttaaagatgctttgaatctacccagactaccagtttctttagctaaaattcccacacttagcaataactttataacttctgtgatacacacggctgtggttgaaaagtagagttctttgtctgatgtccttgtgtatcttaaagctatggtatagactgcagccatcagggtcatcactgccaagcagtataacttgaataataaagtgacattgtctctcggggcagccatggttccccgacagccccccgcggaactccccggccgtaatggccgaattcccgggcatatgtccggtaccgtcgactgnnnnnnnnnnnnnnnnnnnnnnnnnnnnnnnnnnnccggccgcttcctcgctcatatacgtcgctgcgctcgtcgttcggctacgaagagctagcccctatagtgatgacaag

SEQ ID NO: 130778 - DNA, 997 bp, Homo Sapiens
  misc_feature (206)..(215): n is a, c, g, or t
  misc_feature (842)..(842): n is a, c, g, or t
aaaaagttttaaagagttcagatacttctctttgggtgagaaacattcaaatgtatctatcagggattattgtgacattagctggcgtctacttgtcagatggagctgaaattaaagaaaaaggatttttctatggttacacatattatgtctggtttgtcatctgtaagtatccaggaattaaaggttcttagtagatcctttannnnnnnnnnaagttagatgtccattttaagctgttataacattttgaaattaatcctttgatactgtaccagtttgaatataattttcattttgttgacttagttttgattgtgaaggcaaaattgctttgggatagcaatgccccaaaatatctaacattagcaaaaaatgtgtaaaatttaatagaccacatagccctctgggcattgttttggaaaaacagtgttatataggaactaccaattttagtacaaactctcagatggctccttctaaggaaaacagtattttccttttcctaggtaaagtatggcatctctggggatgaaaattgcctcaccattatgtaatgtttcatttatttgagtgataagattttatttctctctgtatacaagttcttgcaagtgttggtggcctctacacttctgttgtggttaagtacacagacaacatcatgaaaggcttttctgcagcagcggccattgtcctttccaccattgcttcagtaatgctgtttggattacagataacactcacctttgccctgggtactcttcttgtatgtgtttccatatatctctatggattaccccagacaagacactacatccatccaacaaaggagaaacagncttcaaaggagagagttattggtgtgtgattttagcctcacgtgagactccttttaagactaaaacatttgcattaaactagagccttaagtcaatctcaggaaggtagcataaacaaataaaaattactgttggatgatcagtgcggtatgttg

SEQ ID NO: 130779 - DNA, 1063 bp, Homo Sapiens
ttttttgactgtttaaaggttattttattaaatattttcagttcaaggtttcattgtaacaaagctatgaagggtctaccaacattcagaacaaacactatttttaaattatttctatgttgtcatgcaaaaattctgcatcaaatgccttccgtttcttgtttaaaaggtgattttttaatagtctattgtctatagatgctgacattagccccagaagaggagtaagaatgctaagaagtggggctggagcagccatatgaagctatgggtctcaatgaattctaagaccatttgtcttcaagccagcaaaacgaaaccctgtggtgaagggatttgcgtgctggcactgcagactgcagggcaggaaagggctagggcccaggggctgggacatgcatgaggtgctcggaggagcctggctaaatccaagcaccagcacctgtgagtctgctctcttctcagctggctcccaagtaaacctgtagctttgcctcttctcccagctctcgtgcctcctgaaggtagtccagggaactggaatctacccacctttcccccaaaagtggagatgtttgtgcagataaatctgcagcgttgttttgagggaaaccaaggccatgaccaattgctcctccattatcttctttgctatctgcttagggtatagatctcttcctcctggaatggaactccttgagcacagagagggacaatgaaggtagaagccttggctctggacacctcttttgggttacatgcggggaggggtgatgcccatgcagattgtccagcagtaagtctatacttcagttggtcagtaaagaggcctctgtaaggacacctcttcttcttgccagagcagtcaggtcaatctcaaagacaggaaaagagatggacgtgcagcaaggaagaataagaagggaggcagccccaaaggcagcctgaatgcatagaaacgaccaccacctcttctcccactgcctcactcctcccatcccacaggggcacttggcagagggcccaggcccagatgagggtcagcatggggaccactaccgtg

SEQ ID NO: 130780 - DNA, 736 bp, Homo Sapiens
tagggaccctccgccccgcagacatacggtgtcaaccaggtccatggtcactcccatgatggacacgtcaaagaggacggagagcagcagctcccccgaggagacctcccagagcttcaccgtctggtccagtgaggaggtggccacccgggccagggggcccccaaagccgcagtgcaggtccgtgatggggagcgtgtggtgagaccagacgtgcctgggcgccggaatcctggaggggtcggcctgcagcacgctgcagaggctccaaaccagcaccaggcagtccttgccccctgagatgaagtggctgctgtcccctgtgaactgaaggcaggagacgtcctggtagtgtcgactcaggatgaccagaaggttcccggtggagacctcccacaggtggatgctttctgcaactcctgccaggacgtagagaccattgggtgatgcagtcagacaggtgacaggcccggggcacatgatcttctgctggagctggtccttccgctggagctcccaggcgctgatgtaattcttgcccagctgcgccgccagcagatactcgccattgagcagcgccaggccgcggggtcccgcctggccgccgcggtaggtgagcaggttggcgcccgagtgaagttcccacacgatgcagctccacatcggggccgccgagtccgacacacggcacctcccctcggccgattcacacccagcctcgtacctagccgaagtt

SEQ ID NO: 130781 - DNA, 1088 bp, Homo Sapiens
ggcccacaggcttttaaaggggccgcgcagggggccaatcctgccacacaagtgaccggccacacaggatgccgcttggtacctggccttgggggccacctccggagcgccccgcctgtgcctcggaccgtcccaaggggcgcacgtctcgtccggggagccctgagagccgccacgctgccgtcaggggacactacaggcaagtcacctggttcctgtgccctttgaagaccttcccggcgtcctgctctgggtggaagctcctctccctctgtccgggccaggtgaagaggtcgacctggaagatggagccctcactgcccccgcagaacatatggtgctcagccaggtccatggtcactgccatgatggacacgtcaaagaggacggagagcagcagctcccccgaggagacctcccatagcttcaccgtctggtccagtgaggaggtggccacccgggccagggggcccccaaagccgcagtgcaggtccgtgatggggagcgtgtggtgagaccagacgtgcctgggcgccggaatcctggaggggtcggcctgcagcacgctgcagaggctccaaaccagcaccaggcagtccttgccccctgagatgaagtggctgctgtcccctgtgaactgaaggcaggagacgtcctggtagtgtcgactcaggatgaccagaaggttcccggtggagacctcccacaggtggatgctttctgcaactcctgccaggacgtagagaccattgggtgatgcagtcagacaggtgacaggcccggggcacatgatcttctgctggagctggtccttccgctggagctcccaggcgctgatgtaattcttgcccagctgcgccgccagcagatactcgccattgagcagcgccaggccgcggggtcccgcctggccgccgcggtaggtgagcaggttggcgcccgagtgaagttcccacacgatgcagctccacatcggggccgccgagtccgtacacacggccacctccatgggcgccgccatcttgccctcgtgccgaattcgccacccaggcctcgctaccttaaaccgttaggagtactgccgttcc

SEQ ID NO: 130782 - DNA, 936 bp, Homo Sapiens
gtcttgtctggacctgaggagcagcacggcgggggtcagggacgtgacaggcaattaacgtggttccttgcccgttgaagaccttcccggcgtcctgttctggtgaaagctcctctcccttgtgtccggcacaggtgaagaggttcgacctggaagtatgaggccctcactgccccgcagaacatatggtgctcacccaggtccatggtcactgccatgatggacacgtcaaagaggacgagagcagcagctcccccgaggagacctcccatagcttcaccgtctggtccagtgaggaggtggccacccggccaggggcccccgaagccgcagtgcaggtccgtgatggggagcgtgtggtgagaccagacgtgcctgggcgccggaatcctggaggggtcggcctgcagcacgctgcagaggctccaaaccagcaccaggcagtccttgccccctgagatgaagtggctgctgtcccctgtgaactgaaggcaggagacgtcctggtagtgtcgactcaggatgaccagaaggttcccggtggagacctcccacaggtggatgctttctgcaactcctgccaggacgtagagaccattgggtgatgcagtcagacaggtgacaggcccggggcacatgatcttctgctggagctggtccttccgctggagctcccaggcgctgatgtaattcttgcccagctgcgccgccagcagatactcgccattgagcagcgccaggccgcggggtcccgcctggccgccgcggtaggtgagcaggttggcgcccgagtgaagttcccacacgatgcagctccacatcggggccgccgagtccgtacacacggccacctccatgggcgccgcccggcacgaggcctcgtgccgaattcgccacccaggcctcgctacctaaaaccgtaggtagttactgccg

SEQ ID NO: 130783 - DNA, 1199 bp, Homo Sapiens
  misc_feature (1150)..(1151): n is a, c, g, or t
cagtgtgagtggctttattctgggtggcagcaccccgtgtccggctgtaccaacaacgaggaggcacgggggcctctggaatgcatgagagtagaaaaaccagtcttgggagcgtgaggacaaatcattcctcttcatcctcctcagccatgcccagggtccgggtgcctggggcccgagcaggcgttgcccgctggatggagacaatgccgctgagcaaggcgtagcccaccatggctgccagtcctgccagcacagataggatctggttccggcgccggtatggctcctcctcagtctctgggcctgctggtgtctggcgttgcggtggtacctcagctccatcccaggggaagtagagactgagaatgtgggtacaataggcacagaggttgtgcagcccacgcaggtggacctgcagcttcccactgggcagctttgcctgcagcagcagggccaagtagctgaagacgaaggcgtccaaggaggcaggggcatctccaaagaagaacttttgagagcccaggcgctgagagagcagggtcagacactcccgagcctctcggtacagctccttctccagctcttcctcgtcctcaggcctgtgctccccagtcagcagctgtagccgttccatgtactgccgctgcatgcggccaggcaggaagaagttgaggggaaagggcatagcctctgcataccacttccgggtcacttccacgtagttcttggtgtctatccaaaaagtatgtaccagcaccgggagcaacttctcctccaggagagacatgaaggccagggtgtctgccccttgccgagctgacagatcataatcagcattgtacttctcttttcgaaggtgggtgatgatcttgtgtggaactgagatgacctctccatgactggtccgaagggcaggcagagttcctgaagggctctgccaggggttgctgatcttgtgtaccttcagtggagcaccagtaaatctggcataggtcagcacggccaggctgtccaggtccactgacggcagcccccagccccctgaccagcagaacagctccatgggcgccgccatcttgcctcgtgccgaattcgccacccaggcctcgctaccttaggaccgtatagtactggccccgttccgttnnttaattaaaaccgtgcgggttttgtacaacttgacccccttagggttt

SEQ ID NO: 130784 - DNA, 1010 bp, Homo Sapiens
  misc_feature (59)..(59): n is a, c, g, or t
cccctgtgttaggaaataatttagaatactttggaaactggaaaagctctgttcacacncttagcaatcagggcagtggcctcggctctgccaggaactttggcgtttatctggatcctctctttccaggcctctcaattaattccccaggtcctcaacctttgggaagttagaaatgaggaagagtgtcctacttctgacactgttccctcttggaacctgaccgttcaatgctagaagaacccttggaaaacatgctggcccagccctctagtttttacaaataagggagtgcacagcctctgagagggttacatggcctgcccgagatcacattgtctatggccggagtacagagcatagcctaggcctccccactcctctagtaatgctctttcatcttctccaacctggctctaagccttgtccatcctgagccccatatctagcccaacctagtccctgaaaacaggaagtggcccttagaaatctctctccagtcccaccatcagaggccaactgctgtcttccactctccttcagcctgtgctcctctccctccctgcctcacagtgccctaagtttcatctcttgccgactgctttaatacatcacagtgacattgtgtgtgtctctgccacaagactgttgctccttgatgctctgggtcacctgcatctagcatggcatatatctggtgctcaataaatgtgtattgtatagaattgactgaacttctctcactggcagccccctctatccaagtcacctacctcttttcgaaggtgggtgatgatcttgtgtggaactgagatgacctctccatgactggtccgaagggcaggcagagttcctgaagggctctgccaggggttgctgatcttgtgtaccttcagtggagcaccagtaaatctggcataggtcagcacggccaggctgtccaggtccactgacggcagcccccagccccactgaccagcagaacagctccatgggcgccgccatcttgc

SEQ ID NO: 130785 - DNA, 989 bp, Homo Sapiens
  misc_feature (624)..(693): n is a, c, g, or t
  misc_feature (825)..(825): n is a, c, g, or t
gaagcaggagataggcaggaatgtgttgcaactacgtatggataggcagctaaggtcctggttggtatacttttctctcagtatcaggaaccctgcctgccctttggaccagtcatggagaggtcacctcagtaccacacaagatcatcacccaccttaaaaaagaggtgggtgatttggatagagggggctgccagtgagagaagttcagtcaattccgtacaatacacatttattgagcactagatatatgccatgctagatgcaggtgacccagagcatcaaggagcaatagtctggtggcagagacacacacaatgtcactgtgatgtattaaagcagtcggcaagagatgcagctcagggcactgtggggatatccagaggcacagtaccttctgcctgtcagtcagggagggagaggagcacaggctgaaggagactggaagacagcagttggcctctgatagtgggactggagagagatttctaagggccacttcttgttttcagggactaggttgggctagatatggggctcaggatggacaaggcttagagccaggttggagaagatgaaagagcattactagaggagtggggaggcctaggctatgctctttannnnnnnnnnnnnnnnnnnnnnnnnnnnnnnnnnnnnnnnnnnnnnnnnnnnnnnnnnnnnnnnnnnnnnaaactagagggctgggccagcatgttttccaagggttcttctagcattgacggtcaggttccaagagggaacacagtgtcagaagtgggacactcttcctaatttctaatttcccaaaggttaaggacctgnggaattaattgagaggcctggaaagaggatccagataaaagcctaagttcctggcaaggccagggccactgccctgattgcttatgtgtgaacagagctttttgtttccgaagtattctaaattatttcctaacacaggggcattcagagaaagagattcttac

SEQ ID NO: 130786 - DNA, 2069 bp, Homo Sapiens
  misc_feature (82)..(82): n is a, c, g, or t
  misc_feature (149)..(149): n is a, c, g, or t
  misc_feature (152)..(152): n is a, c, g, or t
  misc_feature (154)..(155): n is a, c, g, or t
  misc_feature (175)..(175): n is a, c, g, or t
  misc_feature (425)..(434): n is a, c, g, or t
  misc_feature (457)..(465): n is a, c, g, or t
  misc_feature (643)..(692): n is a, c, g, or t
  misc_feature (752)..(781): n is a, c, g, or t
  misc_feature (1662)..(1671): n is a, c, g, or t
tcaagtcttgttggggtttattggggcctacaagagtttggaccacacccacacaaatgcgggagaaataaatatgtggtcnagtttcttcttaaatctgggtccctcacttacgtatttagagctagtctgtagaaattctaaatttntgncnngtgctgcggcacagaaccangtgggccttctcactttctgtccaccacccgtcttcccagggaacatggggaaagagggcacgaactgacaagacttgatcattttcaaaagacaaaactgcaaaatcccaaatttccaacatctgaaactcacaatattcaaattccccagctcaaatacatatattttaatctccacgtcgccacaatctcatttgttgcccagaaccaccacattctggaagctattttccttgatcatatttaagnnnnnnnnnntgtctacaatctcaattctcccnnnnnnnnntgtccatggttttggaattttgacctattctgaagttccaattctccggtccatcctcaacccttccattttcccatgcctgtttgcctcagaggagtatgggttaaggatataggggcactgtcgtcacctctgcccctgcctccaggccttcctcagtctctcttgtggttccgcnnnnnnnnnnnnnnnnnnnnnnnnnnnnnnnnnnnnnnnnnnnnnnnnnntctttattacgtatttttttgcagtttttctaaagtgccagaaacaagatttgtgggaannnnnnnnnnnnnnnnnnnnnnnnnnnnnnccccatttgaaacctttcccccccttaaaaattggaacttggtacattcagtaggaaattcgtcactcaggctgtggccaagaccaagaaaagtgcaaagagacagaggaggaatgaaggagtgactcctctgtggttaacattcagggagcctgtctaaaacctccccttttgtatatgctgggagggtatgaggggtaggaggatggtcctggccctccctaaactcacctccctccaaaagccatgatcttgcccttggcagtgattgctgctagggcagccatcttggccccaaaaacagtagctggggaaaaggctgccattttgatgacagcaacttttccttttaaaactgcactcctctaattcccatttgtcaaatttgctcccccatactggctctccccttgtgagctattttttggggggaggtgggtgggatgggaaatatttatccaatcacagagcagggaggcccagttttcaaagagaattaggagcaaacatttatctcccccactggaaggaaatacagggaccctgaccagggttaactagtgcaaattagggattagggactatttaaagtccctgtaccccatccctaggctgggatctttgggtgtggggaactgagtcaaagatggggtgtaaggtgctattttgaagggaaagttggtggggataccccaaagcccaccagaagagtagaatggttcccccaaaaccatctggagtgattggtgaggggagtgacactggggagatgggaatacaggtaaggatggaaggtcatgtgcaaatcctgggcttacccacccatccgacccctatcatttttctggctatttggtctagtctgggagaaaccatcaggnnnnnnnnnncagggaaaaagtagattcccttctccatcccatatggagttcttccctcctggcccccaaatctggtctagcccagaataggccatatgtagaggcagaaagaggtgtgatctgcttacctcttttgccttggaagaatctggagctcactggatttgggggtcaagatagggccaatatttccctgccctggactgggaaagtgctcagccacagaacagaggggcagaggggcaaccctcccccaaacctccttgacctggcttgggagaggccatctccgaagtccaggaatatggggaggaacatggaagatccaaaggcatggaagctgaggaaggtgtcttgatacaagggaaacagggacgtagagaccacgctggggaaggatgaaaccc

SEQ ID NO: 130787 - DNA, 750 bp, Homo Sapiens
  misc_feature (412)..(421): n is a, c, g, or t
  misc_feature (444)..(444): n is a, c, g, or t
  misc_feature (632)..(675): n is a, c, g, or t
tttgtggagcacagttcatttgtcttgttggtttattggcctacagagttggacacacacacaaatgcggagataaatattggtcagtttctctaaatctgggtcctcactacgtatagagctagtctgtagaattctaaattttgcgtgctgcggcacagaaccagtggccttctcactctgccaccacccgtcttcccagggaacatggggaaagagggcacgaactgacaagacttgatcattttcaaaagacaaaactgcaaaatcccaaatttccaacatctgaaactcacaatattcaaattccccagctcaaatacatatattttaatctccacgtcgccacaatctcatttgttgcccagaaccaccacattctggaagctattttccttgatcatatttaagnnnnnnnnnntgtctacaatctcaattctcccnaaaaaaaatgtccatggttttggaattttgacctattctgaagttccaattctccggtccatcctcaacccttccattttcccatgcctgtttgcctcagaggagtatgggttaaggatataggggcactgtcgtcacctctgcccctgcctccaggccttcctcagtctctcttgtggttccgctgnnnnnnnnnnnnnnnnnnnnnnnnnnnnnnnnnnnnnnnnnnnngtattctttattacgtatttttttgcccggccgtaatggccgaattcccgggcatatgtccggtaccgtcgactg

SEQ ID NO: 130788 - DNA, 1306 bp, Homo Sapiens
  misc_feature (109)..(109): n is a, c, g, or t
gttctgtgtgaagtcgcgcggcttccacccacgcagtgttctaagtgaaggccagaaactcgctcgccatgtcggctgcagaggcggggggtgttttccacagagccangggcaggaccctggccgcgtttcccgcagaaaaggaaagcgaatggaaaggcccattctacttcatcctgggcgcagacccacagtttgggctgatcaaggcctggtccactggggactgtgacaatggcggtgacgaatgggaacaggagatccgtctaactgagcaagccgtccaggccatcaacaagctgaaccccaaacccaaattcttcgttctgtgcggcgacctcatccacgccatgccagggaagccgtggcggacggagcagacggaggacctgaagcgagtgcttagggcagtggacagggccatcccactggtccttgtcagcggcaaccatgacattggcaacacccccacgggcgagaccgtcgaggagttctgccggacttggggagatgactacttcagcttctgggtcgggggcgtcctgttcctggtcctcaactccccagttctacgagaacccctccaaatgccccagcctgaagcaggctcaggaccagtggctggacgagcagctgagcatcgcgaggcagcggcactgccagcatgccatcgtcttccagcacatcccgctgttcctggagagcatcgacgaggacgacgactactacttcaacctcagcaagtccactcggaagaagttggcagacaagttcatccacgcaggtgtcagagtcgtgttctcaggccactaccacaggaatgccgggggtacctaccagaacctcgacatggtggtgtcatctgccattggatgccagctgggcagagacccccacgggctccgagtcgtggtggtcaccgccgagaaaattgttcaccgatactacagtctagatgagctgagtgagaaaggaatagaagacgatctcatggatttgatcaagaaaaaatgacgctccttcccgttcccgttcacttttcacttgcactatttttttattttgccagaaacagcagctgcacacaacctcttgctgaaatataaaaatagcccaggcaggtttgtgaatttatgtccttttgcataaatcagagagctggggccctgtcctgaattatattcaaaatagaactgcatttcctttaaaatggagcgaatgatcctggaaatcagtttttaaaatattagactatctctgcatggatgtttgaataaattctcctaatgctgtgtttctcaactcc

SEQ ID NO: 130789 - DNA, 1645 bp, Homo Sapiens
  misc_feature (219)..(284): n is a, c, g, or t
cccgcctctctctcctgctcgttgttatataaactggcggcccgccgtccgctcccttgttataattatcacgcctcctcctctatattggggcggcgccctcttttatcttcataaacaactcggcgtggcgtcgcgctcgctagtcttgctgcccgctccctcgtcgggaggagtccttcttgttcgcgcgctcggccgcccccgcctctcttttcnnnnnnnnnnnnnnnnnnnnnnnnnnnnnnnnnnnnnnnnnnnnnnnnnnnnnnnnnnnnnnnnnnactggtggcaagtgagatttatttaaacaacgacatgtcaacaggaacaggaagaggaacatgtgcgaccactgtagtgaccaaggcttctcaagagtgtgggatgagacctgcggacgaggcccgcccaccgctcagggagcttgcaggtctcctccaggagggcaagtggcttcggcttctggctcggcataagccttcgacagattaataagttatctccttcagcccaagctcatttcctcctttggttgcccagcaaaggcagtaatgccgcatgagctgctccagcagctccatttcatccaggaattcaagtgattctatcctgctcacttcagctcgaggtaacctgttgtacaactccatcatgtcgacggccgatgctgtttcccacccattcgacaggagccgttctttctgtgactctaatgacttgcaggtctccactcccgccaggtcacactggcgtctccgcaggttttcaatcatgatctgcccaaaccgatcacccatgttcacctgttcgtagtttatgaacatggctctctcaaaactgttggctgcccacttcaggaggtttgcggactgctctggagtcatgtaaaccagcacacattcagctatcaggagtgttggcaattgtgtattcatgttacatttctttagcttctcttccagttcagacaggtctcggagatctgctccaataacggcatatctctttgaatccagtatgtgtccatccatctgaagtgtgtcctctgaatgcagttctagaatggggctggataggggaggcttgcatttgatactgtgcagctttctcgtgacaatcattggaaagtcaacctcaaaatatttacttgggagaagatcttcatcctttaatctccagaaggtggtatccatgcctgccccaaggttgacaatttgacaatgacattctgtcttccgtagaaatgcctttataagctgactgacaccatggactcgagcaaaatatcctctgttgatttcaggggctttcctctctttagacagtctcacaaagtgctgtatgtaagggtcatgccagtagccaatgcttactgcaaacctcttgcacagggaagcatcttcgcaggtgccgcgcacgccctcgtcgtctgcgtcgcagctcgaggtggaacagcaggaggtgatagaggattccctctgcctagtggccatgggcgtggaggttcctgggagctgtgtccgccagggacatggaagcggggtcgacggcggcgggggacggcgcgagccacagggagaaagcaacagaagagggtagggccctacctggctcagctggcgcggctcagtgacgccgcccc

SEQ ID NO: 130790 - DNA, 930 bp, Homo Sapiens
ttttggaaactgcagggttttattaacacgacttccaaattacatacaatatagttcaaacacatttttttggtacgaaatcacacaaatgaaacacacaacagtacattttcctttcaactacgtcattaccattcttcacacagatcctgaaaaagttaccacagcagttaacgcgaagtgaacaaaggggtggaacaggcaacggcattcccccaaggtaggtgtggtgtgtctgggagaaaacaggatggagatcaaacccagagaaacgcactcccgtcatctctccatgtctcaatttccaacgctctcccagtcaacacagcttcgcccccaaccagagccacccggtgcagcccgcagagtgtacacgcatcagggccgggaggccccgtcggcaaagcagtaacacacggtcagacggccgccacctccaagtggagtgagccacgctaccactaacactgaactcaagcacaagagctcctgcgaaagcagaggggcgggaaacaaagaagcgggtggttaagggcacgaaccgcacactgcgggacgccggcatctttgaatcgccactcactcctacagagccaaactgcaaaacaacagaattaaaaagttactctctccaatcaaagacctggaggaataaatcgtgagtgaagacctgtcgaagcaaaggttgagaggtgatggagaggtgatggagtggtaaacacagtgtgaaaatcgtcagcaccttcccacccagcccacgtggagttctcaaggctgaggcggagcagagtggcaggaatacggccctcacccagttgaagccaggaggtggagggagaggagcatggaaagccagggagatgggaaggtctgagagagtgagtcttggaatgggacaggagctaccagtgttaagaatggtagatgggt

SEQ ID NO: 130791 - DNA, 450 bp, Homo Sapiens
aatgcttttaatgtctcaactctctcttttctgtgtcatgttttggtaggaaatctttaagattggcggacggaacaggtattttagtgagacacttctgagtacttgctttttcctttgacttctaaccaactaaaagagaaggaggtcttcatgttgatattttgcttggttttattttactgattttaaaaggtatatagaaaaatgtaggcctttaaaaagaaacagcatgtagttttttattttaatatgttccacccctttgttcacttcgcgttaactgctgtggtaactttttcaggatctgtgtgaagaatggtaatgacgtagttgaaaggaaaatgtactgttgtgtgtttcatttgtgtgatttcgtaccaaaaaaatgtgtttgaactatattgtatgtaatttggaagtcgtgttaataaaaccctgcagtttcca

SEQ ID NO: 130792 - DNA, 693 bp, Homo Sapiens
  misc_feature (674)..(674): n is a, c, g, or t
tttcatgtcagagggaaaagtttattgagtcagccacagaggaacagagaaacagacacaaggaggttctgtgtgcatggaggaaatcagggcgccgcacagctgaaccctgcgcaggacagaggggcgcggacagcagcgcatgccacaaacattcacctggcaaagaaacagagcagaacctaagggctctgtgtacacacagacacaaacatgaggccactgttacccaactaatagaagagagtcatgagcgacacgacacttccttacgacctctctctcctaaaacgtaacattatgtgtttaacacacgcttaccaccactgctaactcagcaagcgcgattacagtgctccaacttaataagttgataaaaagctgtcccgtggccagttcacaatggaactaaatagtttcgttcccgagatgcctggggagtttctctggcaacgaggcatttccaacaaacgggtcattctgtcaccaggggatggtctcagtccacggcacagagcgacgtgcccctggcagcactgtggagggcaagggatgccgctaggaggggtgctcagtcctcctggaggacccaaggaggggctggccaaggggccaccttgagctctggccggagggtgatggctggctttgcatgaggaggtgacaagaacctnttgctggcccccaacatgc

SEQ ID NO: 130793 - DNA, 895 bp, Homo Sapiens
tctggcccgtcacccgttctttcccccgtgctcctttccgcccgccccgccttttccccgtcgatgctgcatgctgttggactttgctgctctgccgttgccggagctggaagaggctgggctggccttggccgactgtgggtggtgctggcctggagctgtggtactgaggggtggtgatgggctggcttggggtcgtgtaggagtagctaggggtcattagtggtgtggccactggctgctgggctggcgttgggaatacgtggtaagcactgctgccgcctccactgccgccatagccgtactggctggaggcccactgggctggggtggcattagggttctgtccttggcctgtcaccgcagcaatggcactgaacatctgtgaagtcatgttctgaggcagggcattcacagcccgtgtcagatctgcaaggttgatgttggctggggtagcattgatagaggcaggtgtccgggtcctgctgctgctgctaggggtgatgcctggtacaggatcctggtagtgatccttaaaccatctaaacagtccattcacggttgggaagatctggccccggtaccggaatccctctggagtcaccgttacatattctatcctgggtttaccccggggctggtatcccagtaggaacttgccgggcagttccttgcaggcacagatgaaataagggatgaaggtgggcttctccttcttagttttgatgagcagctcctctaatttcttgcggtccccaccgctgcagtcctgataatacttgtgattcagaaggtcccgggcaaaggatgccatgggctggacatagcgagcaacaatctcatccaaatcttcgattcccctcgggccgattcaccacccaggcctcgtactagc

SEQ ID NO: 130794 - DNA, 1873 bp, Homo Sapiens
gagttgccgtccttcgtggtcgttaattttcgggttccgggtgattccgtggatgccgcactcctgcagcacaataatagggttgaaggtggcttgccctctagtttgaatggcagctcttcaatttttgggtcccacgcggcagtctgataatactggtggattcagaaagttcccgggtcaaaggatgcccatggctggacatagcgagcaacaatctcatccaaatcttcgaattcgctcactgttgatccacagagtggctcccaggctgaaggcattttccttgccctcctcccggcacatccacatgctggtagatgccatcactgactttccaggtcactgtcaggtggttctcgcccttgctgcttggtcggataatcacatcaccctggtccatggtctccatcatcttttctgcttgcttgaaattgatattatggaaggatgggtgtgcgatcactctcttgatgtatgtggtccgctgctgcttccgcttcatgtcctcctcctgcttgtggtctgcagcttcagcatcaaagtcatagtaggtgtctttgggcagcttccactcattgttcctgtccatgaggtctgaggtgcggcaggtcaggtctgcactgaacttctcaatgtcaatcttcatgatgcggcagtgaacagtcattcccaccttcactcgttcttctggccgctttaccactttgtcactgaggaatttggtggggatgaagccggtgacaccattgtctagccgtgttttgacaccgatggcctggcctgggcacgaaccgctgtcaaagtggttccacacctcgcttagttcagggaaattgtcctgctgacagaaggggcactgccacagccctgtctcatcattgcggatcgcctggtcatagctctcaccctggggacgcctgtgggcaatgccagtgacattgcagatgatgagctttccaatgtagaaggtctctggtgtttctttggttaacatattgaagatctcctctgtgttgggagagcggtaggctgtccggaggtccttatatcgacagctcagctctgcccggatgtcatagagtgtgatgtgtttgtcaccatagccctgcctctccagctcttctgcaaaggcatcaaggtccaggtctttcagtcgctctgggttttccaagatttcttcaagggctcctgcaggattggcatcctcggctgattcatcgtattccagggcatccactgccatcttcctagcccactcataagtctcagggtggacacgggaaccatcaaggacttcaatatatgagtcagtgctgtcccccagggaggccgtgtcgatcttgaggaagccagcacaattcatgaagactttgggacccatgtggcacatggtgaccagctgggtccggctctcgagccgggtgttgttctgcttcaggatcttcaggaggtgggtccctttccgaggtcccaggccacaaacatactggatcaaggcctggctgtaagggtgggcaatggcacggttgacatcgaccccgacctcattgactcggttgataaatctacacagtacaaggcgttgagcagctcctctgttcaccacatagctcctgccaaggggtgaaacttgagacacaggatgtcttcatcggaactgcacacctgggcaaacttcaatcagagggtcctggatgcgcccgggccagggagacggcctgtctcagcactggaggataatcccggaactctgcctctgacttcttgctgttcatatagagaatggccaactcgttgtcaaccagctctaccccaatagatgacagctgccctcgtgccgaattcggcgcgccgtcgactttcatactct

SEQ ID NO: 130795 - DNA, 1588 bp, Homo Sapiens
tgatctttaaggccgaagttaaatggcttttgggttggattaaaaatttttaaatcatttcactttcttttattctacctgccacactcccttccagaatgttcccagagctgatgtcggtaagggtttggagcggagatttgttgcttagcataccttgagttcaggttctcatgcccttcagccctttcacccatccgtgttgaccaccaaagggaaacgtctcctttcacgccacttttttgacataataggaggggcagggagggaggcagtgggcagccaggcctttcccagcctcagaggtaaccagagtccgaggagcaggccccctaccgatccatctcgtccaggagtggggtggcatcgccagcaatggacatgggggtgctttcgatcatggggctgggggagggccgaggtgtcagccgctgcttctgtttccgccgttctgcctccttttcctgcagccactgctccgccatttttccccagtcgatggctgcatggctgttggactttggctgctgctgccgttgccgggagctggaagagggctggggctgggccctgggccgactgtggggtggtgctggcctggagctggtggtactgaggggtggtgatgggctggcttggggtcgtgtaggagtagctaggggtcattagtggtgtggccactggctgctgggctggcgttgggaatacgtggtaagcactgctgccgcctccactgccgccatagccgtactggctggaggcccactgggctggggtggcattagggttctgtccttggcctgtcaccgcagcaatggcactgaacatctgtgaagtcatgttctgaggcagggcattcacagcccgtgtcagatctgcaaggttgatgttggctggggtagcattgatagaggcaggtgtccgggtcctgctgctgctgctaggggtgatgcctggtacaggatcctggtagtgatccttaaaccatctaaacagtccattcacggttgggaagatctggccccggtaccggaatccctctggagtcaccgttacatattctatcctgggtttaccccggggctggtatcccagtaggaacttgccgggcagttccttgcaggcacagatgaaataagggatgaaggtgggcttctccttcttagttttgatgagcagctcctctaatttcttgcggtccccaccgctgcagtcctgataatacttgtgattcagaaggtcccgggcaaaggatgccatgggctggacatagcgagcaacaatctcatccaaatcttcgaattcctcactgttgatccacagagtggctcccaggctgaaggcattttccttgccctcctcccgcacatccacatgctggtagatgccatcactgactttccaggtcactgtcaggtggttctcgcccttgctgcttggtcggataatcacatcaccctggtccatggtctccatcatcttttctgcttgcttgaaattgatattatggaaggatgggtgtgcgatcactctcttgatgtatgtggtccgctgctgcaaccgcatcacccgttcggtaccggctcga

SEQ ID NO: 130796 - DNA, 528 bp, Homo Sapiens
caccagtcctggatgcgccgggccaggagacggctgtctcagcactggaggataatcccggaactctgcctctgacttcttgctgttcatatagagaatggccaactcgttgtcaaccagctctaccccaatagatgacagctgctggccctggtccagctcatgtacaatgcgcttcacatcttcaatcaacatctgggcgtccctgttctctcctgcaactgtcactacatgaggcttcttattcaggagaaatttctttagcgtttcaatgtcttgagccttcttttcccgctcttcctctctccatgcagttcgccgtttggtaaaatggggcagtcgaaggaagtctgtcacttctccttcaccattgaagatctcctctgtgttgggagagcggtaggctgtccggaggtccttatatcgacagctcagctctgcccggatgtcatagagtgtgatgtgtttgtcaccatagccctgcctctccagctcttctgcaaaggcatcaaggtccaggactcgtca

SEQ ID NO: 130797 - DNA, 681 bp, Homo Sapiens
ttttattaagcaacatgtttattggcgttgatgcagagacttacacaagtcttcttttttaagagaaaaattacaaggtattcaagttacgatttttagataatctctacatttgagacatcaaattataaaaggtcagtgttaccccatatgacatttgttttaaaagtttaaaggttaccaggtttgcagcttttaaagatatgaatgtcctgggccttacccctttggtgtctgagctagcagctgcagagaggccctctgaatacacagtatattttgctatcccttcaagttattaaataccagaaacacaaaaggttttccataagaaattgtgtgattggactacaggaattaaaaccgaacaacctcagtcttgggagaatgtattcaaacgtgcaatctctgaagtccctgtctactgtccaggtgtaaagcatggatttttataaattaataatgcccagacctctgccaatgactgtggcgtcaggcagcaggttggctcaggcttgtggggtggcttttgggacaagtgaattatgagtcagtaggcctgcatgaagagggcagcagaaaggtgagtcacatctgggaacactcaacaggctatggagacaagaaccgctattacaagcccggtaataagtagcacaggccagttagagcatgttcaat

SEQ ID NO: 130798 - DNA, 1176 bp, Homo Sapiens
ttttttttagattccagaagatgcagtatttttcctaaggcaggagaaaaccctagttcatagacagccaggataaaaaccctggaagaccatgagccaaggtgaacgaagaggaattttctaaatcttggggacagagaattatgttacatcaaggcagccatgccaataaaatggaaggctatgaaagcaagcaaggcacaagaaaacccccattccacagagagacacaagtgttctatttggtgaagagtttggtgcacagacagactgcatcctgtgaagaggtggcccttgtcaaggctactgccgccaggaggatctttgcatctttaggatgtgtcactagctcatcgaaactatttctgtaactctctgcaagagccaatttaagctggcgtctcagttccctctgcactcaaaagagaccaatttccaattcctcctcagagtccgtgagaccagatgctacagcaaatgttccagagaaatgaacctagaaaatgatcccggggtgctccttgcgggggaacacaggactcctcagctctatctctgtggctttaacatacatcagtttcagggtgagtgctaccattgccccccgagagtgtttctgatgggacatgctttcctgatagcacaggggatcttgggggacagaaggttcccagtaaggctagggggcacgtgacagattgagagtgtgatcatgtttccaggtgagaccctattgcatctggcagcccgaattgggcaacaattcctgcaaataagaagccactgctcttgttaggtaggtcatcgtcccataagccccactcggagcgctgtcataaaagaagtggcagattcctgtggcttgggtctttctccaggggtgtccatgggcacaattgacacctggtccctgcaagaacagctgactgggcatctgcacgatctggtccacgtggatgatgcccacgatgctggtcatctccgtgtccgagagcagcgttcaaccattgatggcttccaccacaagagctcgcgtgtactcggcttgcggaccggttacagcaccgatttcgaatggaaagcaaatttagattcatggcgggtacattccccggtcgtcggagaatgaaggacatcaccatcgattggagagccgtgacacttttggggaagttt

SEQ ID NO: 130799 - DNA, 1043 bp, Homo Sapiens
ttgcatctgcctgttgacaaactttatttctctttcagcacctggcacctcagacagactgcgaggatggaagcagcatcaggtaaagtatacctaacaaggttcacgcccagaactgtgagaagagttggatcccagctctttggaagacaatccttcctccagtggtgaacttgagctgcacacacaatgcaggagggctacagagcacagttctgaagcattatttccacactgataaattcatgatttatgaaaggaaatactgccagcgctcactccctccttctctgctacagcttgttagacacaaattgcaacaacaatcttaaatacttgcattttatttcaggccaaagcccctccactctgaactaaatgccatgacagtcccacagcataggctggtagtaaaagagcccacagacagggtaggatagccagaggagggaggagtgggcgacagggaggggaaggatcacacacacaaacctaagagtagagcaatgcagaatgcctgtggcactcggctcctaccagctctggctctcagtggagatgaagaatggcagcaggaggacagaatgcctcattgtctgaaggagagcgtgttgtttctcatctccatccccagagccctctctttcaggcaggcagaaacaaagcccttgcaccccactgcactgcgcaacacagcagagacgctggtggcggaagccctggaggcagggagctgctaccaaaggagaagaaaaggattccaaaaagaaaggagcccactctaaccctgcggaaaagatggccacatgtctgctttataaccagaagagacagtaacagccccggacagcctttcccaaaataaaggcccctgggctgttactgttccctctggctgtggccagccacttctctctcatgcatgaccatgagctgttgtgcaggtctcaggctccactcagccaggctaaggtctcgggacataaatccccagcagcaggagtcacagcaccagttccattcagtggtatcagtgaaagaaa

SEQ ID NO: 130800 - DNA, 657 bp, Homo Sapiens
  misc_feature (643)..(643): n is a, c, g, or t
tcgcagttcatttcattattattttttgcattatttgtgctttttttggtctcctttccgaagggtttttatttaggggaacagctcaactccagctccctgggtgcaatgcgagcctgcccgcaccgagcgcgcttgcaaatatgccccccgccctttccctgggttacgaagtgcccctgtaccgcacggggagtgcacgaagacacgcgtgtgcacaggcggggctctgcgtgtgcgtaccctgtggcactggagggggctgtcaggtcatatctgcccatacacaagatggcacagccggggctgggctcctgggtccgaatttccccgcgcgtctgcctaccacgggggcggaactgaccagtgccctcacggtcaggagagtgtgggggcccgtgaggggccaggacacgggaacacgttgccgaaaacatgtgtatatccatacgcggcggaaacgcgtgtgccagggcaggcctcgggccggatgacccctactcccaccattccccactccaagtccagcttcggcgtctatgaggcctagcggcttccggaatccggtatgaatcaggggcacggttcggagagccgggtctcgaaagcagctcttcagtgaggcctcctgaggctggtgtangggggtggaggtgc

SEQ ID NO: 130801 - DNA, 1373 bp, Homo Sapiens
ttttgcttttggtcattttatttttattacaacttcattatttacaaaaccccccatccagatatattcacgttaacaattctgagataactgctgcatcacagttgcacaaaggctgatgagttgcaaatgttcatcagcaccatctgctaggcatttgtcaacttcggcaagtttttctgtgataatagacttctgtttatcagataagttattttctacaaccacatcatggagttgattgacgagctgagttgctgcatgaccctcatctattaaatccttgaccacagcttctagtttgtcaaaagagccactctgacaggcagcaaatactccatcaattttctcagctggtattaccccagcaatgtctgtaatcactttctctgtgatctcctttccacctgttaatcgagtagcgctttgaagaaatgtaatggcttttcttaagtctccttctgacactttaacaagataagctattccctcatcactaattttgacattttccttcttggcaatgtctagtaatcgctgctgttgaattttatctgacagaggcttgaagcggaattttgaacatctagaggtcaggggttcaattattcgactgacatagttacagataagacagaatcgggtggttttcgactccttctccatggtacgtcttaaagctgcctgagcagctgaggtcatagaatctgcttcatccagaatcacaatcttaaaaggcggacacggcttcccatctgagcgacttcctgacacagttaattgagcaaaatttttcactttctctcgaactacttgtattccacgttcatcagatgcatttaactcaagaactcttaatcggaaaagttcaggcccaaagagttctctagctgctgccaaaatagtggatgtttttccagttccaggtggtccgtaaaacaagagattaggaagatctgctccttctaaagattttttcagcactgcaaccacttcttcctggaaagcaacttcatccacacattttgggcgatatttttccacccagggaacgggtttggctttcttgttctctccgctacttcccgcactggcagctactcctcgatccttggtcagcgggggtttagtactgatggatgtacctttaagaaatgcttgcatggtacttcacccagttagcctggcttctcgtgcaggtcaccgccgccggctcgttcctcaggtttccgcgatacaaaaaggacgagatggtctcgaagtcttagctccgtcacctaatctgagaataacgggcccaggagacttacgatcactgatgtccccacagtcgcctcagtcccgcatcccgggaatccggaccggtccagcct

SEQ ID NO: 130802 - DNA, 1411 bp, Homo Sapiens
  misc_feature (85)..(98): n is a, c, g, or t
  misc_feature (108)..(136): n is a, c, g, or t
  misc_feature (140)..(187): n is a, c, g, or t
cccgggtttccttgggaaccagttaggcccaggttcccttccttctggggcccgcggcccaaaggaagggtttggaaagtttttnnnnnnnnnnnnnncccgccaggnnnnnnnnnnnnnnnnnnnnnnnnnnnnncccnnnnnnnnnnnnnnnnnnnnnnnnnnnnnnnnnnnnnnnnnnnnnnnnaaggacagcaaaaatgtttatttgaaaaaattactatgtattgaaaatatacattagaaattattacatacttccatagcattcccctcccacaccacaaaagtagaaatatctgcttactatgctaatgccataggtaaattcaaacaaaaagtaaatcatcctcagtctcctttactcaaacactagagctgggggccagagaaaggtcaacttgtatctactaatcaataggaatttaacaagtcccagtcttccacagcaagacatacatatttctgctttgaaggttgtgaagagttattctgttctgtctctgactcctcaaaaggtctcttcttgctcttctttgactcctggcttgagatagcttcgtgtttcaacactggcccatggcaatctggggctttctctttatagaactggagtttctcggaagagttcatgtgggtgtctgccaggggacacttcagtggggcttctgctcgagaccgcttcccatagaagcgctgagctgctgctctaggctccgaggtctcccgtggcttcacagcttccgcagtcacacgctcccactgcagaacgatctggtcagcccagccctctgtcttgcagttactatgatcaaattccttcaaaggcactttggagtgaacaaggcctatgtgggtctggagcttgtgcttgacggttttgatgtccttgagccctgtcccagagatatctaagcagtttagtttcctaaaagaaaagaggtatccaatgcctgcatctgtgatctcagggttacatgataagtctaattatgttagattctcaaggcctcttttcatcactcgaactggtgctgtcatcttccgcaccccagcatcagattaacaattatcctttcaggtggagctgagttacactagacaggggttcattggtgagatgttctagaagttcatgctcatctccaagcttgcaacaggaaagatccaggcaggtcagctcccgggaagacttaatctcctcaagcttttctgaaatcacgagatacctgtttcgcaaacacagggagcaaagcaccaaacttccataggcctcagtgaatttctgtaaagccctcagccctgcacctggctcagtgaatttctgtctggcttcagcagcagagaacagcttttcagcaatctgctcaggaaagccaataagggaatcaatgtgatccacattgtcgga

SEQ ID NO: 130803 - DNA, 701 bp, Homo Sapiens
tttccattttttcattctcggggttggcccgccccgatagtcactccatgtcctcgtttactggttcatcttcgtaatctctgtcatggtcaaaatctggactgtggttggctgttgtcactaaggacaggggcccttcagcttcctctggatcgaggggctcttctttgacgtgtacaggatgcacggcttgcataggagatctgcctggactgctgtcactctcgttgctgttggtatgctccattgccccgttcagctcttcccgtattgcgctggctaagttgcccagagtgggatttcccatggaagcggtagtgtatagaggtatactattctcagccattgaagcctgtaaagctgcattgagaggtgtgcagtaggcgtggctgctctgcatgtttttaataagggaagggttaccactgatcttttgtggccttcgtttttggaattctacttcatccactgtccatactgcccctttaacgttttctactcgcacaaaacacttgtgaagactaagattatgacgcactgcattcttccacgtggccgcgttgcgtcggaagtaagcaaacattcgtgtgaaccagttatagatctcatttagtgttagctgcttttctggagattcgagaatggcctgcctaattaaagatgcatatgttaatggtggtctacttctgcgttctcctcgt

SEQ ID NO: 130804 - DNA, 595 bp, Homo Sapiens
  misc_feature (540)..(540): n is a, c, g, or t
tttcctttttccaatcttcattctcggggttggcccgccccgatagtcactccatgtcctcgtttactggttcatcttcgtaatctctgtcatggtcaaaatctggactgtagttggctgttgtcactaaggacaggggcccttcagcttcctctggatcgaggggctcttctttgacgtgtacaggatgcacggcttgcataggagatctgcctggactgctgtcactctcgttgctgttggtatgctccattgccccgttcagctcttcccgtattgcgctggctaagttgcccagagtgggatttcccatggaagcggtagtgtatagaggtatactattctcagccattgaagcctgtaaagctgcattgagaggtgtgcagtaggcgtggctgctctgcatgtttttaataagggaagggttatgtgcgacaagctcgtcaaagttttcatcggggcagtatttgcgaggacggcctcgttgaatatggcggccacgtttaaaagctccaacatcaactggccaaaaggacccanactcatcctctactctgataaagcacttatgcagtgagaggttggtgcgaatggc

SEQ ID NO: 130805 - DNA, 616 bp, Homo Sapiens
ggcactacaaggttctgtaaagaatagaagtgacaatttaaaacacatgaaattctttcctaacttttaagaacaatatataaagtctgaagcaaccaaagtatgaatacagctaatagaaaataaagaatgtaattttttaaattctctctttatacaattcatcaaggttaaacaaaacataaaattcccttaaaaatagggtaataaaatagatgaaatttgtatcactcaatttggtgatactagtaaaaactatagttcatatttatatacaaataatacagtctgtaaaaacagtcttagaatttaaataagctatctaaacgtgttaaaattttaaatcaggacctgatttgttttgctttccattaaatgtcactttttctgctgaatgtaactgacattgaggtacggatacccttgagacagcaggattggctggttgctgtgcatcggtacactagctgaaagaaaatggactcgcattactccgacacgtttcctcttggagggtggggacaacgctctctacaccgacgggtggtacatctgtcttgagtatataaaggtttgttgggctggaatcgggcatttccctgaagcatgaattttt

SEQ ID NO: 130806 - DNA, 503 bp, Homo Sapiens
tttttttcacagacttaaggttttatttgcagactctgcactgctctagcttctaggctgtgtgaccttgaggaaagggatgatccccaacccggtcctccttcaggttctaatttgcagctcctccccctccttttgctgggccttgactctcacttcctgccccactcctggctcagccagtttgggcagtgcctagggagcccagagacccagttcttcccaggggccagccccgccctccctggccttggggattgagggcagcccaggtgtcagcctgctcctcatccaccccacttccctctctcctcctcctcgtcatcttctttccaggccttatccaccatcagtcccaggctccaagacctcttttcctgctcgctctctcaatctctcgcccactccatcccaaacttctctccaaatcggggttgagccccttccagcccgccatatgccaagcgttccccaagctcttctcaccctggccagaggccgac

SEQ ID NO: 130807 - DNA, 921 bp, Homo Sapiens
ttttttatataaaaaggtcactttattttgccttttgtttggtatgctatcaatgccctttaaaatcctactattcaagtacaaatgctgatgtttacaaagtatttacaattttagtcttgttcctttctatcttaaaacacaacagctaactggttacaacagttaacaaaataataataataaaggtcacaaaaagagaaacccctgtcttatcaggcaccaaatctgaacaagggcttggatccaaccttctgcttcccgccaggtgctttaaaaacagtctggctaactgtttttatcatcagaataaacgtctttctttaaagaatagcagggcaactgtttcccagggtcgccaattagagtctgacagtgttcgggctgctgcctttatagtctgtgttctcaaagtttccaactcttacttgccgtattggaatgaacccagattcacaaggggaaggcctagacaacagcttcctgaacgcgtacttaattcttaggttagaaactttaacctttaaaagggaaggccaagaaaataacacactaaaaggagagtttttacgtacacgactaaatgaatttaactcaggtcaacggtagcatctagaagttactaaattgagtgctacgagtaaaaatatgtccgtgttttgtattagggaacagccaaaggaaacacacttgagagacaggagaccctcactgacgtgagatcggggcggaaactccacattgcaaatattcagaatcccattaagctctccaaaaaagcatttgagagatggtgttaaattctcttgtagtgttttagattaatagagcgcttttacttagacagttatgtctaggatattctaaaataagtgcactcaacattttatcttcaactataaggagactaccaagatttgg

SEQ ID NO: 130808 - DNA, 649 bp, Homo Sapiens
tttactgtagagtgtgattttattttccactaaaacttgtgcaaaaatcagaatagtagggtttttaccccttgacttctactttgcccagataacaaaaatataatcagaataactattttttttagacaatctaatttacaaaatttttccctcccaataaccaaccatacacatcaaagatacctcacgtttcagttcaaaccaaataatatgaattaactttccagttctgtgacttttgaatgtgggtgctctttgctacttctaaacccccatcacttatcaacaggttggattccagcgagggaatcagaggctatttttagattgttcagtactcagctcaccacccataagaccatttctcctctgcgtgtggcctagttcttagatatactgtaatttctttcttccccaggacacttaagaaacagtttcattttcatgacaggcaagggcttcaggaagagtcgttccacagggtccctggaaatgaaacctgaatctgttcgtagctggggtggtctccgtgttaaattcagccactggcacgcccctggcagccacctggggggcaaacatggcctgactgggtacaccacagaggaagtgcccaccactagacataaagtcacagatgggcgag

SEQ ID NO: 130809 - DNA, 751 bp, Homo Sapiens
gagaacatggatttccttcctgtttatttccttggtgacttggtcatacaagcaaacatggcaaaaccgtatcagaacccaaaagaacagcacacggatgaaccaaatgtgaggaaagcagctgtgatattttgggtggagagaaacacaagggcaatttggcacaacgctgctagatactgtgggtttacaatcaaccttttcattcccaagctgtacacaaaactctctgtttcttgttacacgcctgcctgctccatgctgaaggagacttcggggtgcttgtagctgagcagaatgtctgtaatacacgtagatggatagcaagaggagtttaaatgctggctgccatcactcaggtctgggtgctcatgacctcccaggcttgccccacattcctcattttccccatcctgaaactgctggctgcccatgagcgaagactgactgagaactgcatccgacatccgggcagagctaagtgctttcccagccacgagactcattcctggcaagttatccagctgtacataagcatcgtcgctgttctggatcgtgtggtgtctctggagggcccggggcctgtggtgctcatggacggaggggcgtgctgggtacccgagcccatttgtgatccggcagctccactgcttgtcctggagaattctatccatgcagttccctatgacaggctctctgctgggcacttagttttactgaatgcagcagtgggtgatgaccatagggatgt

SEQ ID NO: 130810 - DNA, 412 bp, Homo Sapiens
agggggcgtaaacgtgtagaacgagcgacgatgcttatgtacagctggatacgtgccaggaatgagtctcgtggctgggaaagcacttagctctgcccggatgtcggatgcagttctcagtcagtcttcgctcatgggcagccagcagtttcaggatggggaaaatgaggacattctgctcagctacaagcaccccgaagtctccttcaggcatggagcaggcaggcgtgtaacaagaaacagagagttttgtgtacagcttgggaatgaaaaggttgattgtaaacccacagtatctagcagcgttgtgccaaattgcccttgtgtttctctccacccaaaatatcacagctgctttcctcacatttggttcatccgtgtgctgttcttttgggttctgatacggttttga

SEQ ID NO: 130811 - DNA, 1153 bp, Homo Sapiens
  misc_feature (385)..(405): n is a, c, g, or t
agcattggaactataacaggtgttacaaaaagcaggctggtaccggtccggtatcccgggatatcgtcgacccacgcgtccgcgtctctcaaggtggaatgctttagagagcaaaggcttagcatagacctagacccttgtgtgggtatgacatgacatgacatgtccatgtcaaaattcactttagtcagaaccagagtattgataaacaaaatgtcagttacctggagcagtcctggagaggttaagacattctatactgttctacgtcaaccatttctacaaagttgtccagacacctaaaagcagctttcttggttatccagatgccagaatcaaccttgtatctgacaatgcacatctgttgattctaaagtatatttannnnnnnnnnnnnnnnnnnnnatacagcacatatttacatctatgaagacatagacacttacagagacccacatgagctggcactttctgagcctttacagcctttaagactcggaggttgagaattagagacacaagagaggctgtggatggcctattaaaatgattaaagatgtaaattcagtgccattttaaaactgttcatatttatcaaacaattactgtctacagctacattttttgttaacttacttaaagtcatgtcgcaagaaagatcaaacccatgaatgcttagtagctaaggctagtgttcaaaagcactctaaaagacattttgtccacattttggaaaagaaaatatttgcatgtttaattcataatttaggctatctttgagtatactgtaaagtgctgtgtgatataatatcaataaagtacttattaaatggcactttaatgttttcttttaaaataacgcactgttctaaacttcagtattgactattgactcgtgcatagaatccaatgctgtaattagaaagtaatctgtgactagaatagacctttgtccctgttagtagccctgttgccatgttcaggcttttaaaaaatgcttttgtgtcaccaaatatatctataaagaaaacaaaatttctgttcagaggcctctgaaacttggctttcttacatgtggttggtttatgtgacaatccctatgaaatgagtggacgtatgatttttgaattaaatgacttttccatttggtggt

SEQ ID NO: 130812 - DNA, 673 bp, Homo Sapiens
acagtttaactgctttgaatagcatttttaatagcaaaaatgtgtttatactataatagcttacaaccatcttttcaaccatctttttcaatacaaaataaacatattcattttcatattttacatttctcacctctataacatatacaataaaaatcccagacattgttggctggctgattcttgcaaagagatgcataagtaaactagtcaagtacatcttaaccattttgggtgtcatttagtcagtcagtcatgaaacagtaatatggagacataattttgaaaattaagcaaatgaatctgttctctagaaatgccttttctcgagttatagtattatatttataactattaaaatttatacaaatcagtaggttttatttccacaccttcacaatcccatctctagaagcagttacgatgaagccctgtgtggtctggaatgtggcgacatcagtgatgatgtcatgatgtcccacgggcagggactctgggccccttcgaggggtgtcatcacttggtcctactttctgcttattctgaatttcctggacaacttcagtgccttcaattattttcctgtagtaggacacagatggggaactagtacttcctgcaacaacataggacctttctgggtaagccaagtcccaaaaccttattttcatat

SEQ ID NO: 130813 - DNA, 773 bp, Homo Sapiens
  misc_feature (758)..(758): n is a, c, g, or t
gcttagaaaattcagctttaatggccccagcccttctgtctgagtctagtagtccagggcacagatgagggccacaccacgctttatccagtgtcgctggggctgatgggtggggatctccacagcaatgacatagttggtagagtgtcctgtggttgatagtgttccagcacgagtcagtgtcttgtagatggggcacaggtaaaagtcctggtcctgggccttgcggttgggtgttggcaagagccagataacggccatctctgtgtacagctccttgggctgagactcagccagctggaaggcctctggatcccagcgggcaccttccaggaataatccatggatatagcaccctacttggggtctttgtgttaactctgatggtgcctcaaacatcacccttgaaatcaaaggagatggtgtcaatggagatgacaaatttgcgggcaaaattctgcagagtgcctgttaagaaagcctgggggaagaagaatccactgatccagaagacagctgggatggcatcttggatccaggcctgcagaaagtccaggcgttgcagcaggtccatgacccatgatgacagaggcttgagcgatgggtaggccttggcactccagagctcaggcacagtattgttgtacaggctggcagccatcagctccagctgagaggacatcactaccagccccttgagtgccttgagtaggtcttgcagtgtctgtgtgatcacctgcagcagccgattgtacctnatgacctcttgtact

SEQ ID NO: 130814 - DNA, 579 bp, Homo Sapiens
cagaaatcacaggggcagggcacagacacaggccatgggctaaagtggtaggtacgtgatgatgggcaggcaggcagcattaggcagctctctcagaagggagttttgtgcctcctaacccagattctgggtattgttatgtgtgtggggtgtgtctgtgtctacccacaggtgatgtttgaggcaccatcagagttaacacaaagaccccaagtagggtgctatatccatggattattcctggaaggtgcccgctgggatccagaggccttccagctggctgagtctcagcccaaggagctgtacacagagatggccgttatctggctcttgccaacacccaaccgcaaggcccaggaccaggacttttacctgtgccccatctacaagacactgactcgtgctggaacactatcaaccacaggacactctaccaactatgtcattgctgtggagatccccacccatcagccccagcgacactggataaagcgtggtgtggccctcatctgtgccctggactactagactcagacagaagggctggggccattaaagctgaattttctaagcagtcca

SEQ ID NO: 130815 - DNA, 1510 bp, Homo Sapiens
tctgactgctcccgagatgctccagagtgtgacacagtgtcccaagcccctctgtatcagcctggaaccaagctatctggaactaaatgactttctcctctcagtggtggtagcagagggatcaagcagtatttgatttgtgctcacttttgatatggccaataaaaccataccgactgagcttctgcgtggatcttccagaagtgacctggtcagagagcttcttgcgtctcagaaatgaagaaaaagcacaggaaacagcactatcagtccaataggaaacagcactattcattctctgggagctgccccagccctattctgggccacagtctagaactttcttttccagctcacaacctgcatgtagctcaggtccctggagaccccagcccagctgagggagagcagtttcctgattcgtgtgacaagcaactcccttcccaccactccccactccctcccaagtacagacaaccttccgtcctgctccagttgaaggggtgacaacgattcctgaagcattctgtctgagtctaatggtggctctagccagacacagggaaatgtggctggctggctgttgggtgatccagttccttgggagccaatgtttgtacccctggtattagctgtttttcccactaaaataagcactgagaggcaagaccgtgtccctctgagctatttgccgaagacttcaggctggaggaaaaagaacagggcttgatagaagtgcaaggtggatccagcaccaactctgccattttctaatcctaggtcctgagtgaacactgactgccagtttacatctcaggtgtgtagggagcgtggaggaggcaaatcctgtttggagaaagccagtgtccaacacagcacttggtaaacatcaggcatgggaatgctgagtgacaggcaccatgggccacgctgagccccactcgctcatctggctggggtcatcagagggaggcccaacccaggatctcctgtccatgggctggggagcagcaacagtcaggagcgagggcccgcgcacctcccctaggaggtggagggaagggggctgagtggttgtcaggcgtggtcctccccatctgcgacgtggcggtagccaggaggctgggcctgcatccggaagaggacggtgaggagcagcactatgaggaggaagaggatggagccacatacagccaaggccacaatcacctctgtgtctgcaggaccgcttgccagctggcactcctgctgccaatccttgggcacgacgggctctgtgaggcgaaggaagtcctgcagtgggcagcggtgagggcagccaggcaggctgagcggccagggggccttgtcactctcgttccgccagtacatctccactgagaaattcccagaatcttcctggtacagttcaaatatgtggcaggaggcgtagggggcttgttcaccattgtagacatccagtgccatcttgcagggcaaccagggtagtgcgcgcgccacgtacgagctc

SEQ ID NO: 130816 - DNA, 227 bp, Homo Sapiens
cagaaataatgttttttaaaagacaaaaacaaagggaagaatatttaattactgagcagaagtaaatactgttggtattttgtacataatctaatttttatatgcatgttcatgctttttaatttttttatcaaaaattaagtcatctacctactacttgtaaccagcttgtttcataacatgttattttcctgtgtcattaaataattacttcaatgttgaaaaaa

SEQ ID NO: 130817 - DNA, 1093 bp, Homo Sapiens
cttgtttgttttattagttttaaagaagaaaagataagaatacagctaagctttaccctaattcctttgccctccttcactcccaaaggtgactgccatcctgaagctagaataaatcattcccatgcactttgctaactctcttcaataaaaactataactataaaaaatttagtgaatataaaaatttatttcaattgtgttctactgtacctatttttttaaacttcatttctgaggttttcttggtgtccatgctagagaaactagttgttcccaagatgtatacaagaatttttaccacagcatggcatataagagtgtaaaagtttataaaaaaggtaatcaccccgacatgggttaatataaataaaaccattttatcaattaaatggaatgctccctagcagccaaaatgaataaataaaataaactacatatgtaaaatgtttcttgaaaattctctattgttcaaagactacttcctgcataatataaaatattagataacttcattcaaaaagctattggcataaatattttctgtatctgaatacctataaaccattcagttcatgtttacatcttacatcacctgaaggatgcaaggtctagacattgcaataagtcaacttgttagcaaaacctaatccattccttttcattaactatactaagaaatgtaaaaaactctagtttttaattttagaaaactgtttccgtttactttagctgcgaagagtaatcagattattgatgctttttagaagcttgggctctcttagcatcttgatacagcagcttagttttgcaaaggttatagatgactcatttgtgtacatttccaacctggcagctctaactattgcagcatctaaactgccatacgtatacagcagtaaattattttcagtattacattcagactattaaagctgtagtggtatgagaataatgcatgcttgcatattgttactgtcagtaggtacacaatcaataaaacaatattgtccagtatttcaataaagcagatgtctgataagctaatagcagcttgaaatatgttaaagaataaatattcactaacacttca

SEQ ID NO: 130818 - DNA, 507 bp, Homo Sapiens
  misc_feature (300)..(309): n is a, c, g, or t
agtagctagcagtgtgatgctggttctttaagagagaaccattaagaaattgatttcatgttcagttatcccaaggtgtcagtgatcgagtaattacctgttggctttgcctcaggggagacatgtgtgcacagtctcccccatgaaccccagaggtggcaggagtctgaaattctgactcctgaatatctgcaatagctccaagtagtggcaggtggctcttctggaaagtggcacctagagcttctttctcaattggaccttttgtccctaaggagaatagtcatcactttgcctcannnnnnnnnnaatctcaatgcactttgatataatagagtatcttttatgctataaaaactttccttccctttgaaatctttggtctcactagtcccagttgcatcttaatattcaaggaaggcagctgtgttttcctttaagcaaatgtaattgttgggggaaggcatctcagtttatcccatggacaaatactttatgggtaatgcc

SEQ ID NO: 130819 - DNA, 571 bp, Homo Sapiens
gaaaagtttcctatcttgtgcgcatttttccataaaggagtttttgttatctgaagagaagtaatggatcttgttttaatgactattgtgtttttcccttcagtgtattccacaacagaaaaacgacagtgactgtggagtctttgtgctccagtactgcaagtgcctcgccttagagcagcctttccagttttcacaagaagacatgccccgagtgcggaagaggatttacaaggagctatgtgagtgccggctcatggactgaaactcagcagggactctgggaagtctgaccaagttggagcagatggtttgttacttgaatctccaaacacttagttgaatttttacagatatttcagatcagtggtgttgggccactattgttacctcaaatttattttttgcccttattcatttctccagctaccatgtactattgtttaatgttcagtttggtttcatttttaattttatggttctgtgcgtcccccatatttaatatttattattcaaacgcatgcatatagacagagcatgcagtgaagagtattaataaaaaaagcttagt

SEQ ID NO: 130820 - DNA, 704 bp, Homo Sapiens
  misc_feature (369)..(541): n is a, c, g, or t
ttttatattaaaataagttactaacatgttttattgagacataataagaaatggcctttttaataactcataatcaaatctagtgacagataaatagccaatattatgtcagagtggtgatgtgcataaaccatatttcaagatatctgaaaccattgtaggatgatatgaaaatatgtcttatttatattgggacaaagtcaggtacaactaatatttctgtggtttgttgcctacattcatagtagtttagtaaaatataaatgcaattgtttaaaccatctttttcttttttatactctccctgaaatctatccatagatgattggagatctactaactctaggttcagtaatgttttagacagannnnnnnnnnnnnnnnnnnnnnnnnnnnnnnnnnnnnnnnnnnnnnnnnnnnnnnnnnnnnnnnnnnnnnnnnnnnnnnnnnnnnnnnnnnnnnnnnnnnnnnnnnnnnnnnnnnnnnnnnnnnnnnnnnnnnnnnnnnnnnnnnnnnnnnnnnnnnnnnnnnnnnnnnnnnnttctaatagttcattaactgtactcatgagcaaagtgtgtcctgcattaaggaaaaggcagtcaaccaaggcacatagtcaagaactgaagcaaaagggatcccttttagaggttatgcaaaatttcttgcacagaaggatccatgcaagatcacagaatact

SEQ ID NO: 130821 - DNA, 1093 bp, Homo Sapiens
  misc_feature (73)..(73): n is a, c, g, or t
agtaatttaaacttgataagaatgcagtgggcttttccttggtattatattgccaagccttcccacatggttngtctgtcactctggcttgtttgctttaattagtttaaaattctcttttgtatgggcattccatgtttactcactctccctcctgctgggaggcaagtggctggttgcacgtggagcttgtgaacagcgttgcaacacacactcctgttcattctcactcgtccacacaccagagttcccttttggtgtatgcccagatatgggactgctgggtcaacaggtatgtgaattcaccaccttggaggtgatgccacccttttaaagtggtagtcccactgtacactcccatcagcaatgtaggagagaccctgggccctacatccctgccaccgctcccaatggtcagactgtggtttatgccaatggagtggtgtaaatggtttctgtaaatggtgccttcacatactcactggccacatgtgttcctcgaccatgaagggcagaacaagtctttgtctttggccatttttctgtctgataatttgtatatttattgattcgttattttagtttctattagtgattttattggttatacacacacatatataaatacattatacatgttatgtattagttatacatacaccatttctttatcaattcattgtattgtgaatatccatttctttggtaggcagaataagggctcccccaaagatgtcctagaacctatgaatatgttacgttatatggaaaagggactttgtatctgtaattaaggtcatgaacactgagatggggaaatcatattgaattgtccaggtgggcccaattaaccacaagtctttaaaagtgaaggccctggccaggcacagtggctcatgcctataatcccagtgctttggaaggccaagggtgaggtgggaggctcacttaaggccaggagttcaagaccagtttaggcaacatagagagactccacctctacacaaaattaaacaaaattagccaggcgcggtggcacgtgcgtgtagtcccagctactcaggaagttgaggtggaagaatcgtttgagcca

SEQ ID NO: 130822 - DNA, 1269 bp, Homo Sapiens
  misc_feature (231)..(242): n is a, c, g, or t
  misc_feature (318)..(379): n is a, c, g, or t
  misc_feature (524)..(615): n is a, c, g, or t
cccacaaattagggcgcaacctttttttctggccgccccgggtttttccccccgaggggggaaaatatttataaacgccaaagggggggaccaaggggtgctgaaatcccgccctgggggatttcaaggggttcctatcaaacccccgtttggggaagggggtttccacatttgggggagggagggctttaagggaatttccaccccggttttttcgaaagaagtggccannnnnnnnnnnnttaatttgaattttggggctcgctttgggacttcccgtttgaaagatcccaggtaaaggccctcagagactccctnnnnnnnnnnnnnnnnnnnnnnnnnnnnnnnnnnnnnnnnnnnnnnnnnnnnnnnnnnnnnnttcccagcccctatgtcatggccacgggttttcctttggggaacacggtattggccacagttcccttttcctttctggggcccgcgcgcccaaagaaatggttttaaaaagtttttgaggggccggaggcggccggacaaggaannnnnnnnnnnnnnnnnnnnnnnnnnnnnnnnnnnnnnnnnnnnnnnnnnnnnnnnnnnnnnnnnnnnnnnnnnnnnnnnnnnnnnnnnnnngccttcttattttaataggatcatgtctctcactttacaaattctcaaaacatatggttccctttttacatacatatataaacacttttaaacataaatatcaaatgcatgagaatcatatgggcagataaatttaggaagccaagaacacagaacgaaaagccagtcaccagatcttacaaataatcatctaaacttctctggccattcaatttgatacattatcccaaatattccatgtcacatggtccacaaggttttcttttgggattctgaagcaatcaatagccatacttgtcattaagatgggttctgccatctccactttgaccttcaggtgggacccacacacagtagtctgggtcatcttcaggatatttggaagaaagtgttggtggaagtttgcctggaccaggtgttttctttttcttcaattcacctctgcttttctcatattcattctttgatgctgagggtcctgcgcacaatgaagtggttttgctacagtcttgataatctttattctgttcttcctcgctaagttgagacatgttttcatgggtttgggtttctttaaaatgtgtgagatctgtgggaggcctcatttcctgcactgctgcttctggctctatctctggctgtggcctactgagg

SEQ ID NO: 130823 - DNA, 1634 bp, Homo Sapiens
taaggctaggtacgaggctggcgtgttttaattcggcacgaggtgagagcgctcggggaggaagccctgctgagatacgttctctccataaatgaagaagggctaaggcgatgcgaagagaatacaaaagtctttggtcggcctatcagctcatggacctgcctggtggacttggaagggctgaacatgcgccacttgtggagacctggtgtgaaagcgctgctgcggatcatcgaggtggtggaggccaactaccctgagacactgggccgccttctcatcctgcgggcgcccagggtatttcctgtgctctggacgctggttagtccgttcattgatgacaacaccagaaggaagttcctcatttatgcaggaaatgactaccagggtcctggaggcctgctggattacatcgacaaagagattattccagatttcctgagtggggagtgcatgtgcgaagtgccagagggtggactggtccccaaatctctgtaccggactgcagaggagctggagaacgaagacctgaagctctggactgagaccatctaccagtctgcaagcgtcttcaaaggagccccacatgagattctcattcagattgtggatgcctcgtcagtcatcacttgggatttcgacgtgtgcaaaggggacattgtgtttaacatctatcactccaagaggtcgccacaaccacccaaaaaggactccctgggagcccacagcatcacctctccgggtgggaacaatgtgcagctcatagacaaagtctggcagctgggccgcgactacagcatggtggagtcgcctctgatctgcaaagaaggagaaagcgtgcagggttcccatgtgaccaggtggccgggcttctacatcctgcagtggaaattccacagcatgcctgcgtgcgccgccagcagccttccccgggtggacgacgtgcttgcgtccctgcaggtctcttcgcacaagtgtaaagtgatgtactacaccgaggtgatcggctcggaggatttcagaggttccatgacgagcctggagtccagccacagcggcttctcccagctgagtgccgccaccacctcctccagccagtcccactccagctccatgatctccaggtagtgccgcgctgcctgcacctagtgtgcaaaggggacggccgcccctcctcggacagccagctgcacccgcccacccagcggcgacattgtacagactcctctcacctctagatagcaaatagctctcagatggtaaacgtagtcgtttgatcccaaaactaccttggcaggtagttttaactctgatcctaacttaactcaatagccatagattttgtatacgttgtgcacaaaatccaaccagagcgcaagggctctcttgaaagaaaagtagtttctgtaccaattaaaggattgacgtgggtccttttcaaaggacccagaacagaccggggggagagacccttgtcggccccccttcgggtccttcgaagaacctttttcaaaacaatttgctttgggccggccgggcccccggcaagggaaaagtgaaacatgggccataagccggcttcccaaggaaaatcccgggggccatgaactaacggccctgggaattcccccccc

SEQ ID NO: 130824 - DNA, 743 bp, Homo Sapiens
ctgaccagaagccatttcaacacatcttttcaagcaaatcattccaagttttactagagtttaaagcgaaagcaaacatttcttaattcaaagtgcacatgtcataatgcttaatttattcaagagcagaactgttttctgcctcctcccccaattcatttagcacagtggtggacattttgttgatgggttatcaatacatttggttgatgaatcagtttcccattaacagtcttgtcatttcctgcacactatcacctgagtaacattagaaaagacctcaccagacacgctttatgttatcaaacaccaacaagcaacgatgtttcctcatccctctgattatagctgccacttactgcctaagccaaatgctttacatttattatctctaatcttccttttccacatgaatgaacaaccaggttcagagaagtaacttgcccatacgtagtaagtggtggaaccaggatttgacttaggcctggctggcttcaaaatccacactttgtccacaaaagttagttatgctgtcaatttagctgggctctgaaaaaaactggagtttcaactttcacatatatggtgtgtatacaataacgtctacccgccacttcaatatatccttaagaactgaacgttttactgtagaataggagtagtttttacagccttttactgtaaaagaatcagtactttactaaagacgtccctcagaagaaacgattctaataattaatttg

SEQ ID NO: 130825 - DNA, 673 bp, Homo Sapiens
  misc_feature (491)..(511): n is a, c, g, or t
aaaccttcccttaaaggactttatttctctatttttatatggatcatttattaaattagaagactaaaaagtaaaaatatattttacaatcaaagaaaaatctggacaatggaccccagtaaaataatcagaagcgcacgttctgagaccactcctgcctggcaccctgcagggtagcgcccagggagcatctgcagaggggaaaggagaggagggggagcctccggcgacctgtcttctatctccggagccccgcctgaggctccaagatggcacagtcaggctgtccttagtgaccgctgccacggagctggcgatcggcctgcatcttcaaacccaggagcaggagcagcagaggctggcaaggcctgggccctcagacaccaggggcctaaacccagctcccaaacccactgcagcctccccttgtgagctggcagacaagcctgtccttctgagtgtgacgacctcatccacacctgacacatgcnnnnnnnnnnnnnnnnnnnnnttgtgaaccagctaattctggggaccgctcggaggggctcagcaagctgcttctacagtaagccacttctacagtaagccttcaaacaggaaataaagcataaaatgaaggaaagaagaatcttatttaattaaaggccttgcaaaatgtgatttgtctatt

SEQ ID NO: 130826 - DNA, 750 bp, Homo Sapiens
aacagctggtccggccgggattatgggatcctctgccagctgtggcgggccatcatcctgcgggacgacgccgccatgagggcgcagcgcagccgcactgggggtgcaagactacctcctgttcgccgagatgctcatgcagcgccccgtgcgcctggggcagctgtggggctcgcacctactgagccgcgaagaggcggcctacatggtggacatggcccgcgagcgcttcgaggccgtcatggcggtgctcagggagcttgccgcggcccatgctgctggtgctgcgcaacatcaacaccgtgcgcgctatcaacgtggccctcggcgcccccgtggaccgctacttccttatggctaaaagggctgtccggggctggagccgcctggcgggcgccacgtatcggggtgtttacggcaccagcctcctgcgccacgccaaggtcgtctgggagatgctcaagtttgaagtggcgctcaggctggagaccttggccatgcggctgaccgccctcctggctcgtgctctggtccacctgagcctcgtgcccccagcggaggagctctaccagtacctggagacctagggtgcagccgcccagtggccggcggggcccttttcaccttgggctgacggaggtggcggggctagaggtgtagacaccccgagccccgtgggcactcgcactggggggctgtgacagcagctgggccaggaggccgtgtaatgaccacacactcctctcaagc

SEQ ID NO: 130827 - DNA, 508 bp, Homo Sapiens
  misc_feature (98)..(98): n is a, c, g, or t
gccaaatcacgccccccgtgctgattggtttcatccattttattgtcaaggaaattaacagcccgaaagggttccccaggtccgcgccctcccccctnggggcccccgggtgaaacgcggcagcaagggacctggtctcactgcccccatgtccttgggaggagggacgagaggagagggggagctcacggcaaaggggctggggggcgccccgcccccgcccgctgggctcgggcctggcggtgtccgagggggggcacggcccgcgcacctggccgggcggtggctgcggggcgcgcgctcactcgctcgtgtgggtccgcaggtggtacttgagcgactgcttgtagcggaagcacttggcgcagtgcgtgcaggggtagggccgctcgcccgtgtgcgcgcgctggtgctccagcaggtgatgcttctgcgtgaagcgcttgccgcactcggcgcagtggtagggccgctcgcctgtgtggatgcgccggtgttccaggaggtg

SEQ ID NO: 130828 - DNA, 513 bp, Homo Sapiens
  misc_feature (142)..(142): n is a, c, g, or t
  misc_feature (151)..(151): n is a, c, g, or t
  misc_feature (156)..(156): n is a, c, g, or t
  misc_feature (158)..(159): n is a, c, g, or t
  misc_feature (165)..(165): n is a, c, g, or t
  misc_feature (206)..(257): n is a, c, g, or t
gtcaaggaaattaacagcccgaaagggttccccaggtccgcgccctcccccttggggcccccggggaaacgcggcagcaagggacctggtctcactgcccccatgtccttgggaggagggacgagaggagagggggagctcncggcaaagnggtgngnnggcgcnccgcccccgcccgctgggctcgggcctggcggtgtcccaannnnnnnnnnnnnnnnnnnnnnnnnnnnnnnnnnnnnnnnnnnnnnnnnnnncactcgcccgtgtgggtccgcaggtggtacttgagcgactgcttgtagcggaagcacttggcgcagtgcgtgcaggggtagggccgctcgcccgtgtgcgcgcgctggtgctccagcaggtgatgcttctgcgtgaagcgcttgccgcactcggcgcagtggtagggccgctcgcctgtgtggatgcgccggtgttccaggaggtggtgcttgcggatgaagctcttgccgcactcggggcaggcgtgcggccgca

SEQ ID NO: 130829 - DNA, 993 bp, Homo Sapiens
  misc_feature (194)..(194): n is a, c, g, or t
gagaagccacctgctgttccggcccttgggctgtctgggaaaagccagcagtcagagtgccagcctcaagctctgattatccccctcctgtggccctggtagttcaagcaggtcctggcagcaggaggggctgtgccatggaaggatggatacgaattgcactcaatactcaaaaaccagcccttgaccgtggncctggtcatgggattaaaaaattgtgtgtgtattggtggggaaggatggggtgagggtgaggggatctcattgatacagagtatgtcataagccatatatattaaaatcattaacagtatatagtcccacggtagctccaacccctcacacatgctcaggtggtgtggccagccctttgcctcagtccagcctcatccttgggggcaaggagggggcagcttgctccctttctccaggctcttggccgacagccccctgaggctgtccacggtacactgcagccagccccgcagcaggcagcccccagcagtcatcggtgctcgccagcactgtggtcactgggatggggtcttggcctcactgctgtccccctggctgggctttggctttagcaggatgaatctgttgaggaggtctgtttccgagctggcctgggctgccccatacccctcaccagcatagctggaggcttcggcgatgttctgggaaccagtgatgtggtgccagtaggcactgcgcggcagcatggtcgtgggtgtgcagggatacgagtaatgttccgtgcccttgttcagcagcctcacgttcttctccatttccagcaggacccgcttgtgctgctctgcgatggccagggtggcactgtggacgcgctggtaaatctgctccccctcttgtgtctggaaggtatagagtccttccccagcatcacacatccggccagcctcgaaggtaaagcgtgtggcatcccggccatagcggcgcagtgagcagaggggccacgagacgagcttcaca

SEQ ID NO: 130830 - DNA, 746 bp, Homo Sapiens
cttttaaagcagaaatgtctttattgtttgaagcatgacaaaataaaattgataggacatttcatttcttacttagtcttctcaatggggttataaaaatacaatgccacttagtttttgtaagctcttgaaaatgtccagaagctcacacttagtatgatattaaaaggcacttataacacacaataagatacttagaaacccatctcatagatacaattgaaatttctttgagaaaaatttctaaatatagaaataaataggacggcactatttcttcttttccaaaacacagaatagcattttccccatgttacctatacacaccataaatgtggacacctcctcccatttttgttcttgatacaggttgataatcaagctgaaattaatttgcttgcttttcttcaatttaatctcaatttggtttaaaataaagcaaaattcttaatttgtatccaggatcttttagaatacctggcttattttcattttgttttaaatcacaattcattaaataggaagatgatgatgcaaaaattttaaaaagtacttactatttagctgcccaaatcaccctaagcaacaatatttctgaagcatgtgtacatacatgtgtgtatatttttaaatatcacttttgtatcactctgactttttagcatactgaaaacacactaacataatttttgtgaaccatgatcagatacacccaaatcattcatctagcaattcatctgtgatag

SEQ ID NO: 130831 - DNA, 787 bp, Homo Sapiens
  misc_feature (762)..(762): n is a, c, g, or t
tttctatcccattttttcatttatttttatgaggagcctcaaaaaatagaagtggccttggtagggaaggaatgtcgtgattctgagtacagtatggcaaattcttttgcctcagtttccctaactccatccagtgcatatgaaaatgtctatgtgcgtacaaggtaggtctggactaagctctggccctccggttgttttcccattgcgggagcctaagccagggtgcccaggactcctgtgtggctggtgggcctgatgcccacagctgatgattcaggaaggaggggcctggagtctgctgcagactctcccgccccctacagcccaaaccgggcactgcagcaatgaggtggtcagtccagggagaggtccgacaagttctcggcacaatgctgcaggaagtcaaagtcaggcacggagaagggcacgcgggaccactttttggcctggatccgcccctgaggggtctccagcagcatgctgcggactttgagcactggcagcttcactgacttgtagatcatctgcagaccccagacctccccacagttcctgcagctgatgacacccccaggcttccagtccttgaagactttgttgatgaccacaggatccctggagacatttatagtagttcgagaagttggggttcacattgacatggtgggtgccctccaccttccgcaggtcgctgccatggcccacagccaccatgcagttgatgcagagtagctgcacgtgctccactgggaactgctngcgctggttctcccgctgggctgcc

SEQ ID NO: 130832 - DNA, 1605 bp, Homo Sapiens
  misc_feature (1327)..(1327): n is a, c, g, or t
  misc_feature (1588)..(1588): n is a, c, g, or t
tttttgaaaggaaagtataatttatatgtacaaccaataaacctgatacagaagaggggatcaggacagaccaggagtgggtgtgaagagagactgggaaaggggcagcaagaaagtgaaggggcagcaaagaggaagtggggggttcgccatgcaaactgccactctccccggcccctcctgggaggggggatgtgcccacatttccctagcctgccctccactattttgctctggtcccaacgacaaggtagctcccaagaccctgactaggtcccctgcctgacttatacaaatttagtctgtatccaggccttgaggagggagggtagtagaagtcttccaggaacctgagccccagagctgggcttccaccacatctggcccattgtattctctcccacccttctaggttacctgggtccctagaacaggttggggagctcctctttggcttgagggagtatcacccaaccattactctttttgtaggggtggtccttggtccctagggaggggggaacattcccaacacaagatgccggtacacaggaggtaactgagccagtgaacggcacctttattctgaggctgaacagcagttgacttcctccctcataactgctccaccctccacgtggggagaggtaggggacggtaacatgcagccacccctcctcgtcccttcctccctcccagggctcattttcatccctctctaaagtccccctcctctcttcaaagctctcttccccacaaaagttcctaaaggccaggcaaggctgattctccacttccacatgagacagagctgattctgcagggaaacggctggggaggctccacctctttcctccccacaaccatttactgggaagttgtgtatacttggcagtgtgggaggaaggtacttggaagaccctgccagccatctcccacccagacttcttctcaccagcacagtcttcaaggcttggtgggaaaggtgtgtgggagtggagaaagacaaagggcccttcttgaagagaggagctgcagagaggggcaaaggggttcctagcccagtgatggcccaaggggtggggaaggtggagggctggcagcaggccccagcgcttgagctgggggtcggcctcggggacggggcctgggtgaagggcaggcctgggatccagtcagtcgtctatacagatcacctccccggctcggggctccttccgatccagcccgtctgacaccaatgcccccaccatttccttctccttcttcacaagcactggagggccgttggtggcggctgtgatgaaggaccctgcaggcatctggnctgtaattggcgcctgcggcggccagggcccctacgggtgcggcgctgaagggcgccccgtaccccggaggtgtagcgtagggacccggcgggtaggccggtgtggggtgaggctccgtgcccttgctggccagccggctgaggatgctgcgctcggacatctgaaggcggctgcgtggggggtatcgggaagcgtggtggcaggcggtcagtccggctcatgtcgctagcactcctcagctggtcaagactgtcagacgngttgcggctgtcccgcg

SEQ ID NO: 130833 - DNA, 1196 bp, Homo Sapiens
tattgatgattgttgatgactcctctctctactaatgtgcttgggtcgagtgttctccccgtctcaccgtggtggtattgtgtgcttctgttcccccctttggtgggcgtcctctgcgtgtcgctccttgttagggtcccctgtgatccaccgcgtgttaaaagagagtcacttccggctcggggctctttcggatccgcccgtgttgaccccatcgccccccccgagtcctttgccttcttcacagcactggagcctttggtgccgcttgatgaaggacctccaggcatctggctgtaattgcgcttcgcgccaggcccctacgggtcgcgctgaagccgccccgtaaccccggagtgtagcgtagggacccggcggttagggccggtgtggggtgaggctccgtgcccttgctggccagccggctgaggatgctgcgctcggacatctgaaggcgggctgcgatggggggtattcgggacagcgtggctggcaggcgggtcacgtccgccttcatgtcgctcagcaactcctccagctggttcagaaccttgtgcaggacggcgttggccggcttgttccccgccagcgactccttggagaggtgctggtggctctcggccaggcactcggcctcggcgaagcgggcgtggagggccatggcggggtgcgccggctcctgcgacaggttcaggtaggccgcccgccgcagctgctcctcaatcaccagcgcctgctccaggagcttgaacctccgggccaggaacttatttttcatctccagaaagttccccttattggcttcagttttaaatggctcgttgataatggcaaattgagcatcattctggatgtcctgccaccgtgcatagccatggaggacaatcccagccagaagccaatagtcatgtcttctgtgccagatctcattgagtttccccgaggaaatagctgcccgttcctcattctgccacagtgtgtgaagctctgtgaagccaccatcggcgatattgaacatgaaccggggcttctctgtcttttcctctcgtcgcccattggaccgtggctcatctcgaggcctggtcgaagctcccggtcacctgtttacatcttgtgtcatgcctcgtgccgattaacacgccagcctcgctaccttagcctgatatgttttgtagttggttggttgatgtgttttg

SEQ ID NO: 130834 - DNA, 1115 bp, Homo Sapiens
  misc_feature (58)..(82): n is a, c, g, or t
  misc_feature (851)..(851): n is a, c, g, or t
  misc_feature (915)..(915): n is a, c, g, or t
  misc_feature (938)..(938): n is a, c, g, or t
  misc_feature (955)..(955): n is a, c, g, or t
  misc_feature (957)..(958): n is a, c, g, or t
  misc_feature (980)..(980): n is a, c, g, or t
  misc_feature (1050)..(1050): n is a, c, g, or t
  misc_feature (1091)..(1091): n is a, c, g, or t
gtgccaagctaaaattaccctcactaaagggaataagcttgcggccgcctgctcaggnnnnnnnnnnnnnnnnnnnnnnnnncctttgcaaacaaggtacgtttattctgcaacttaggagataaaatgagatttctgtggggagtctatgttgtgctttctggtggccttaaaagaaacagacaaatttgtgctaaagataaaaatgaattacattccacaaagccaactctatgagactaaacagagaggattgccttgagacaagatgtgaagttgaacatcagtccgaacttttgaaagaaccctcgaaggtggggctggggaggtaggcaatctcgacgcaagcttcctctactgccttctgtgcaagagggtgtctcctcggagacagaatatgatgtcatcacttgatcatcaagagattagggttcattcaccagactgtacttctttaatggcttacaggtcttaacgcagagctgtcctgtatgctccaaacaagtccgtgcctgggtcgacgcattgggcgctagcacacgcctcagtgctgcatgtccgtgctggcccctgccaccgaatgacatgcccctgggtatgcgtccaccttgaagggtatttcatatctcagccatcctccttccccgctgcaatgtgttcctatcatcaacagcctgtctgctgatgttccgaggatcaccacactcctttcctcctccgtctccgccctgtcctgaaggcacgcggttcatcctcatctctggctggtgattctagcatgcacggccgagccagtggcacatcaagtctctatttggattttaccttgggaaatctcaaggtatccttcntcagtcatatacttgatcagctcgtccttagtaagaaaccacgtttagctgatctaaacctcanagctcgaaaaggacatctctggnatggtctgtatttcttncnnagagtattctgtcatcacgggnagaatttttcgatcgatgtatcagtgggttctctcctctactctgcatcaatcatgactctcctcggtangaagcatctatgactgatattgtcatctcctcaatcatgtntatcgatcaggcaaactcatgctt

SEQ ID NO: 130835 - DNA, 1048 bp, Homo Sapiens
  misc_feature (99)..(99): n is a, c, g, or t
  misc_feature (101)..(101): n is a, c, g, or t
  misc_feature (103)..(104): n is a, c, g, or t
  misc_feature (137)..(177): n is a, c, g, or t
ttggtgccatcatgcccccagctaccatatctccgctctattttgtgatgtggcgatacaatcacacagaacagttgactggttcgattaatagactcncntnnggaattgccctcgagccagaatcggcacgaggnnnnnnnnnnnnnnnnnnnnnnnnnnnnnnnnnnnnnnnnntaaacagtagccctctgtcaaaaatgtatttcttattttagggtacaggattaaaggacaagatgatactcacaagtaaagaaaatttacaagaaaaaacttaacaaaagtttcaataaaagtattgtaacattcaaacttgacttataacaaaagaaacaagattgcaaacaaaaatgtttacggggtttccaaacataaataaatgaaatagtgtttaggcagtagggctcatgctgatggctagcaggaagttaacagagtgtaacttacttggaaaaaatctttaatgtacaaataacaagcccaaattatggactgcagcaatttaatcatcactgccatttttcttacttccaaaataaagccttgattaaaccattcataccctatattactcatacctttacttcagagattgaggaactatatacaacaaattaatttattttcaccatagggataacatactgtacctctctgccaatgttacttgaaaatcttccatgtcaaaacaacttgacagtagatataaacaattcaataaatatgcaatgatctttcattacagtcctttaaagacgcatgttaattcatgctgttaaccttaggatcacagtgcatagaatccaaatataaacagttggggtgacttttaaagtaatgttggatccctcactttatttatattcccactataaccagtaagttcatttcataggccctatcatgcattaatcattgaatggcaggagttaatgaaaacttttcctgttacaacgcccattgccggcaatgaacgtaccaaaaccgccaaggaagtcattgttattgcacaatacatgaggacctggagcttttccaaaagctt

SEQ ID NO: 130836 - DNA, 1207 bp, Homo Sapiens
  misc_feature (677)..(800): n is a, c, g, or t
  misc_feature (867)..(918): n is a, c, g, or t
  misc_feature (941)..(990): n is a, c, g, or t
acccccaactaatttacccatagaaacacgtaacatttttgtaaatagagaaaaggtctaaaagaataacattaaaatgaaacagcattatctctgggacaccgttgtgtgaaaatgctaactgctttttccaacaatagtttgcatttttctagatgagattctatccttgtataattttgttactaatataaacatcaaaaaattcttcataccagtgaatcacaagtcctcactgcaacagacataacaaatccaactcctaaaataaattatatgtagttttgaaggtagaggtgacataaaagtaggctgtatattcaaatcctacaatatattcaattttttccaattatcttttgaacaacaatttgcaaaatatatttacagtttcccttaagttatttaataagtagacttagaaaaattactagtaaactaacatttttggaaaattttcttaatttcttttgattaaattatcttgcctctgttttattagacaaatattttatcagaaaatgaatcacatgttgtgagtatttaaaatatctgtttccttcttagtcctaccaccaatgacaaaaaaacaaaatagtaacttgctaataagtaatgacttaatgcttcaaaaaacatcaacaaatttaaaagaaaggccaaacatggttgctcannnnnnnnnnnnnnnnnnnnnnnnnnnnnnnnnnnnnnnnnnnnnnnnnnnnnnnnnnnnnnnnnnnnnnnnnnnnnnnnnnnnnnnnnnnnnnnnnnnnnnnnnnnnnnnnnnnnnnnnnnnncatggtggcgcatgcctatagtcccagctacttgggaggttgaagtgggaggattgcttgagcccannnnnnnnnnnnnnnnnnnnnnnnnnnnnnnnnnnnnnnnnnnnnnnnnnnntgacagagccagaccctgtctcnnnnnnnnnnnnnnnnnnnnnnnnnnnnnnnnnnnnnnnnnnnnnnnnnncttctgccacaagcatgggcaaaaaatcaatatctttaaaaatataaaggtcttaaagtccataagaaaaagatggatatttcagaaataattacaaatggccaaaaccaatatgtttactctctaatagccaacacaaaatacgctattaaaataagatttttacctttcaaattttcaatgcatttttaaaaaggaaataaaggcttacttcttt

SEQ ID NO: 130837 - DNA, 1353 bp, Homo Sapiens
cggattaaaatctgaaatgtttttatggagttgccaacaggctggaatgtacctgatacaatttaatctgcttttatttctttggctgtcttccaaaccactttcttcctgtaattcttaagttggctagttctccttcctcagaaaaattacccctaagaatcttcctaatagtgagggtgtacttccgaatagaagagtccttcggctgaaatggcatctccaaggcctacagttcgaatggggtctttacacaccaatactggtgtgaagtggaaggatattccctctctgtgccattctactactggcttgtttgggtttaatacaatcctggagcctgcctccgaatgggaagtcatgaactcttggggtgccctcagagacactcggctggtgtctatggtttctgtggcgcaggcctgtgtccccagccacacgagctcctgcagccacggctgccagctggttggcccagtgtccatccacagttgccaggatgtggtagaccagcgtgtggaaatggatcctggtgagatccgaggctctgcttttactcctcccatgttctttcaagatccagaagaggatgtcactgaccatgcccacatcaggaacaccgttccaggaagagagagaagagtgaggtccagaggctgactgggtgagaaataacagctcctgttcattcagcccaagggaagtcaccgcgggaaagacctgctgatggacaatgctgctcatgagctccctgttagtcatactggccagctctaggtgaactggaataccagtggggatgtcagaaatggaggttacaacctccaagagtctcttcctctggagctccttgctttgtccctccatcatgtgcaatccagagaggaccaccaggtctggctgaaactcctccaggctagacacaaacacctccagcatattcatggccccgttggagaggtcgtgagagaagatgaatcggttggcatggggagcttttaactggccccactcctcccctgcttgatactctaaaatgaggtggaactcatccacttcctgcaatgactctggtggaacaaagacattgtcatcaagaagctcatgtagctttggaccaactggaccgcaaagaagaaccccactgccacgcggcgccagcgccggactggccgcacgataagcgcgtcccaggctgccgccaaccggccctcgggggagacgggtcccgggggcgcaggcgcgggccccagacacagcgagctccagagagagcgcagcgccgagcctggcagctctggctccagcaggaagacgcagcccacggccagcgccaggaagcccgcgtacccc

SEQ ID NO: 130838 - DNA, 981 bp, Homo Sapiens
cgcgttttgccttcttcagtcccccacccaaattcctgtgaactctttcccggtactgtacattcactctgccctttatccacttagtacgaatactggatctatattagtcaactccaattttcttggctcatctgtccccatattcatcagaagaccacagtctgctgaacccttcagtttgacccaacacctcagatattcatgtcacctggagaggtcttaaaaagatgaatcgtttgcatgggacttttactggcccactccgtcccctgcttgatacttctaaaatgaggtggaactcatccactgtcctgcaatgactcttggtggacaaagacattgtcatccagaagctcatgtagctttggaccaactggaccgcaaagaagaccctgtaaatctgagttggctgcaaatttctgtccaattaaagctgcatttcctcctacatagtgctgggctcctgggaactctgacgcaacctgggcaatgtcgtgaaaagtttccttatcactgaagaagcgctcagcagctgctcccttccccatgaagtgaatgaaggcttcttccagatcattccttgaatgcagaatgctgtgatctttcccattcccaggactaaggccaagtgcctgcaagagcttcacccctgagagcaccacatcaacacatgcattgactcccactgccacgcggcgccagcgccggactggccgcacgataagcgcgtcccaggctgccgccaaccggccctcgggggagacgggtcccgggggcgcaggcgcgggccccagacacagcgagctccagagagagcgcagcgccgagcctggcagctctggctccagcaggaagacgcagcccacggccagcgccaggaagcccgcgtacgcggagccgcgccacagcgccatggggacccaggcgccgcacctgcgcgaaccaactcctttcctagcccgcgcctcttccgggccc

SEQ ID NO: 130839 - DNA, 708 bp, Homo Sapiens
cagtatgtagtttcaaattttatttcaggaaacttttcttgatttacaaatttcactgttctattcactttggatttcttcttcagggactcctattatctgtatgtcagtttcttcccctgtcttcaatattatcactttctcttgaatcttttcagtcctcctttccaataattgttacattttagattcgtcgtagatttatagaacaattgccaagctaacacagagttcctatatgccccacacccggtttctcctcttaacatcttacattagaatggcaaatttgtcacaattaatgaactcatgctgatccactgttataactaaagcccaccatttattcagcttcctttagtttttacctgatgtcattttctggtctgggagccggcccaggatgccccgttgccggtggtggttgtagttactctccgcaggctcctcccaagctaagagttcctcacactttccttgttgctgatgagcccatcagttttgaggaggcctggcccgctatcctctcagctggcatgtgtctgctgtttttctcgtgattagatggggttttgggtctgctgagagcatagcttttcacacccatgcgaaagcacacaccaccagcatggctcattgcgtaggtgctaacttcggctgactcgctgagggatgggctgatgtattttttattttaatatacatagc

SEQ ID NO: 130840 - DNA, 454 bp, Homo Sapiens
tgtcagtagaaggtgatttattggaaagtttagaaacatgtggcaacaagacaggtagatctctgcactgttactccccagacggagagcttacataccatatagaaagagcataagtgcttcagaaggaatgtgtaggatcgctgaaattgacccctcagggaaaggcaagaatgctgtgtctcatagcccataatttgccaaaggacaggacttaggtaagtacatgtttatgataacatcaaggttgtcttggcttacacaagcaacagtaagtaaagtagaaatcttgaggcattcctgggcctggggttaatcagaagtcaacatggcagattagcatccaagatgaagtggcatcatcctgcacagtgtccaacgttgtacacttgattaggagggaataaacgagattgagcactaggagcaacagtggcaggacacccaacacccc

SEQ ID NO: 130841 - DNA, 443 bp, Homo Sapiens
ttttttttgtcagtagaaggtgatttattggaaagtttagaaacatgtggcaacaagacaggtagatctctgcactgttactccccagaccgagagcttacataccatatagaaagagcataagtgcttcagaaggaatgtgtaggatcgctgaaattgacccctcagggaaaggcaagaatgctgtgtctcatagcccataatttgccaaaggacaggacttaggtaagtacatgtttatgataacatcaaggttgtcttggcttacacaagcaacagtaagtaaagtagaaatcttgaggcattcctgggcctggggttaatcagaagtcaacatggcagattagcatccaagatgaagtggcatcatcctgcacagtgtccaacgttgtacacagtgtctttaagatgcagaagtagggttgaaaccacactgaagtagg

SEQ ID NO: 130842 - DNA, 639 bp, Homo Sapiens
acaaatatttattaatttattttaacctaaattacatgttaacataaatatttttatgaactatatttccccaaacaaaaacagttagcaaagtggtattgttttacattttgcattttaacaggagacaggtgggttcttatatttgcttccgttgtgatactgcatgtcatgtagcctctggaaaactctactgtacacctgtaacagaatgagagtaaaaaggcaaatagcatcttagtattattatgagcgtaccattgacattgtgggcccccgagaagcactctgagaaccactgattaaaaaagactaagggcaaaatagagggatggcataattttaaaggtaggagggtataaggcatgttacagagagagcaaacagaccaatctggtagttgtgaaagattcacatgggggaggtggaggagatatggctagaaatgtatactgggggatcgtgttatatcaattaaaaaatactagcttccttaattatgaccatcttcactgacctctaattttggcatcagtaagcttcagggtaggaatgatagaagagaaattcatattgggttcaggcaactctaaagttatgtggctgacagtattctaattgatttgttgattgctttat

SEQ ID NO: 130843 - DNA, 331 bp, Homo Sapiens
aatttacaaatatttattaatttattttaacctaaattacatgttaacataaatatttttatgaactatatttccccaaacaaaaacagttagcaaagtggtattgttttacattttgcattttaacaggagacaggtgggttcttatatttgcttccgttgtgatactgcatgtcatgtagcctctggaaaactctactgtacacctctattttttcagggctttacgtgctaggtgtggtttcttcctctgcatcgaaccagcgacctgggtgcctccccacccaagacggacctccacatcgggaaccgccgccggcgcagcggccgc

SEQ ID NO: 130844 - DNA, 1922 bp, Homo Sapiens
ttttttcacattcaactcccatactttattgggacaaaggaggaaggatgcaaaccatcaccacaggcccacccaccaagggtgtccaggcttcagcacctagtacagcatgagtgagtacattatcaatacaggcaacttgggagggatggagtggggaagattccacacaggaaggagactagaggtccttctaggcttgggggctgaggcatgtattgtactggcacagtccacttatggatgaagaaggaggtctagatttccattttgcagatagataggaaggaagacattcccttatatagacgggaaaaaggaaagggattacctggagggcaattccttttttatatatttggaagaagagcagatttcaccttacaggtgggtataggagggaagaaggaaagtttattttaaatattagcagaaacagacgtgggaagaaacgtcattttgcagagggaaaatgcttctgggatggtgttcactggccattccattcccaggtgacaggaaggagacacatacgcaggaaagggtcccagggctacagaacaagggaggtataccccacaggcaccagaccctccatgccatcccgcccacagcggagccagtcctcatccactgtggtgatgacacgcagcacttccccacgccggaagctcaactggtcaggtcttgcagcagtgtgatcacagagagcccgcactgccctatgggtttgcaccatcctgggtgctgaggcctcaagctcctgaggagaaggcatctcgggaggtgccccccgcttcacaagagccaacacactcactgtcgggggcagccagctagatggtctcctggactttagggctccattctcattttctgcggggcccccaggcactccaaatagtcttcccaaccagaggcccctgcctggtgccatctcatctgtgggcaggggtctctcctgtgcaccttcttcagctgcagtcccatgacgccccggtgcccatcgggaaagaggaaagccctcagtgcccccagaggcatagacccgggaggcctgggtcaactgctcccaccagctccctggtgtgggaaggtttggagagtcagaggggtctgaagcagcttccttggaagtcccccgaaggctctgggccagccggcccccaaagtgcagcatggcttgcatagtctgctgcagagctggaggtgggcctggaggggcaggggcctgaggtgggcccaggggcaggtggtggtggtgctcaaagagcaggtccaggtggaaagtgagcaccgacaatggctgcagcaggagcagcagctctgtggacagggagggacaaccaccgcgggccagggagaaaaatcctgttggcaggtacaggagggagagcaggcctgcatcttcctggagactggaaaaccacagctccaactgcttggtgttgaggaggcccaggataaaggcatggaagcggctacggctgctgctcagcggggctagacggctgacctggctatacagggttccaagggagcgggtgctggagcctggcttcaccgacgcctccaccacgctccaggggctgctcctgcgctgcccggtgatgaggtccttccggaaaggcttcagcccgtccgccaccagggcgtggagggccgggcagagggtggtcagcaccaggtgccccacatccgggctcagccggctatcacccaactgggccttctgcaccaagttccgggcggccccgaaatgcgagatgattttatcaacggagacgctgacggctatcagaagacctttcttctgctcctgcagctgaccagtcccactctgggcttctgccatccacagccgctgggctccggggacaccggcgaaggaccacgaactacggaccagtttccctttcccg

SEQ ID NO: 130845 - DNA, 1470 bp, Homo Sapiens
gggcagtttggtgtggtgctcaaagagcagtccaggtggaagtgaccccgacaatggctgcagcaggacagcagctctgggacaggaggactaaccgccgcggccaggaggaaaatcctgttggcaggtacaggagggagagcaggcctgcatcttcctggagactggaaaccacagctccaactgcttggtgttgaggaggcccaggataaaggcatggaagcggctacggctgctgctcagcggggctagacggctgacctggctatacaggttccaagggagcgggtgctggagcctggcttcaccgacgcctccaccacgctccaggggctgctcctgcgctgcccggtgatgaggtccttccggaaaggcttcagcccgtccgccaccagggcgtggagggccgggcagagggtggtcagcaccaggtgccccacatccgggctcagccggctatcacccaactgggcctggaggtggcgcgatgccgatggctccagagatcccgtccagacacctcccagccacctcccgccaaccattcccgcaccccccgcggagctccattactctcctcatcccaacagcctccccccagccaccttcaccttctgcaccaagttccgggcggccccgaaatgcgagatgattttatcaacggagacgctgccggctatcagaagacctttcttctgctcctgcagctgaccagtcccactctgggcttctgccatccacagccgctgggctccggggacaccggcgaaggaccacggaactgacgggactcccgcctgccctgctagggcctgtagggcgggagaggacgggggcggggagggagttgcagcccagcgcaccgccccggggcccagtcctgcctgcggagccccggggagcacgtggcggcatggaccaatggaaagacagacaggggaaagggaggagacggagggaggcgagacccgaggattgggaggctggaaggcgccggaaaggggaaacccgggtcccgcagcagcctcttggcggagggtgccctcttcatcccgcgtgggactggactcgcggagagggcgtggccagaacctctagtgccaatgagctcccgggagcttcaccctccacccctccctagcaaggtcggggggcaggcccgagctgcacaggccaaggaattccacagagggtgtgacccaaagcccctaacaacagactcgctgggaccccctagacttggcatggaggctgggtaagcccgcgtccactatgcccaggtgggtctggagggagagggggccggcccacggagcaggaaaggcaacaacttccccctccagcactaggaacggggccagactccccaaggccgacaaacttgcttggagtccggccctcgtgccgaattcgccacccaggcctcgctaccttaggaccgttatagttactgcctgtcgtttatcgttg

SEQ ID NO: 130846 - DNA, 1075 bp, Homo Sapiens
  misc_feature (143)..(187): n is a, c, g, or t
ccccctcgtgggggaagttttagaaagttcaaggggggttcgaaaccagtttcccttgaaagtcccccagaaggtttgggggccaaccggcccccccaaaagggcacgccaaggcttgataaattttctgccaaaactggaannnnnnnnnnnnnnnnnnnnnnnnnnnnnnnnnnnnnnnnnnnnnaagtggtgggtggtgctcaaaagagcagggtccaggtggaaagtgagccccgaccaatggcctgcagcaggaggcagcagctcttgtggacagggaggggacaacccaccggggggccagggagaaaaatcctgttggcaggtacaggagggagagcaggcctgcatcttcctggagactggaaaaccacagctcccaactgcttggtgttgaggaggcccaggataaaggcatggaagcggctacggctgctgctcagcggggctagacggctgacctggctatacagggttccaagggagcgggtgctggagcctggcttcaccgacgcctccaccacgctccaggggctgctcctgcgctgcccggtgatgaggtccttccggaaaggcttcagcccgtccgccaccagggcgtggagggccgggcagagggtggtcagcaccaggtgccccacatccgggctcagccggctatcacccaactgggcctggaggtggcgcgatgccgatggctccagagatccctccagacacctcccagccacctcccgccaaccattcccgcaccccccgcggagctccattactctcctcatcccaacagcctccccccagccaccttcaccttctgcaccaagttccgggcggccccgaaatgcgagatgattttatcaacggagacgctgacggctatcagaagacctttcttctgctcctgcagctgaccagtcccactctgggcttctgccatccacagccgctgggctccggggacaccggcgaaggaccacgaactacggactccaggatcccggaactccgggagcgggatggccgcgctcacctcccgcctgccctgctagggcctgtagggcggatcccgaaa

SEQ ID NO: 130847 - DNA, 580 bp, Homo Sapiens
tttttgaatttgaatatgaatttattgttattaccaatagtgttaataaactagtaattaacatttttgtttaaatgctggaaaacagaaaagcatttacattgtccagagagaaattaccactgtcagcattttccagccttttaaaattaacattgtgtatatataatcaaggttatatataacattttattgttataacagtttattgttatagctgttatgatttacctgcctggtaaataccattttgttaatggttgcataaatgtgtcattacatgattgtaccatcacttgggacatttattctttctttctttcactgctataaataggacattgaggaatatttttgtgcataaagctgtatatcttcttagatgtatgattactaagtatttaagtttgaatatttttaaggctcttgatttgctggaggactgaaaaaaatgaagtgatagtgtctgagaatattcatttgacttattttttacagcatccattccctttcatgttgggagtgttctctttagtggcttaaattctttgcctgcctttgggagtgtggagggtggagt

SEQ ID NO: 130848 - DNA, 1131 bp, Homo Sapiens
tgaaaccttaatttgctttttaaaagcaaaatgtttcattctcagggaagtgactgcagcaggaatatttgcttgcttgttaactttatcttcctccaggcatgtagtcttcaaatggagtcttcaagggaataataacgtggacacttggacccactgcttgtggatgaatttcagaaacctagagaaatgctgcttgtttattgtggacacttgtatggcattaggcagtgtttacagaatgtttaggcattctaaagcagaacacaattaagaaacactgttaggaaatttactcaaatgatataattgattaagagttaggtcttcctataagtatcatctatgactcattaaatactatgaattttgatgtccaaaaacaaatacaggtctgattatgtacaattccagaaatatcattaattaatcaccactcatttttaagatgtgtgaagactgtaatattggctagtgatttttatcagtattaatatgcatagaacccacattcctctttttgatttgatgtattatagcatgtatgtattgctatttttctctttttttgaagtggtgaggaatcatgcacagtcaatatgctgggttcctttagaaatgactttagctcctgtctgaaggcaggaaaaacttctttttaaggaactttcatcattgccttttactttttctatgatggttttcatgagcactgaaatcacttggagaggcaatgcaaagaaatctatctgaaacagcttcttggcaccctggagttacagctatgaagggctccaacgtaagggaagcttaatgcttccgaatattgacattgactccttgggtgaaattttgtccaaatataaaattgttcatgttcaacaactaaatgtaataaatgaatttcatatatacttacatgatatctttgagattaaattaattatccttttgtaggaactgacagctttgggtagattattttttcagttgaaatgtgttgctaacaatatgcttacacttgaacgctgtttttcatattgataggaagacacaaatttctacagggaaacagctttgtgataaaggaattcttatgtgtgtcattacagtaaattgcatattgtaaat

SEQ ID NO: 130849 - DNA, 529 bp, Homo Sapiens
gcggccgccccggctcccggctgcaggaatcgcgccaggacgctggccccgctcgcggctagcttgcacgccagggcacagcgaggatgggagggtcgcagtccctgcagccagccccagccagcgacctgaacctggaggcttccgaggcaatgagttccgattctgaagaggcttttgagaccccggagtcaacgacccctgtcaaagctccgccagcttccacccccaccaccccccgaaagtcatcccagaacccgaaggtcagcacacagccacccccggaagaaccaggatgtggttctgagacagtccctgtccctgatggcccacggagcgactcggtggaaggaagtcccttccgtcccccgtcacactccttctctgccgtcttcgatgaagacaagccgatagccagcagtgggacttacaacttggactttgacaacattgagcttgtggatacctttcagaccttggagcctcgtgcctcagacgctaagaatcaggagggcaaagtgaacacacg

SEQ ID NO: 130850 - DNA, 452 bp, Homo Sapiens
atgaaaatggacaaaagtgtcaagatgtatttgttttctttgactttattagcacacatcagaaaaatagcattgtattttgtgatttctcatgatgctctatcaaacagatagaaaacagatcatcaatagctgccactgtgttcctggagaatcttaagtcactccttttgttaattcgttgtaagtatgggtattacaaagatgacctgtcttgtgaattgtttgtaaatctgaatgctttggaagcactttgagatcccaaagtgaatcgtgcaaagtcattatcggttgttgttggtttttaaatgaagctccaaatactgcccatgttataaatggcaagactttcaaaaaatgatcactattgtattataagcaatatgcttgtaatttaagttaaaaactttattttcaagtacacttggtggtgataagtggtttatcccctc

SEQ ID NO: 130851 - DNA, 1124 bp, Homo Sapiens
  misc_feature (60)..(81): n is a, c, g, or t
  misc_feature (509)..(517): n is a, c, g, or t
gtgccaagctaaaattaaccctcaactaaagggaataagcttgcggccgcctgctcaggnnnnnnnnnnnnnnnnnnnnnngttaacatttgatttatttaaagtccttaactgcaaatgatcaagaacattttccacggcttaaaatctggtattatttttgttatttaaatcaaaatatttttaattacaatcacattgataaaaattaacaatttaatttgtaattttaaccatcatttaaagcaatttcagctgtaaagaaaaagaataaaccatgcaataaattaacattgagaaagcaaagagaaataataatgaaacccgtctggctatactaacaccatgtccaactgtggaaagtgcataacactggatgaaacaagcacacgatggcaatgattaaaatggccactatcaataggatttttgaatcttggaccacgttttgaaatccagctccctataacttatctctcctccaacattgtaatattcccttttactgnnnnnnnnnttctttaaatggtatacactcatagaaactaattttatgtgttatgtgacctcagaatgacatgaccatggcactctgcaaagcaagaagcagagttcttgagggcaattcctgaggaattgattcccagggccatctgtgggtagagaggacaaaggggttggggtccttgtaactttcggtcaagcaactcttgagaatgtatcatgtatatcacctatctattacctctatatgttatgtaaatatacggaggatgtctacacatctgagcatgtgcatacttaagtccatacacaatatacatgtatttcattttaagacatctgctatctgcatgtatcagacatgtaaactgataagcacatggctctgatgtttatcatctgtttatgtcttgctatataacagcagtattgtctttcactatcttttaagagcctctatcgtaacctgttgcgtcacatttcaatcttacggtcacagtattgcaaaaccgtaacccgtaggggcacgtaagacgtgaaaagacacagtatttcaactgacacttcttttggttttatgacctccaataaagccgcgggaacggacaaacagggaggag

SEQ ID NO: 130852 - DNA, 999 bp, Homo Sapiens
ctatctattttacattttctctcttggttgcagctgttttatttccagcatgttcccaacctggtgaccctccacagtccagcagtagagagatgggtaaggggttagatcggcccacacctccacctgtccctaaggttacctcagttgctgaaagctaaaaccttgcgcgcaagggcgaccttccccaggagggaggagagacgctggaagagcagccaagcctccaagccagggccggccgggatcagcagaggtgcaaagtcccactcagacggacccagcccttcccctcccaacactcatcccttccctgctgggggccggggctggggctgggctcagtggcccaggaggcgcagcatctcctgaggatccaccagcttctccctgggcttccccgtgccctggccccgggccacctcctcggcatccagcttctcccagtctgagaaagagactggccggacccctcggctgctgagcagggcctggatggctgcgtagccaggcctggggccagaggggagcaacccagccttcaggtcctgcagcagcatctggccggtgaggaagctgtcagtcatggttgtggctatgacacctgtaggtcctctcttcacccagccgctgcagtagaggcctggcacatccataacccggccctccacattggggatgaccccaagcttggagtcaaagggcacgcttgggtcgacagggcggctcttatacccaatgctgctgagcaccagcccacaagggaggtcttccatgtctcccgtgggcactgcacgggtgggctcatcgacaccctccagtctagtgactgctaggcggacacctgctgcccgccgcccatctggtgagggcagcacctgctgggggcttcggaaaaagcggaggccccaggcacgggaggccgatgcctggcgggcagcttccgccggccctggcttctctgtggccgttcgaagcagcagttccgtcagccgcttc

SEQ ID NO: 130853 - DNA, 2555 bp, Homo Sapiens
  misc_feature (42)..(58): n is a, c, g, or t
  misc_feature (1012)..(1012): n is a, c, g, or t
aaggtagcgaggcctgggtggcgaattcggcacgaggcgagnnnnnnnnnnnnnnnnnaaaggttgggagatatttattttctttaaacaaggtcataaataacaaaaaacaaagtaggtcccagactccggaccatgcagcaggacaggggtgggaggttgttgagtggaaaggtggagggggctacacatcacctaagacagtcacagaaaagatgggcttcaggacactgccccttcctgcccttggaaatggcgtgcctgggcaatagggacaggccacagtgctgtgtcgaggcagctggaagaaggcaaagactggggatgccaggctgtaatgtttctgtgtggagtgatgtgaaatccacaaatggcaaagagaagctgtaggtttgaagaggcaagggggcactgcacacctccaggaaccagttatgaaaatggttaaatttgatgattaaaaacaattccataggctttggcctgtggctttgtgcatgggctgtatttaacctgggttgctctgtggcaggtgagggcgcaggaggcccctggagcagcctggcctcagcccagggcaggtgcccagacatgtgggagtgggacagtgggctctcccagatgggaggccatgtgcttggaccggctggacctgattttcaggctcgtttcttgtgatgctatccaccaccaccgctcgctatggctaaggatgggatcttggcctctctgggtcttccaaacctggaagagtacgactgggataaaacggtacctgactagtgttttatttgaaagggaaaaataaagaccaccccatgcattgtccatcccatgaggcagggctgggccatgccaagacaatctcaaggaatggaagtccctgagcctgggaagacatttgaactcagatgtatccgcctgatgctaggaagaggggctcagtatggcaaatctgggggctttaccctaggccacgcagggagagcaggcaggagctaccccagtacangggaagggaaaggagcaggggagccctggactggggaagccgatgttggtcaagggccctggaaaacaatgcttttggcagaatacatgaaaaggttggtacatctcggggtgcccgtctaccgggaagccagtgtcacatggctgggcgggatggagaggagacagtggcatcacagtggcctctggtgcgacgtatttacaacagagctcgatgttgaggaggggtggacagcaggtcactaacagccaggaaacacacactggaatccaccgatgggttctgcaaacctgtgccggatcaggaaagtggcaacagcttcagctaccttgtcaggggcatcctcatggactgcatggccacactggggtaggacctgcatctggaacttcccttgcatctggccaatggtcagatctttatccaatctatcaacaccagccaagagcagcaatttaggaatgggacaactaagaaagagattggataagcctcggaaccagccgtcccagtatttttctgtttttgccagttcaattctccaggtgtatggatggtctttcttggtctccatgtcatctttcctttttcctcgttgcttatagactcacttccttcctcatcttcttcttcttcctctatgattccttccactatagattttgagccttctggacttgtaattccttcacactgtttgacttggccaaccattgagacacgggcagactccagatttcgaatctggccactcttcacactccattcaatagcattctccagagacttgaaggttttaggacgaccccgtaagaaattctgcatgctattaagtgcatccatagctgtaccttctacaacatcaatcatgcacagacccaagaggcttggtaccaggttggatgatgctgtgtggactgcaatagcaccacccatgctatgtccaatcagcataattggaggaggaaggtccccatacatggcttcaaccacattgccaacgtcttttgccattgtttctgcagacagatcttcaggattcttgacctttgtttcaccatgacttcgcagatccaaagctacaatcctacactgaactctactaataatcgctgccgtgaacacagcccaagaaagggcagaatgacctcctccatgcagaaggagcaggactggaccctctgaaccactcttgtagactcgaaaagtatccttgccagtttcattctctacttctacatcttccatggactcaaaatactgactccaaggaacaggggaaaagtcccgctttcttccagggcccattcgcatcttggctccgctctgactgcccccgctgccgggtagaggtgggcgagagggaaggcggccgaggtgcatgctcttttcgagggccgacatcgaggggaggctgcacgcacgtagtcaaacagtaggcgaagcttcgtcccacgttgagtgtggcccaaccggtcacgactcgctcccctaacgacgccctgtcgcctttggacagcacccagctacccgtagcaccgcc

SEQ ID NO: 130854 - DNA, 824 bp, Homo Sapiens
ttttaactttaaaattttttattcaacaatgtacacttattgtctctcaatttgatctacaaatttctcaagttttttttctgataaaataagtaaatctgggtatggttgtagagtgtttgtaatttatatttttaaaacactgaacatgatgaagacatcaataaaggaagatcatcacgtaaatgacacttcctcagaatccatgacatcagaaacagctatagcaaatacctaagcatttagcaaaagggaaaatttctggtgactgttcttatatgtagaaaagacctatatttttgactgggcaaaacaaacattgaaacttttttttgagcggggggaacatcctttaacataactgtactccacttattatccattcccccagattaagaggtaactcagctccttagtgcctctgcacgagacagagaaattacttcactcctccagtaggttctaagactgaacataagtgaactactgacagatgcggaagaggaaccatagccatctaaaatgatgcttgctacactcctgcatttctgccttttaaggccatgcaattaatatgggtcaccttttaagtcttaactggataacttagtttttaactgccactatcaatgaagatacatatagaagggttttgctgtgtcctcaaaggcaacaatatacttgatgaagaagtaaccctcttctgtatattgaaaaagctataaaatggaaatatttattttttatgtaggagcatggggaaaatgctatcagtaatatcttctacttaaacatattagcctctcctacaaaggtcctgaacc

SEQ ID NO: 130855 - DNA, 520 bp, Homo Sapiens
  misc_feature (216)..(325): n is a, c, g, or t
  misc_feature (342)..(407): n is a, c, g, or t
  misc_feature (419)..(438): n is a, c, g, or t
ggatgtacaaaaagaagatattttattgaggaagttgcaatgtttttacatacatgcacaatgcttacacaaattcagcttcgtgataatgcactttcatggagtcaaatttgcaaaaatgcataaaatgaattagaactttctaaacatctttatacaatttataccttcagtattaaaaatggactgaggaggccgggcacagtggctcacacnnnnnnnnnnnnnnnnnnnnnnnnnnnnnnnnnnnnnnnnnnnnnnnnnnnnnnnnnnnnnnnnnnnnnnnnnnnnnnnnnnnnnnnnnnnnnnnnnnnnnnnnnnnnnnttaacacttgagcccannnnnnnnnnnnnnnnnnnnnnnnnnnnnnnnnnnnnnnnnnnnnnnnnnnnnnnnnnnnnnnnnncctgtctcaatnnnnnnnnnnnnnnnnnnnngtatgttattatttcctgttttattgtctaaaatggtctatgaagtgctctgttgtgtttttatgtttctcaaatctccttt

SEQ ID NO: 130856 - DNA, 1320 bp, Homo Sapiens
ctaaagcccatcatttatttccaatacattaggataaaaacccactttatgcaactgtaccctttaattcatttcttctgaagaaaagtacaaaagaccagactaaaattgagacaagcatttaaaggaaaatcctttgactcagagtccaaaaccgaactgtaaatggttcattttaccaaaagaattagtttttgtacaaaatataaagaattctacactataaacaaagacggctgtatatgtaattaaattagaattctagtatctgcttttcctctaattcttctggagtacaaacatatttgcaagtcagaaatctaatattctcaatggacagactgtcttagaataagcttttacccttaagatatctggaaagatagtactcattctttcccttggctcaaagtccaatatatcagtaagttttaatttagtttacaaaactctgccatattaacatgaagagcacactaatgcttaatgtttaagcattatcttttaggaagtaatacaacacagagctcaacaccgaatctaaaaggtcacaatctaagtcattattaattcagaaaacttcagcaacttctatctttattgaaaaagaccaaaccaatcccttatctcctactatatcattactctattttcatggcccttctatcaaagaaacagcttaaaataaaacttggttagagttaagtcatagaaaatagttctctagcactagctgaagttcagacttgatcaggaaagcacttctatacagtaatgattttctgactcagtgtttaagatagtattaacctgacttttatctcttttaacatttgaaatctttgttatctaaaagtctttcccaatagaattataatcatgatagttttaaaggagacaatatattaaaagttgagctggaaccacatagtcctttaatatgattagccagttatccaagtatcaataacgttaatctccttttaaatgaaaacaatgaaattttatgagcttaactgaaatgtcttaatttagaacttctcaattcttttcatcatatatatttcattactacctttcgttatcagtatttcataattgatgttgtaatgtttgagaccttaaagggatactacccatcacctaacatatgcatagctctggcttgaaaaaaattttttttcccctatttatctcaactctcatttttattattcagggagttccaaagtcatgattggaagagacatgatttaccttatggctacaaacagcatatgatcctaagaaatcatgcatcttctggctgggcgcggccgc

SEQ ID NO: 130857 - DNA, 885 bp, Homo Sapiens
  misc_feature (189)..(189): n is a, c, g, or t
  misc_feature (771)..(771): n is a, c, g, or t
  misc_feature (819)..(819): n is a, c, g, or t
gaagaagaaaaccaggctttgataccatgctctatgtatatatgaatgggggccaaatcgggggagtgatttatatattactctgtccgatcttgatacataaatacccagccccatccctgccctagaaaagatagacctatattaattcggaaaatagctctgttcacctgcccctgccacccaccntggagctcctgccccacaaagctggcccctgctccggatgagcccctgctcccgatgagcccttgcccagcatcctggggcggggagggcatcagcttcttttggaagacaatctgggccctgtcgctccattggcctgaagaggaaagtgagcccctaagtgggcaagggcagccctctgggcccagccgtcaggtccttcggaagaggttactgagaaagccaccggcgggcccggggcccaggcgcagcgagaagcggggcgcggcacggcgcggggtcgacgacgacgcggaggcgctcagctccttctggcgctgtgagcgcagctgctgcccgatcaccacctgcatgtcgtcctgccaggcctccagctcctgcgtgagcgccaccttctggcggatggcgcgcagcagctcccgagacagggagtctcgctccagcgagacgcggtttgagctgcagggacagctccagggccttgttcacggcctcgtcccggtctgagagggcactgtgcagggcctccccagggtcttcctgcgcccgcagctccttctgcctctgcagctcttcccgcanggactgcagctctgcctgctgcagcgagatctcatcttgcagcttggncacttccacctccttctcctccagtatctccgctggactgagggatgttcgcttcttggggggctc

SEQ ID NO: 130858 - DNA, 672 bp, Homo Sapiens
ttttttttaggttctgccagaccaccttttattacatcagaaaagcaacactaggcactagatcttgcaaaatatgttctgaccaactctaaactgtctgaagttataaccatatcagtaaggtttttaatgaacaaaaaagttaaatacaaactttcatatgcaaaatagattattgtataactggcaacctcagagccaagtactaaattttcttccacaaatttcagtggggatggagtggggagatgttagtcttaatgagtagaaaacttaatttagacttaatatatagaaaacaaaaactctgaggaaaaatagctttaaattgaatagtatcttttgaaataaacagctcaggccagcccctacaattctgaggtttatactcaaccagatctgggatgaaaatgaagatttagggtttacagttacttcaaatccatgaatccagtttgaagactaagccaagtcaccacatttccagaaggggaagtctctttaaggtgaccacaacactcttcggaagatgcttggatagtcagagtcccttgggcacagttccactgttcacggcactgtgccaacgctgtagtgtcagacttcctctgaaaggcaacaggagccctatcccacagcattttcatttctccccagcattttttgagcctc

SEQ ID NO: 130859 - DNA, 700 bp, Homo Sapiens
  misc_feature (56)..(56): n is a, c, g, or t
  misc_feature (678)..(678): n is a, c, g, or t
tttcgttatgacaaaaacatttacttgagcactttctgggcgtgccgggcaccatngccaagcccctgggcgcacttcatcatactgggatccccaggacaaccctactgaggtagtagtatcgtaagccccattgtacagatgaggaacacggggctcagagaagtgaagtgacttgcccaaggtcacacagcaagtgcatggcaactcttggatttgaagccagatctgtctcatagctgcagtctagccgtgacacctgagtgcctcctaaaagctacatcacagagctgtctgaggatgctgtggggaaccgtctgtgaaaaggtgcaacacgtaaactccgaagagtttatggcaggcctcctgaagaacagcagactagaggctacccagaggcagcctggagacagagtggggaggaatgccctgtctcctctcccaggggccccgaccaccagcctagaccagcgggactctgggctgctcaggcttcagccatctctctcctgccaccatggctctgcccagaaaccgtggatggccctgcccccaaccctagaatgttgcagggctttccggcaggagaggggcacaggagggcgaccatgggctgaggtttctgaatgacattcagcaggatttctgccaatggctcgatggctcgcttccactggntaggatcaccggtctgccccca

SEQ ID NO: 130860 - DNA, 504 bp, Homo Sapiens
tttactgcatgcttaaaacatttaattttctattatacagttaaacatttgcttgaattcaatgagtctaaaaaatcttattgttctcaggttagcagttagttgagcagagtccattggtgaagcaatctagttattggcaaattctaacacatggtaaggtgtgggggaaaggatttaaaataacagaaaaatgtaagtccaaacatacataacagcaaaataaaactcactttaacaaaaatttatttaaaatgttacccccctatttcctcaatgaccaacttgtttcagttttatctccccctcatccggttattttatgtctttttgggaggaagggagatgagggtttttgttttttaacaaaatcactggctttttaaaaagtgttactgcagtcatttataagatgcatgttatatggaagtgatacctgagttgtttgcatgggcaatggaagaggcagcagctctgaaaggagtatgagtccagaaaaaaatc

SEQ ID NO: 130861 - DNA, 1021 bp, Homo Sapiens
tgagatatatatgcacgacaagtgagcggggtttgtccaagttgtgtaccattaaaattgttttgattcccatatctgggtgctactttgagagttgccccaacctgtgagtgaagtgtcaattagaggagccatccggccctaaaagcggaccacgttcctgaaccacgcggccccctgtttcctaaggactttaagggaagaacccaaaccaggctccgcagagaccaccatgttcggacacagccggtaacagtgtactgcttcagagttagctagcgtagccaacagacagtcacagattgaggtcatcaattctttatttggtagagaattggagagctgctccagttcagaaatagaaccttcagaagagcttggtaagataagtgcaatgtcctgatcacagagagactgcaaaatggatgtgacatattcaacacactgttggcgaataacactgtctccaggagaccgcaccaaagctaaaagatcctggaatatctctgcatatctttcatcacctttaatagttccattaattagatgcaaaatagctaatttacaagctttgtgtgaagccagagcatcaagaagagcaagcaacctggtggtttggctagtatactgtttttctttatcttctgaagtgctttgcaagtcttctacatcaatccaacacagttctcataatcagaagtgcagttggtgaggcaaggtcacacaattgaacacaatacgccgtaacatatgttgaatgggctggcaggttgtgccagagaaagagcgaactatttcttggagcaactttgcttgaacatgaaggtgcatgctccacaattttcgggtgttgagtgccactgatatatcatgtggctcaataacctgagttgtttgcatgggcaatggaagaggcagcagctctgaaaggagtatgagtccagaaaaaaatccttcaggaccttcagattgaagaaagacttctttacttcctcgtgccgattcacccccggcctcgatc

SEQ ID NO: 130862 - DNA, 933 bp, Homo Sapiens
aagaattcggcacgaggggtacctgcaggagctggacaaggaccacgcccgctacctgagctactttcgctggcgggagacgctgcggcctcgctccttcagctgggcactggatttctgcaaggcctgctggaaactgcagcaggaatccaggtaccagacggtgcgcagcatagcggcttggttcacctgagaggccggcatggtgcctgggctgccgggaacctcatctgcctggggcctcacctgctggagtcctttgtggccaaccctctctcttacctgggacctcacacgctgggcttcacggctgccaggagcctctcccctccagaagacttgcctgctggggacctcgcctgctggggacctcgcctgttggggacctcacctgctggggacctcacctgctggggaccttggctgctggaggctgcacctactgaggatgtcggcggtcggggactttacctgctgggacctgctcccagagaccttgccacactgaatctcacctgctggggacctcaccctggagggccctgggccctggggaactggcttacttggggccccacccgggagtgatggttctggctgatttgtttgtgatgttgttagccgcctgtgaggggtgcagagagatcatcacggcacggtttccagatgtaatagtgcaaggaaaaatgatgacgtgtctcctcactctagaggggttggtcccatgggttaagagctcaccccaggttctcacctcaggggttaagagctcagagttcagacaggtccaagttcaagcccaggaccaccacttatagggtacaggtgggatcgactgtaaatgaggacttctggaacattccaaatattctggggttgagggaaattgctgctgtctacaaaatgccaagggtggacaggcgctgtggctca

SEQ ID NO: 130863 - DNA, 760 bp, Homo Sapiens
  misc_feature (604)..(647): n is a, c, g, or t
ataattaaaatcacttttactattgatatcagttttgtttaatctgaaacctataaaatagagatatatctacctatttatggatggataataccatcatctcatatttgtggaatgctttatagtttttcaaagtacttttattcactttatcttccatatatgttatctcctctgattccagcaataacagcccggtgaggtagccagggcaagtatgtattttacacattagcaggaagggaggctaagcgaggtttatgtaacttactcaggctgaaacactgaagaaaaatttgtgactctcatttcagtgatgttttctgcattattaaaaaatattatgctactcctcactatattatgttgatggttgaaatgtcattataaagcttaatttatatgattctcttgatgaggatgatgaagcaaatgctccatcaactcactagtttacaggggcaagcattttcctacatttcacacataatttgattacctctgtcctaagtgaataatctactatctgggtatgagaaacatgatttgaaaacactaaaccactatattatttcaacaaagaaccatctttcacacctaagtnnnnnnnnnnnnnnnnnnnnnnnnnnnnnnnnnnnnnnnnnnnngatgcatgaaatcaagtcaaaattgggtatcttttatctgtttcttcgttgtggtgaagaatgttgcctggattccttccatctaaagacttgattgttagacctgtggcacc

SEQ ID NO: 130864 - DNA, 950 bp, Homo Sapiens
aaaattttgcacagttttattctgttaaaacaagtggttcagtaagctaaacgagatatgtatatagtatgcattaaaatgcaagactgacttccctgggaaaacgtgggaaagaaggagagaggaaacaaacaattcttacactaagaattctccagtcgtgtcttgcaggcaatatagagtaataataataaaaatgacaggagatactttgacaggatggcttaaaatgccactcaatagatgaagagttgttctcatgcttggcaagtttacagcaaagcccagaaggagaagccagaaaataatttagaaaaaccaaagcttaaaactagtggcacacaactctggttacatttttcattttcatttttggttcctctgcatttcggtggaactcagtcccacagatgtcttcttcaatgtgggaaccatcctttctggaaccacagagctgcagatgtcacgctggaattctcccagaggcaaactgccagatgtgaggctgctcttcctcagtcactatctctggtcgtaccgggcgatgcctgagccaactgaccctcagacctgtgagccgagccggtcacaccgtggctgacaccggcattcccaccgcctttctcctgtgcgacccgctaagggccccgcgaggtgggcaggccaggtattcttgaccttcgtggggtagaagaagccaccgtggctgggagagggccctgctcacagccacacgtttacttcgctgcaggtcccgagcttctgccccaggtgggcaaagcatccgggaaatgccctccgctgcccgaggggagcccagagcccgtgctttctattaaatgttgtaaatgccgcctctcccactttatcaccaaatggaagggaagaattcttccaaggcgccctccctttcctgccatagacctgcaacccacctaagctgcacgtcg

SEQ ID NO: 130865 - DNA, 348 bp, Homo Sapiens
  misc_feature (14)..(14): n is a, c, g, or t
gcggccgccttccncgtaggttcacagtcagcaggccatctcggctccggccctctgggggctgcacatcatggcactctgggccgatctttatgtcacggacattgaagtggatgagcacacggtcctcctcgtcctgcgctgtctcatcgtggtagtatcccagggtcccgtccagccacagggcaaaccagttccgcttccagcggcggaggatggagctctgtctccacagccagccgcccctcaccagggccatttcttcaaaaggactttccagagcggagtcaggcgggaccttgtctacacttgttgcggatgttgctgcctaagcggccgccctcgtgc

SEQ ID NO: 130866 - DNA, 465 bp, Homo Sapiens
  misc_feature (393)..(393): n is a, c, g, or t
  misc_feature (418)..(418): n is a, c, g, or t
gcggccgccttcccgtaggttcacagtcagcaggccatctcggctccggccctctgggggctgcacatcatggcactctgggccgatctttatgtcacggacattgaagtggatgagcacacggtcctcctcgtcctgcgctgtctcatcgtggtagtatcccagggtcccgtccagccacagggcaaaccagttccgcttccagcggcggaggatggagctctgtctccacagccagccgcccctcaccagggccatttcttcaaaaggactttccagagcggagtcaggcgggaccttgtccccactctaaccctgttaggaagggaatctttactcctgttttacagatggacaaactgagggttagcaaatgactcatccatgtacatngatgtagcttgcactggatccaggntagtgcccttgtcctgaggcgactacctctgccgaatcttggctcga

SEQ ID NO: 130867 - DNA, 800 bp, Homo Sapiens
ataatcagggtattcctctgcgttgtctgtaaattgcacagaccaacggagctgtacctgcctcatgcagaaggagccacacaggtgaccctggctccaggagagcagcggatgacatagtaggggctgagttctattgtaccctcagggctgcctcctgtcctttccctttgacctggggtaatcttggctgtgtaatgaagccatcacctgtgccccatggtggcgggcttagagcacaggtggcagggagcaacatccacgcatccttcctcccagtcttatttactacatgaataatgacaatatttcccaggtagtgctccctgctgcaatgataacaaacactgaggaatttctggactcggggagttgacattccaggggggaaacagataagacaccattaaaaagtaagaacacttaagatcacatagataattttagacaggagtgtgcgctataaagaaaacaggtaatggagagaaagtgaggtggtgaatttgtgaacctcctttggttcacaaattcctccttggaaaagtgaggggtggtctttgttgaggagatagagttgaattgggaagaagggagccatacagggattgagggggaggacattccagaggaaggaacagtaaatgaaaaagttctaaggcaggaatggaggaggatcatgtaggggttcatagggcacagtgaagggaatgaaatttgtcctatccacaatcccaagacttggaatgcacttttgtaggagagtgccttgatgtgatttacatttcaagccgcaagcttat

SEQ ID NO: 130868 - DNA, 743 bp, Homo Sapiens
catactgatgttgcaatttatattagaagtactttcaccacatcttgctttatgctcccagtgaaccctatggggtgggtgggtttatacaaagggcaaatgcagtcagtcccagctcccaagtgaggaagctaagttctaaagggcttctgttccttggttaaggccacacacgatattcacggtgttggtattatgacatcaagttcagagcttttctgaaaatatccaggcagcattccacagggattgctcatctatttgtattttacagatactctcaagactaactctagcagaactttccacagtaatgtatcccccttgtaatgttcccatactatcctttctgtagctggagccatggacagacatggactctgtcttctttccacttgggttcctatgcaacagtgtaactggatcatctgtaacagtttgtgggtggccagacagtgctgccattgttcaatacattcctcattggaagctgtcttcagagagccaatcttcttcccagtaagaaaacccatctatgagtttagagctctgcttcatttttaaactaaaaatggcatcagcttgattgactcccttaatcatcagatttttagttgcttcattgtggccttcttagaggcctaaactttacaaatagagtatatccagatacactttgttgcaggctctgagggcacacccaaagacattgcagaaagtccagtagcaatagccctctaaag

SEQ ID NO: 130869 - DNA, 1253 bp, Homo Sapiens
  misc_feature (27)..(27): n is a, c, g, or t
  misc_feature (1135)..(1169): n is a, c, g, or t
cgacaagaattgtttttttggttatangatggtgtttggtgtaaatgtgagtttattgacgaagacacaaggtcaagcttcccccaacccccaccctcccgaaaaacaggacccaataagaacagaggaatgagaagcattcttagggcaacatttcccctgccccccctccccatttctttccagagtctcaagcttcacaacacagacacagagcaggcttgggtgaggacagacactcagggaatctctgaccagcaaaagagttctgggtgtttgcttctcctgctctttgtatgatgccagctgacattacaaagacacactcaggcagaggaggggggatgcagggcaacctccatcccacttccccaatttggccaagcttggaatgagccaagagggaagccgtggtggaggcaacaggttttgcctctcaggagaggtccttttatgggaagtagaattcctccctaactctgctcaggggtgtgatgggaggtggcttccccaaggagtgaagagttcatgggttggctcagtcaggtcagctgagaataggagctgttatccatcactggtggggaggctgagagaagccttgtttcgggggttgagggacatattctgataggaaattgtgttgtctgcttgccctgacacacttttccttctggaatgatagtttgctttgagatgagaacactatttgcagtgtgaaccttctgcactacttgtatccactgactccaggaataagtcccaagaagggaactttaccaacctgcttttccgctccacacatcaccgacctatccacctcccacatacaatcctatgctgtttcctactgccatgtgcttcaggggtggtgtgcaagggacatatttcctccctccttccccaaatatttttctcttggagattctcaaggtttaagaaagtgctttgtgggaccgctccccacaagctttgcaactggtatgaaacagggttatttcagacatgaaataggggtgtggggtagttttgctcttgttttccacgattcctcctctgagtccagtgagttaggtctcagtcccccggccgtaatggccgaattcccgggcatatgtccggtaccgtcgactgnnnnnnnnnnnnnnnnnnnnnnnnnnnnnnnnnnncggccgcttcctcgctcacatacttcgctgcgctcgtcgttcggctatacgacgtagcgccctatagtgagtctatacgagtta

SEQ ID NO: 130870 - DNA, 1181 bp, Homo Sapiens
  misc_feature (62)..(81): n is a, c, g, or t
  misc_feature (1054)..(1116): n is a, c, g, or t
ggtgccaatgctaaaattaaccctcactacaagggaataagcttgcggccgcctgctcaggnnnnnnnnnnnnnnnnnnnnataaataatttcatttttaattctctgtacaaaacttctcaatctatgaaaataaagtttgcaaaaggcaaagtagcacaggagcctcaggtcaggaggctaagcacgctgacctacactatgtacacgtctctctcccacgacggagagagaggcctctggggcagagccctgcttgcagtccgggaaagccaagttggcttccgtcagcacagggaaatgtacccctctcttccctgtacacaggaggaaaaaagccactaaggtgcctgcagagcaaggaggggggccccccaaaatggctcggcccctgcagtgccccgatcggccaccagaggtcagcaccatcatggccgccggtcttagggtcaagatcgcgcccctcgggccttccaccgcgaaggcacacagcagccgcaggtcgaactgtggaggccagagtctcttgcactgccttcggccttcaaagcttcgacgcaggacagaagctgcacgggaccaaagtggctagagacaggggtgctgaggccggggacacggggtctagctggaagtgacagtggtcccaccgcccaggcgcatgagcatctgctgacagtcgtgcagcagccggcgatcgccaagcttctcgagtgtgcgcgccgcctcagccagcatgcccacgcgctgcccgggcgccgacaggaagccggggggcaggtagcaggaggccagcagcaaggcctccgcgtgctcccgccgcgtgggccgcggctccagctccgccaccgcgcctcctttgccaccggggcctgcccgccgcctcagactgcggtcgaggagctggtgtgtccgtgtggggctggcccccgccatcagccgggccgtggcctcatgtaggaacaccctccgcatggcgggccggaagctctgtgccagccgcctcaggctgctcaggtcccgttggaagccacgcagctcaagggcggaagcnnnnnnnnnnnnnnnnnnnnnnnnnnnnnnnnnnnnnnnnnnnnnnnnnnnnnnnnnnnnnnncatcccgaaaattccggcgccggccccacccgccatcttcgatgtgtgtgcgctcgtgggttttg

SEQ ID NO: 130871 - DNA, 2231 bp, Homo Sapiens
  misc_feature (181)..(208): n is a, c, g, or t
gtttgtggggggagaattcccaacgcccctatgttcctggggccccggttttctcctttggggaaacccagtcttttggcccaattttcccctttccccttagggggcgccccgggccgcccaaaaggaaatggttttaggaaaggcttcttcgggggcccgagggccggcccacacaagnnnnnnnnnnnnnnnnnnnnnnnnnnnnttttgcatccagttaaaagattttattttgatttcattaaaagagggaaactggtgaggccattttccaccagctcaaggaagaattttgtaaatgttatatttatggatcagaaataactgaaatgaatgtgcaaatggaggcaaaactggcctcttccacagtggggaagaaagtcaacagaacctccactaggcataatttacatatgtacagactcaatcagcttttaatatagaaagatatttgaacccaaaatctttcattaaggtaaaaaatacaataataatttttaatgaaatcctggaaaattcatacaaataaaattaaaagcctccaatggggtataatccagcaatatcctaggcaaatgcctcctgaagaacaacagcttttttaaaacatcactgtttatcattcaaaattcagacgtctcctatctttggctatttttatctcttcaaactttactcctaaaattgcactaggaaagcgttccttattggaatcataatgggagcaaagctgaaaatgtttctttagaaacatctaaggaaattacttagacccagatacttataagtgactataacaagcctttatcctgttttacatcagttttaacgggaataaaaagtaaaaacacatttattagtgtttcacatagctgccatgatggcaacgtgactgtgacttgcataaataatacactcaaggacattccacactccttggtggttccagcaatgcgatttactaaataaaaaagtgactattcccatgaaagaaagcatcaaaaactagttttgagaaagaagatgaaaggctcaatctctaactcctggatgccaggaagcagagtttttcagaatcaaaaacaaattaagagctcacagccccacccctcaggggtcacataagttggtactgttgcttgtaactaattcatgattttagccttttctttactcaaaattaaaactaaggacataacactcttcaaaaatacacataccctgagacagatcattaccagaatctacacagggctttgctatttaggtacagttagtacaattcatatttaaagtaatttcataaaaataacaactgttccaatcttacaagtttcgtttcctcctatcatggtcaccaaagcaatctctattgttaggattcttcattgcttgaaggtagaaactgcttagtaaaattctccagctcattttcaagttgaacagctttatttcttaagagctttgaattgttttgtattttctccaactgatctatttctttgggtaatctagcaatttcttcttccagctgtttttgagtaatatcaacttgttggcacaggcgagcaaaagtggtagctatttgttgttttacttggtgactgcagtttgcactcgtggagctagcaatcatcgtcagtttttcagttgcatagtttacaaactgctgtttaaaggctcgctccttggcatgggtggtccagctcagtctttcataaagatacaaagctccatacatagttaatgaaacagataggagtttccagcctatagttttccaaatcactcctccaacaataatgatgcccatagaagttctagatgtaacggacgccaatcctgttactaatgtaatcatgagttcttcctgtgatgcattatctggcgttgctggagtggtaggagcagtgggagtagaagctaaagatctagggagctgaaagataggctctgataatcctaggagcaccctttgagcatttctagggcccaaaaatcgatgtacaagggaagaccagcccagggaaaaacgaaatacaatatcctcttgaaaatctgaacataacttgtggtaatttagattataactgagatcaaatttcttgcaagggatcagtgtatgtagtttatcctgtataccagctggaagtaatggcttcaaattttcaataatttcttgctgggtctgaagcactaaggcgtttacttcatcggtgcatcgatcc

SEQ ID NO: 130872 - DNA, 1578 bp, Homo Sapiens
tttcatttaacagacatttattaagcgtctacaatgtgccaggccctggggacacagagctggagaatgtacagtccctgccctcaaggagctcacagtctggggggacagacatgtaaacacatgagttacaacgcgctgcgtgaagtgtgtggcagaggtataacaaagtgctgtggggcacaacagagcgaccagtgaactcttcctgggcaggggtcagggaagccttcacagatcagtcaataaatacggtgccatgggagtgccttgcacaccacgggcactcacatcttgaatgctggtccactggaggcccttgggttgggcgggagcaaggcctacttctgcttcctcaggacaacttccccacctctgtcctgggaccacctgcccgcctgggcctgcagtgactaaggacgctgctcccactccaggggccagtgacagagagcagctatacagagggcccaccccgcaggatccttgacaggagctgagacagaacaaactgctgcttgtctccctaccctgggggctgtgatattcttggtaacatctctgagctggtctgtgaggtcacttcctcttttaacactgttgaggagactccaaaccctctgtcttttgcctcgtcttctcatgtcgattgggcaccagccattctcaggcaccagagcacagccccacacgggtgccccatcagacagggctgcccacagcagcctcctacacctgaactgggtttctctgcacactcacagccgtctcaccagctcaatgagctgctggatgtttttgttttggttcgacaagccgttcctgatgttttcgagtaggcatctcttcaattcaaatatggcttcactgtaggccaagctcactgcggccatgggaggtgctccgtgccacaggcctgggatgtgccagatgtgctgcttctcagggtcgcagaaggccaggcctgccagtgcccggaagccgtcgccctgtttctccatctgggctgcagccctgctcaggtcaccaggtggatccaggagctgtctcttgtctctgggcctagggccgggaacagatacatcatgaaggttctggtatacccactggtagttgggcatgtgccccgttttttctaacctcagaaatgcatgcagaatagctgctggaatgtccttggtttcagctagactgatcacggtgacattgctcagtcccaggagcagagtggccaaggaagcctccagctcaaatctgtccccagctgacgtcaaggccccacctatcaagcccccggagtctatcaccaggatgtggtcacagcccaggtcctggctgaagccctcagccactgtgatgagctgcatgaaggcccctcgaggaccgcagctcttccctgtggcaaaccgcagcccaaacatggtgttgaggagtgtggacttgcccgtgcctggcaccccgacggttgacagaaccaccagccttgaccgtctctccagtcggacatgcagctccttcaggagccctgtgacccagcggacgggcatgctcagcgtgctcccatcgattagctccaga

SEQ ID NO: 130873 - DNA, 457 bp, Homo Sapiens
tttaaaacatagtgttggaactggtccacagctctgatttttaatgagctcccatttctgaggccaatataaacttcattctatgctgcccatctctgacaggtgggcattaactaccagccccccacggtggtccctgtgggagacctggccaaagtgcagcgggcggtgtgcatgctgagcaacaccacggccatcacggaggcctgggcctgcctggaccataagttcggccaagtgcgccttagtgcactggtacgtgggggagggcatggcagtgggggaattctccgaggcccgcgaggatctggcagctctggaggattatgaagatgtgggcatggattccgtggaagctgaggctgaagaaggcgaagaatagtgaggggagggtgcggcaggcaaccatccctctatattccccaccataacgctaggagagctaattacctattaa

SEQ ID NO: 130874 - DNA, 1279 bp, Homo Sapiens
  misc_feature (854)..(1118): n is a, c, g, or t
  misc_feature (1144)..(1144): n is a, c, g, or t
  misc_feature (1232)..(1232): n is a, c, g, or t
gggattattttggttttatttaggtgttgatgcaagcagattattgatttttcctgcgtccattcaaacacgcataagcacacacacataccgtccagcttctctactacagaagaagcatttacaagagtccttacaattctacccatgggcctaaaagaattccttctccacctgttccacatgcgttcccttgcagatggaggggcgttctgaggtatatgaggtggatttctgaaagacctgtggggcattaaaatcatcacagagctcaggtgtctgaatatcacataagtgacacactaatagtgatttccgtctttatagcttttagaacacatctgtaaaataatagcaagacaggtgcaagagtggaagccttttcatatctgatatttagaggacatgtcggtgagtttgaaatattctgtggctgggattatcagggactctgtatccagctcctgatgccaagaacctggtgctgtctgcagggcgccagagcctctcctccctgcctgttggtgctgatcccaggaactagggctacactgaggctcatggggccaggatcttgagaaagaaatgataacttctcttttccatctttccttcgctgctgcagcgtcagaggaatgtgcttccagaaggcttcatggtgggtgaaatcatgtcttcctgggtagaaacatttacaaagaaaagtcgacagctttcacatctcggtgtgtgtcatgttttgttgggataaaagtacaggaacgagtcaagcaggcaactccatcatcccctcatctggccggtctctgcagacattcagtggaggctcactcagtcctcgtgccgaattcttnnnnnnnnnnnnnnnnnnnnnnnnnnnnnnnnnnnnnnnnnnnnnnnnnnnnnnnnnnnnnnnnnnnnnnnnnnnnnnnnnnnnnnnnnnnnnnnnnnnnnnnnnnnnnnnnnnnnnnnnnnnnnnnnnnnnnnnnnnnnnnnnnnnnnnnnnnnnnnnnnnnnnnnnnnnnnnnnnnnnnnnnnnnnnnnnnnnnnnnnnnnnnnnnnnnnnnnnnnnnnnnnnnnnnnnnnnnnnnnnnnnnnnnnnnnnnnnnnnnnnnnnntcttcgcttctcgctcatgaccgctncgctggtcgttcggctgcggcagcggtacagtcaccaaagcggtatacggtatcacagatcagggatacgcaggaagacatgtgacanaggcagcaaaagcaggacgtttaaagccggttctgggtttccatagc

SEQ ID NO: 130875 - DNA, 707 bp, Homo Sapiens
  misc_feature (602)..(602): n is a, c, g, or t
agtttacaaatgtttattgagtgtctagtattgcctggaactactttttataataactttattaaggcataattaatatacaacaaagtgtacatacttaaagtgtacaatttgatagcttctaacataggcatacaactgtaaaactatcaccacactcaagatatccaccaccctcaaaagtttccttgtgcatctttgtaatcctggctgattctggcccctctgtcctctcaccatttccaggcaatcactttttgttatcatatattaatttgcattttatagaattgtacagaaattgaatcatgaagtatatactcttagggagcatggtctgacttctttgacttaccataattattttgagagtaatctttattatatgtatcaataattcatttcctcttcttttttaatccagcttgtgtgtgtcagaggtttatttctttcaactgctaggtagtaaatataccacaatttgtttatccattcttttgttgctggacatttgggctgtttccagtttttggctgttacaaataaagctgcaatgaatatgcatgtgtatctctgaatgaacatatgctttcattttcctntgagaaatgtctaaaaattgtatggctggggcataaggcagatgtatgtttaactttttaaaaaactgccaaactgttccaaagtggttgtgcatttatctatca

SEQ ID NO: 130876 - DNA, 2566 bp, Homo Sapiens
ttttgtctaagctttcaatgacagatattttaattgtggaatttttaaagcaaacaaagcaatggaaacttcatttttattctagaccagtctatcccagacatgctgattatggttggctgtgctgagtcctcatttaccgtatgaaatgcaaatgtctgtcaattgcaatgcctggggccaagccaggccagtggacttgtgtgcagttcccaccggagccaggagctgctcagacagcagacccagcccagtccactgggttttgcaaacacaggctccctctgcagcagcatgggcttgtggaagggaggcatgccgccgccagcatgcatgccaggggtccggggttctccccgtgtctgcagaggtgaggggtacaaagtgagctggaaacaaaacactgtgttcccccttggccttgaagaagtgcctcaaccaactcctcgccagctgcagagtactcaatctcctcacagaaagaatgtgtacaaaaaaactagaagcttttctttttcccaaatggctgttgaatttatttgcttgatcaataatggtcctggcaaaaattagttaaccaatgctgagacatttgtaatgaaatactaattttaaaaatccatgacaccttgatagaaattagagtttacacaaacaaaaaaggaaccttcgatattgccagcagctataaagtgaacgtactgagaccgacaggacagcaagaaggcatttgcacatttatatctgacacccgaccatactttcagtcaccaaaatatcttctctccagatttaaaaaaatagtatgctgatttctataacaaagctttttttcgtacaaaaatcaaataatggccaacgagtcacaacagtgcaataggtagaggattaaaaactgcatcaaacaggtgctgaaaataaatactacctaggaaaaggaggtgagagccctcgtgtggggtttgttttcgaccccttgagtgtgtgtggggtttgtcttccgagccacgagcctggcctgtctcgcggtgctgttcactctgacagagtgcgcctgcagcacgttgcctccagggcccagcctcccagaagcctcagagcatcagagcatccgtctcatcggatggaccagaaacaagaaaatggggtggggtgaatcacagctatcattcaaaggaaaggaatttttttctattgctcaatcttgtcaattgggagtccaccagtaggttcactgagatgatatggataatttcaaacttttgtttaagagcatatatatggcttattcaggcaaggagacgtgtacattctagcccaagcaagcaatcggagtcattctgtttttaaggaaggtcagtcgtttaaaagatttctggtttgaacaacatcctctgtggatgcaccaggccaaggtgactatctttgaccaacccagtgagaaggcctttgctggtccccgcagtgaggaactggcaggaacgggcagcctcctccgcgctggactgcactgccgggggccggtgggcaggctccacaggcagcccctgtctgtggccagacaggccgtcctggtgactcgggcttatagactgtggtttagaactgcagaaggagagaggagagtgggccagggaacacccaccaggcgctgctctgaccagtcagagaacgtgaggcagctcccccatagggatctgcaccgagaaggtgtggaaggcacaagcaagagtgacggtaccagagatcccagagggcgtggctcgcggcggccacagcaggcgcagcgctgacctggtgtggttccccccttgaatgagaaagagatcctgattctgctgtgataaaaaagcaaagaaagacgatttttggtttaaaaagaagccactcaagggttaaaatagttattttaagttaacaaagaaaattaatcttcaaataagctgacactatctggaaaactcatctgtccctaaagcccacaatgcgtccactgcttcgtcctcccatggaacctgagcctgacgtgaaggagtcagacgtgtgacagaggaagagtctgagaagagaagacacctttacagaatgtacagcgagagagccggcctggcccccgggttacagtaagatgcacgggtcctttcagtctcacggactccagacggccacgcaggctgctcagatggacgtctccttcctatccctgctgggcgatggctttgccggctccttgcctgcctttggctgctctttagctgcttttggctcaaggacgccgtctctgggcggctggacggcacccccgcgccactcaggctcctcgtcctcctgcgcctgctgctcggccttggctcgctgcatctggagcagccgcagctgcacgcgcagctcgatgatggcctcgcgctcctcatgaattgcttgattcaaatgattgttctttatttccagctcttcgttctgtctctgtaagtcttccagaatgatctgcagctcctcctcatcctcactctcgctctcgctctcggaggagtactcctcagtctcacttcggccgtgctgctgg

SEQ ID NO: 130877 - DNA, 632 bp, Homo Sapiens
cttatccaaccatttataatctttattctataattctccaccagtgctagaattttcttcccaaatggcctcaattcggacactgaataaacgataatgaattttttaaagctgtgcttaaatatcaacaaaataaaccgctccgtttttctggctccaagcacgccatatgaagcacgccaatgtcacttatgtgccctgatcacattcaggcaaagtgttcttcactttaaatactcctgtgttccattattgtttaagtaaaatcctatttcaaatgcctttgataacagagaaaccgcctgtagacaaactctttgaaagtgactgaattaatgtcttctgtgatgtcagatttccccactgggctcttttggaagcattcttcctgaattgaagtcactgtgaatatcctttagatttcgtcttgttaactcagttttcagtcagagcagcacttgggcctgctgcccttcaaggcacagtgcaacaaatagtggttacgggatttccatcagccaaggttgacaactaacaatgtaaagagagctcgagtgtgggccaaggcatcggaccttacacctaacttaggacataggtcgacctatggattattagccagtgaatgcttt

SEQ ID NO: 130878 - DNA, 1290 bp, Homo Sapiens
  misc_feature (479)..(527): n is a, c, g, or t
  misc_feature (614)..(717): n is a, c, g, or t
  misc_feature (773)..(837): n is a, c, g, or t
  misc_feature (1220)..(1220): n is a, c, g, or t
agagggaaatttcttttaatgtcacatgattccaagaaaagcaagggcctttcactctttacaggtaatagccaaagtgtgtccggaattggtgggttcttggtctcactgacttcaagaatgaagccgtggaccctcgcggtgagtgttacagctcttaaggtggcgcgtctggagtttgttccttctgatgttcggatgtgtttggagtttcttccttctggtgggttcgtggtctcgctggctcaggagtgaagctgcagaccttggcggtgagtgttacagctcataaaagcagcgtggacccaaagagtgagcagtagcaagatttattgcaaagagcgaaagaacaaagcttccacagtgtgggaggggacccgagcgggttgccactgctggctggggcagcctgcttttattctcttatctggccccacccacatcctgctgattggtagagccgagtggcctgtattggnnnnnnnnnnnnnnnnnnnnnnnnnnnnnnnnnnnnnnnnnnnnnnnnngttctccacgtcccgatcagattagttagatacagagtgtcgacacacaggttctccaaggccccaccatgagcagactagatacannnnnnnnnnnnnnnnnnnnnnnnnnnnnnnnnnnnnnnnnnnnnnnnnnnnnnnnnnnnnnnnnnnnnnnnnnnnnnnnnnnnnnnnnnnnnnnnnnnnnnnnacaatccctgagctagatataaaggttctccgaggccccagcagagcagctagatnnnnnnnnnnnnnnnnnnnnnnnnnnnnnnnnnnnnnnnnnnnnnnnnnnnnnnnnnnnnnnnnngacaatccctgagcaggacataaggactcatccacgtccccatcagactcaggagcccagctggcttcacctaggggatcccgcaccggggtctgcaggtggagctggcgctgccagtccacgcggccgatgcgctcgcactccgtcagcccttgggtggtcgatgggactgggcgccctggagcagggggctggtactcgtcggggaggcatcgagccccacaggaagcccatggacgcgggtgggaggctcaggcacggcgggctgcaggtcccagagacgcatgccccgcggggaacggcagactgaggccaggcgaagagactcaagcaaaacagcaggtgggccggcactgctgggggacccagtagcaactctctgncagccgctggccgggtgccaagtcccttcagggccaggggcgggaagggcgggccgccggtccgagtgca

SEQ ID NO: 130879 - DNA, 967 bp, Homo Sapiens
gacagcgattgtgtttgacctacccctatttggcctgcctttccctaaatcccccaaacctattgttttggcctcttcaatagtccttactaggaaggttcataatttatctgttttctgtgggtctcctctacaagatggagagcctcacaaggttaggggctgagtttgattcttctgcttctttagtgaatagctaaaggtcagagtagaagttggtaaatgtgggtggatggttggaaagatggaatgggggcaacccgcttgggtccccttccacgctgtggaagctttgttctttcgctctttgcaataaatcttgctgctgctcactctttgggtccacactgcctttatgagctgtaacacttactgcgaaggtctgcagcttcactcctgaagccagcgagaccaggaacccaccaggaggaacgagcaactccagatgcgctgccttaagagctgtaacactcaccgcgaaggtctgcagcttcactcctgagccagcgagaccacgaacccaccagaaggaagaaactccgaatacatccgaacatcagaaggaacaaactctggacacaccacctttaagaactgtaacactcaccgcgagggtccgcggcttcattcttgaagtcagtgagaccaagaacccaccaattctggacacagtttggctgtgtccctacctaaatctcaccttgaagtgtaataatctccatgggtcaagggccaagccaggtggggataattgaatcatgggggcggtttcccacatagtgttcacctggtactgaatacgtccaatgagatctgatggttttatcaagggcagttcccctgcacaagctctcttgcctggcgccctgtatgacatgcctttgctcctcctctgccttccaccatgattgtgaggcttccccagccatgtggaactgtgagtccattaaacctgtttttctgtgtt

SEQ ID NO: 130880 - DNA, 690 bp, Homo Sapiens
tttaatgataaaaatactatgtcatgtttattttttaaattttgattccatgctgtgctcaaactgtggagtttttaataggcaaggttgtggaattccattaacattttcagcgtatgatatcattttggcttctctcttttgatatagtattccaccttagagatttcctattgtgtccgaaatttgttccttccggtgggttcttggtctcgttgacttcaagaatgaagccacggaccctcgcggtgagtgttacagtttttaaagatggtgtgtccggagtttattctttctgatgttcaggtgtatccggagtttcttccttctggtgggttcatgttctcgctgacttcaggagtgaagccgcagaccttcgacctttgcagtgagtgttacagtgttacagctcataaagacagcactgttctcttctcccggtgggttcatggtctcgctggcttcaggagtgaagctgcagaccttccggtgagtgttacagctcataaaggcagtgcagacccaaagagtgagcagcagcaggatttactgcaaagagcaaaacaacaaacattccacagcatagaatagaacccatgcccctgctggcacaggtggccagcttttattcccttatttcgccctgcccacttcctgctgattggtccattttacagagtgctgattggt

SEQ ID NO: 130881 - DNA, 601 bp, Homo Sapiens
  misc_feature (92)..(92): n is a, c, g, or t
acaatgtccctattcacacactctttctgcttttctgtgggcaggaacatggaaggggtgctgatggacgtggactgtgagagcgtctaccnccattgtgtaggcctctaattgaggcctggcctctgctgtgggtgaatttctgtactggaagtgagtggggctccttttacgtttctttaacaccaccctctcggtttctctcccacatgtgctgctgccctacttaaggcctccccatctccgtggaagtctctctggtgtctcttttcctctctcagctccttggggctttccttagctctgcacctccttttcctttatcatctccttgggccatctcctccgtctgtggtcatgattacacctccttgtttcctcctgtgctgagccctttccttgtgtccattccaccagacttttctaccctgagtgcgagataagaacgatgggtggaagagagcaacgccagagcccaggcgcccagaggactttcttccagcttctgctgtccttctttgtggagagcaaggtgacatacacagagagaactctggctgttgtgcataggacctacaagtgggctggggttggtggctca

SEQ ID NO: 130882 - DNA, 986 bp, Homo Sapiens
  misc_feature (881)..(881): n is a, c, g, or t
  misc_feature (909)..(909): n is a, c, g, or t
  misc_feature (948)..(948): n is a, c, g, or t
tttataggtcctaagtagcgaggcctgggtggcgtattcggcacgagggccctccgtcgtggtctggcgtgtattccgagccttggtgtctggcggtttccgagcgttggtgtctggcggtttccgagcgttggtgtcttggcggtttccgaccgttggtgtctggcggtttccgaccgttggtgtctggcacgcgccaccctctcttgctttggttgcgccatgccgatgtaccagacaagaagacaagaaaatgatttgaggacagcttcaatcgcggtgtgaagaagaaagcagcaaaacgaccactgaaaacaacgccggtggcaaaatatccaaagaaagggtcccaagcggtacatcgtcatagccggaaacagtcagagccaccagccaatgatcttttcaatgctgcgaaagctgccaaaagtgacatgcagcaccgagaagtccgcgtgaagtgcgtgaaggctctgaaagggctgtacggtaaccgggacctgaccgcacgcctggagctcttcactggccgcttcaaggactggatggtttccatgatcgtggacagagagtacagtgtggcagtggaggccgtcagattactgatacttatccttaagaacatggaaggggtgctgatggacgtggactgtgagagcgtctaccccattgtgtaggcctctaattgaggcctggcctctgctgtgggtgaatttctgtactggaaacttttctaccctgagtgcgagataagaacgatgggtggaagagagcaacgccagagcccaggtgcccagaggactttcttccagcttctgctgtccttctttgtggagagcaaggtgacatacacagagataactctggctgttgtgcatagncctacaagtgggctggggttggtggttnccctgtagcccggcgctttggggggctgaggtgggaggntcctttgagcccgggagtttgagaccgcttgggcagca

SEQ ID NO: 130883 - DNA, 939 bp, Homo Sapiens
  misc_feature (109)..(120): n is a, c, g, or t
tttacggggagagagactttccaatggaagagatttattgatggatggtaatgcaggtgctaaggggcagccaaaggatccttctcatcatgagtactgctgtgatccnnnnnnnnnnnnaagtatgaagacagctgttcattgtttctgacatctcagagtcctcagtagaggggacacccaagctagaatgagggatcggagaggggagtctggacgctcagtaggggcgagtagagtgtggttggtcttatttccattctcttggttttccctcctcaccagcaccgagaagtccgcgtgaagtgcgtgaaggctctgaaagggctgtacggtaaccgggacctgaccgcacgcctggagctcttcactggccgcttcaaggtgagacgggtggtgctccttggcttggctctttgtcgtggttcccgtttccccaccttgtatctttctacccttcatgctctaagatgtcttggctatcccagcatctgcctctacgtaggcactctctttaggaggctctgattctaagagaacagaatatttggaatgggcgtaatgagatattgagtgactttctcctttctgcaggactggatggtttccatgatcgtggacagagagtacagtgtggcagtggaggccgtcagattactgatacttatccttaagtgagtcctgggaagaggggaggccagtgtctcagacctttgcccttccagggtcatctccctccacctgtcacagctgactcttccatctgtgcaggttgactgaggtcattcctgagttgcagtatgttgagagggtaatatttctgtcttctctaactccccatactcccttgtcttccactctccatttaggagttttttgtgagttatgtccttgttgcttttgcctctttttctttctagccttgattgtgccagaaga

SEQ ID NO: 130884 - DNA, 898 bp, Homo Sapiens
agctctccttgccgggggtagaggacagccgtgggctccccccccaagaggaagggaccagtcagaaaaggctggaaaggaaaagttcctcctgggggcgccgtggggctccgggcggtttgttcttctttcccacccccatggtttgttattcttcccacctcaggggtaggaaaaacgtttaagggataaagtatcaggtaatgtgacgggccttccattggccacactgtactctctgtccgccgatcatgggaaaccatccagtccttgaagcgggccaggtgaagagctccaggcgtgcggtcaggtcccgggttaccgtacagccctttcagagccttcacgcacttcacgcggacttctcggtgcttatcatgcagagtccaaccaatatattttaaatagctgtcggtgaggaaagacgtgctgtagctttgcatccaacacccaatttcctcaatgcagatagcacggatctcaggaaggacatccctgcatgtcacttttggcagctttcgcagcattgaaaatatcattggctggtggctctgactgtttccggctatgacgatgtaccgcttgggaccctttctttggatattttgccaccggcgttgttttcagtggtcgttttgctgctttcttcttcacaccgcgattgaagctgtcctcaaatcattttcttgtcttcttgtctggtacatcggcatggcgcaaccaaagcaagagagggtggcgcgtgccagacaccaacggtcggaaaccgccagacaccaacggtcggaaaccgccagacaccaacgctcggaaaccgccagacaccaacgctcggaatacacgccagaccacgacggagggcgaccacctcccttctgaccctgctgcgggcgttccc

SEQ ID NO: 130885 - DNA, 621 bp, Homo Sapiens
tttttttacattatcgaaaccactggaagtttattcaaatttttgtgcaaaggatttattagcatcaatgccattcatgaaatatgtctctttactacaacagtgaaggaaggaaaaatatgagttcagcatgtattttaatgttgcaaaggaatgacaactcagcaagctgtagaaaatggcagaggagacggggtaataacagaagcaatgaagactcctggatgtacccaaggacaccctacggccagcagcttggtttctcccagaatcagtttacagacttgctcagcctgcgggagggcccagggatcatgcaggaagaaaacggaatacgcttgattctggaattggtcattttaagacgcttttagtaagatggtttcatgtctacacccaagtcttgccaaccaagaagcatcaacgtgaacagctcagagacattcctgcacaggagagcagggaggaggcagtggaaaggtacctatgagcagcagtgcccgggggcgctggccacctccctgcgcaccggatacccttccccgcacccacaggggttcacttacagtttccccaccttgcagcagcagtgaggctcagagtcacccacactccatacat

SEQ ID NO: 130886 - DNA, 700 bp, Homo Sapiens
tgaaaagtatataacagatttctttattattatttacaatcaagttctgttggccaacataatgaaataaataaaagatgtgccctggcctgtgaatttcaactctccttgacttaagttctctgaagggcaaattggaaagcggtgatcaggcagggaagagagggcaggtggaggccaggaccatcggtgggaaggccgcctgactcctctctcaccagctctaacactcacatccccaaatgtccagagaacaagctgttggaagaaaaaaaataaaggtgcaaatttaaagagtgataaaaggggtgtttcgcacacccaagttgaactaaaactttatacgtaggtaaaatagtaacagattaaacggtgtttcctgggccttcatcacaacccctgaaacggaaagatggcgcggcggtgcttctgagcctaggcttctggcactaaagcaccaggggcatcgcacacaggctgggcagaggggccagggccagaatcaccaccttcagacagagtactgtgggaggtctcgaatccctgggcacccccaagcatgcagggtggcacccaccttcggggtggtctgcagatcgatacagggaacacatccttacctcgtgaaggaacccatttccctggaaaagattctcacaaatcctctcccactcagaaaatcaaagaaacaaaaaacctc

SEQ ID NO: 130887 - DNA, 1159 bp, Homo Sapiens
  misc_feature (175)..(185): n is a, c, g, or t
aacttctcctgtgttttaataaaatggcattctgcttcctaccatctatattgacaaatttactaaagtcatatcaaacctagagagctgacaagccaggccctggctggaccagatcacatcatacataccaattcttgaggcccctgtgaatagcataattacattgcttatnnnnnnnnnnncttgaaataccatttctttgttattctgcaattttgcctctaaatcagcacctcaaaaattagggccatcagtcctaaatggcagttacctataaaggaattcccataactttgcatacccacagagaatgatctccattatacgtgtgtattttcatggtcatttggagacaccaggccagctccagcaacactgcacaagttttaatgagttcactgatggacgggcagacatagagtctctggggccttgtttaaagatgtactggaaaaccagtcctggaacttctgtcattggagaaaggtggaggagatcagctctgatatgctgctatctctcttgtctaatccagtagaagaaaaaaaatgcttcaagacagggccaggaattaggggtcaggcacagaatctagggagtcatcagagttttgtcttcttggtctcgtagatttgatcatgttgcccctggcatgtgacgggaatgtgcttatctgctggaaccccgcagtatcctctgtctttacaggaacatagtagtagcccatgatggagatagatcaggcagatcaccagcaggaggcaggaaaacaaaatgaattcggcccactgtaccaggccacgtgaactgtgccacaacaagcacgatgatattcccaactgcaattgtcaatagccaagctgcctggagcacagatttacatgctagagggagcctgagaataagaaaactcaaagacctgtgacagagaacatgacctcacccagctgtaaccagaggcatattgtgggtaggctgccacgcaactggacacttgtgtgttgagctggaagtgtcttcaagtcttccaggcctgaagaccctgattggtgttcttagtaataacaaagagatatgctgcacctaagtctagaagacccaaattcaggagaaaagttcttatctcctgttctacagtgcactgcagggtatactc

SEQ ID NO: 130888 - DNA, 687 bp, Homo Sapiens
tttggtggaaatcattttattctcatacacaggttattacagcacaattaggaagagacaatcacaactcacacaatgctatattcaaattatgccaaagtcccaacatattcatttcatttgcaagttaattcctaaaagatcagagcagagtgatacacaagtttattaacacagactacaacgtcaatgaagcctcctggcattgtcggaaatagaaaacatgtataaaaatcttcgaaatgcaggttaaaatgcaaatccaagtgaaaggaaaaagcactactgtgaagcctaacggcaattatttcccttcaaaggaggtttgtgtccagctggagagaaggcctggtggacagaagacaaaggaaggcaaaattcctaagggagaaattcaaaaaaatgatgggggtgctgccctctgctgggcctctttggcagtcgacttcaacttaatgcattagcgccgtaaggttgtaagagaagcaactctggcttgatcttagaaaagctgattttctttttggcagcatatttccggtgagaactgatgggaaaggtggtgtggattcgtggacgaagtctctaacgtaatcttgactactgaagggtaaatacttgcccacaggttagagattacatgaattatccacaacgaatggtagcagatgatgggtcacctcgtgc

SEQ ID NO: 130889 - DNA, 1205 bp, Homo Sapiens
  misc_feature (198)..(248): n is a, c, g, or t
gcggacggggcccggagcttgcctgcctccctcgctcgccccagcgggttcgctcgcgtagagcgcagggcgcgcgcgatgaaggcggtgagcccggtgcgcccctcgggccgcaaggcgccgtcgggctgcggcggcggggagctggcgctgcgctgcctggccgagcacggccacagcctgggtggctccgcagcnnnnnnnnnnnnnnnnnnnnnnnnnnnnnnnnnnnnnnnnnnnnnnnnnnncgacgagccggcgctgtgcctgcagtgcgatatgaacgactgctatagccgcctgcggaggctggtgcccaccatcccgcccaacaagaaagtcagcaaagtggagatcctgcagcacgttatcgactacatcctggacctgcagctggcgctggagacgcacccggccctgctgaggcagccaccaccgcccgcgccgccacaccacccggccgggacctgtccagccgcgccgccgcggaccccgctcactgcgctcaacaccgacccggccggcgcggtgaacaagcagggcgacagcattctgtgccgctgagccgcgctgtccaggtgtgcggccgcctgagcccgagccaggagcactagagagggagggggaagagcagaagttagagaaaaaaagccaccggaggaaaggaaaaaacatcggccaacctagaaacgttttcattcgtcattccaagagagagagaggaaagaaaaatacaactttcattctttctttgcacgttcataaacattctacatacgtattctcttttgtctcttcatttataactgctgtgaattgtacatttctgtgttttttggaggtgcagttaaacttttaagcttaagtgtgacaggactgataaatagaagatcaagagtagatccgactttagaagcctactttgtgaccaaggagctcaatttttgttttgaagctttactaatctaccagagcattgtagatatttttgttttacatctattgtttaaaatagatgattataacggggcagagaactttcttttctctgcaagaatgttacatattgtatagataaatgagtgacatttcataccatgtatatatagagatgttctataagtgtgagaaagtatatgctttaatagatactgtaattataagatatttttaattaaatatttttttgtaaatattatgtgtgt

SEQ ID NO: 130890 - DNA, 489 bp, Homo Sapiens
tttcagcggcacagaatgctgtcgccctgcttgttctctcgcgccggccgggtcggtgttgagcgcagtgagcggggtccgcggcggcgcggctggacaggtcccggccgggtggtgtggcggctcgggcggtggtggctgcctcagcagggccgggtgcgtctccagcgccagctgcaggtccaggatgtagtcgataacgtgctgcaggatctccactttgctgactttcttgttgggcgggatggtgggcaccagcctccgcaggcggctatagcagtcgttcatatcgcactgcaggcacagcgcctgctcgtcggccgccgtctcggccgtcttacatcgcgctgtcgcctccgccgccgccgcggctgcggagccacccaaactatgtccatactcagccaatcatctcatcaccagctccccgccatcgcagcccaacaactccttactaccctagatacacacccagctcaccaccttcat

SEQ ID NO: 130891 - DNA, 1233 bp, Homo Sapiens
tttgattagaaaatagttttatttttattttcactaacctctattaaaaataacatttcctttcattatgaatgaagacaacactccaccatcatattagcaataaacgtgactctgacttagcagtatcatctttgtaaatatcagatattttcataccacattccacttgctgcagagaactcaaaatatagtttgtgttcatcactgcattgaaactaatagcccccggtagatcttaatagagaagcacatattactttatcacaaatcttgttttaaacattttgataactatttcaatttaattggtttcctttataatcctatgtattttatgcatttaacaacaaactatgttgagaaagagcccataggcctcaccagactgccaaagggtacgattacacaaaaaagtttagaactttttccaaaagcagagttccaaaaaaaattagtgcaatggcaggttcattgagataaatgtgccccctctccccattactactatgaggatatttatggggatataaaatgcttggatattatttcactttctagtctgtgaccttggtcaattacttatactctgtgactcagcctctagctatataatgggtataaatagacaacagtaacttcctcatagggtttttgtgaagattatttcattcaaggttgtttagaacaaagacaagcacatggtagtgctcactaattagcagctattattcatatcacatcttgtatgtgaaaaccaatttgtactttagaaaattcccccatcccattatttattatttttttggaaggcacccagccaaatggctcctatcccagtgaaaattatggagggctgaccaactgagaatattgaatgtgggtcaccatagcttttctaagatggacagttttttgaatggcagtaatcatataggccagagggtaggtaaagagagggagcacagccctggagttaaatccaggtttcctctgactctgaagtgtataaattgtgattaaaggtatctcttacatcttttgtctcatctgtaaaacaagaataacttcctctcagagctgtcacaattaaatgggatgcagattaaaacaggtgcatagacacaggtacatagaatgaactatgcaaatattagcagccttccatttctgccttcctgtcttcacttctattaccaactctctggacctttgtacttcactccactattc

SEQ ID NO: 130892 - DNA, 963 bp, Homo Sapiens
  misc_feature (592)..(592): n is a, c, g, or t
tttccttttttaaataaatctttatttttcatcttttcaaaagtaatacatgcttgttgtcaaaaattaaacaaataaattaatgtaggtagagtatctttagtacgggttttcctatccaacaacaaggcttctctctctctccatttattcaaatttcctttgtaaagtggccctcagtgaagacttaaatttctccatacaagtcctccataactgtttatttctagaaaatctacttttcttgatgctgctgggaacgaaatcttttcattatattttctaattcctgttggtacaaaacaaagctatttttggatgtttctctttaactggtcatcctttcctgatttaaactgaatagaataaaaactgtttccatatgaagactctgccatattcatgccctcttggaggtttttcaatggatgaatctgatgatacttgatccattttggcattaaccttaagagttttctatatctttctcattattaggattttccttcactatggacactctgatgctgactgagctggaagctaaacctgaatgctttcccacacacactacacatatagggtttcttcncaagtgtggactgtctgatgtataatgtagtcagaactaaagctgaagcctttgccacattccacacatctgaagggtttctccccagtgtggcttctctgatgccgaattaaatgggcattaacatggaaggcttttccacactccttacactgaaagggtttctctcctgtatggattctctggtgcacaatatagttagaactacagctgaatgctttctcacattccatacatttgaaaggtttctccccagtatgtatcctctgatgcctagttagtttggcattgatactgaaggctttcccacattccttacattgatagggcttttctcccagtatggattcggtgatgatcaagtaggtttc

SEQ ID NO: 130893 - DNA, 888 bp, Homo Sapiens
cataacctaaagctgggagggacccaaaaaagccaaattgtgagcccttgtatgcgtcaatttgaaagttggctcagggtctctagacagaataaccatagcaaaggttgagaaaactctgttccgttcgcacttagtttttgtgtttttaatgatttagaatcgtttctttcctcctgcatggtctcagagcctggtctgggcctccgggacataaatctcgatgctgtctgcgctctcggtggctgagttctgccgcacagaagctgcccgcttggccgccaggagtctcttgcgggcctcctggcgctgcttgtcgctggcgtctgaggccttgtcgcggctcactgccggcttggatttggctggcttctttgggaccggagggggtggtttcttctcttccttcctcttctcgggggtctccaccagctgccagctgttggccttgaggtggtagagttcatcgaacttcatgctgatatcctcgatggacagctgtagcaggtcccagaaccctgccaggtcctgggctgtggggcgtgggttggcatcagggttcaagttttgctcacagaggccccggaactgctggaatttctgggacatcagtagctgggcactgcccacagcactgaggacttttcctaagacttcttcagagaggttgttctctttggtctccttgtccatctggcagcaccagccttccagccgctctgtttctgcctgcagtagctttaggaaccagtagccgtctcggcggcaggcccctggctgtgccggctctgctggggagctggaggaggtctcgagccaggggtcgggtgggggcagcgaggacgcctctagggcagggtcgctgttgtctccataggagaggttgcg

SEQ ID NO: 130894 - DNA, 964 bp, Homo Sapiens
gtgtgaagtaagacaaaatggacctctaccaagttgtagggaaggacaaggaaaagaccaggggtagaaaaggagtgtaagttttagaatggtggcattggcatagatgtgggaagagtataaaactagaagaagtctccagataaaaatatgcaaaatatgtctgtttaagtataaacattttctgtccacatgcaaagaggtgtttacccacccaaaaagggtatatgttggagtggggacttcactcgcgctggatatgtattaccctccagcctggaaactttgtcttggtgcaaccccctaaactgtatgttaaggtagaaaaggaacattcgcttccagccttataaaaatgacagactccctctttggtgtttggttaccttcacagctatacgccagccactgagcagctttcttgtcctcttaagttctaaactctgctcctatgctggtgtcctccaaccattacttattaccctaagccgtcactgcacagcctactcccctggcctatcacagcaggacctatctggagagttcacactattctagggcgatcagtgagctaaaaatcccagagaaaacactgtaggaatagaaattcccaagtttaattcccaagagtttaaaaattatgagccttttctagcccccaccttcccaccctcagaggaggacagttaagaatcagtgaatcgaggtatttacttgttgttgaattgtgaggttgtgaggtagacgtgtaacaaggacaaggaagtttggggatctgcttggagaatgaaggtttattcaaaacaagtggacaggtcaggggtaacgggtgatgagggcacctggcttttgtaatcatgtggggactgtcccctgggaggtgcagcaaaaatcagaacggagacagaagctcacagtctggttttagctgccaactcctatggaagtccatagctgactccta

SEQ ID NO: 130895 - DNA, 822 bp, Homo Sapiens
aaatcatggacctttattcttagacacctttatcctacatacacaagggacatgcatggttgaaataacggaaacaagtggataaaagtgaaagtaacttaaacagctttacccaggaatgcccaattcaggtgctgcagagaagagcatgagaaccgggtgtcttcaggacaggtgtgcatctgggagcagagtgggcgttcatcagcagggaggagaaaggcctgggtcgggggacactggggctgctgtcccagaggctggcagtgtagctctgaacccccaagacttcactgagtctcccctcaaccacctaaaccagaataaactgatgtagcaggactcctcaaacactgtgcagggtctccatgtcctcgatggcccctgatgagccacagtaccctcaggtcctggtgaaggagctggtgctgcctcctgcctttccccacatggggtcctgcagctcatcccacacagcctcagattccctctacagaacctgcccacagatgtcttccgagaccggcaatactgggaggcctgtggcccagacccaggaggaaccagctgagaggctccgtggaggtatcgctgatggtgtaaccagaatgaaaatgcccacttctgttctgctccctgagaacaactgtcaagccagcatgagtttccagttggaactattccttttctccccatgtttgtcgctgttttaatggacattgccctggctattaaatcccccgatgaactcactttgaaaatatctattgcactgggcaccctttcaggaatcactgagtgttaattttctccagtctgagt

SEQ ID NO: 130896 - DNA, 664 bp, Homo Sapiens
  misc_feature (467)..(467): n is a, c, g, or t
  misc_feature (526)..(526): n is a, c, g, or t
  misc_feature (584)..(584): n is a, c, g, or t
  misc_feature (595)..(595): n is a, c, g, or t
  misc_feature (627)..(627): n is a, c, g, or t
tggctttctctccagaggtggcttccgcatctacagactatataaagacaaacaacacagattaaaagcacaatcattgaaatcacagagcctccaagtgtcttgatccattttagtgggttaatagctgctaatccgtctgtagctccttcaagcacttcagttcctggcattagtgtcagatgtgtctgagaggcttgaaatatttgttcctttagttttgtaatatctaaagataaatttctagtatgaccttttaaatgtttcttaactttttcccactcatgctgtgtttcattatacagatgaggagtaatgcaaaaatcagaggtatttcaatcacattgtaactgcattctatattctagactaactatttgatctcctagccacattacagtttgttggagatcattgatttgattagctagtttctggtctatattattttggtaattccaccagcnagagtagaatttttctgccaattatttacatagtctggctgttgtactgtgaaatgcanagcaactccagctgcccgggcagtagctgtgacagcatcaatccccatatgattaaanataagtagcantgaaacactggagcatctcaaaatctttgaanaaattcagtattattggcacaaagggagggttccaag

SEQ ID NO: 130897 - DNA, 775 bp, Homo Sapiens
  misc_feature (652)..(652): n is a, c, g, or t
  misc_feature (713)..(713): n is a, c, g, or t
tggaaaagcagatattgtgagagccgctcaggacttttgccagtgagtagcccagaagcaaaggagacccacagatttggatgtagatatgttagtttactcagttcaaatggttgtcctgatcctgatttagtactgaagttcggtcctgtggacagcacacgaggctttcttctctggcacatcagattgactgagattgtctctttgccttcccatgtaaacatcagttatggggactttttctctgcccttcgtcattatgcagcctgtgaacagcgtctgggaaagtggtggtcattggttgcataatttgatctgaggcttatggaggaaaggacccaagtgactctgatgtttagaaagcacctatgaaaccctgtacacacctagttcataatcctcataatttatcaacaaacacaaagaagtgtcttacttgagagtgagtgtgtgcgtgtgtgcgtgcacacatgtgcacgtttgtatgtgtggaaataaacataaatggggacgtgttggagaaggaaatacatagacctacaactttgagcatatagcagtgatgttttaggaactgaaatgtcacacttaataaagtcttcagcccagctacttccctgttttcgtggggagaagggggcctgattanaactgttctggttgtgtttggcgggaggggaataattttgttcagtccttcttagtgacanactttatttttaggaatacatattgacttactgaactgaagcatctgagttgaaaggagccc

SEQ ID NO: 130898 - DNA, 773 bp, Homo Sapiens
acacgtccagcaccggcgaggaggaaaggatgcggcgcctcttccagacgtgcgacggcgacggggacggatacatcagcaggcgttgggagacatctccttaggatgcgcactcttccgggggctcggagtgttcttccctgtgggaaaaggagttctggccgcttgtcccaggtaggaggggctgccccacagcctcggggtcctgggcatcaagatgccgcagcacggggcagcgatctgcccggcggcttggtggacaccccagggccgcaccgggaggagatgagctaagcgacagcctcggacagggaaataacctgtgaagaaactttcttgtgccgcagaacccatgaattccaaacttcagagcccaaagaatgggtatcgtttgccacccagtattgatttaaacgcagtagcctgagaggaacgaagcgctcaggagcaaactagggctagacccgactcctaccgggctctgtgctgctgaccaggtgagcttcggcgtggctccgggcgcctccgcgcctccactcacaaacaaactttggggtgtttgcttcggatcccccgcacttcctacagaggcggtatttaagcttcctgcctcccggcttggccaaataattacttctgcccaaatttgtgtcacttagactcttgtggtgaagaaggcaatcgcaacattttctggtatgcttctattgaatggttgacaccggccattgaagacttggtatccgtggaaatttgaattgccttggatgaag

SEQ ID NO: 130899 - DNA, 1336 bp, Homo Sapiens
ctggggccagtccccgccccgctctttttccagatagagccaggctgaggagagggactaaacccttggtgtgcctagctgcttggtgcctcgcttgttgctttcgctctttcccgttttgttctctggtcatggttcatgtacatcttggtggtcacttttataagctgggtggcattcatgcctgcagctgccgcttgacgtcaccctgggcttgccctacaaatgctgtgtttaccatgcgctgattttcagcagcctcagggtcaaatagggtgtaaggccggaatgcttcacaaagttttttataaaactgacttgggctctcgtcagctctctgaagcacttttgaaatttttcgtatattaattgctttctttccaccagcttttatcccttgcagaagtgtctcttggtacctttgcaaatgctgaagctgagttgcatcctctgggttccagttgggatcttggtatgagaactgaccttgagtgtatgcctgagcattcactgcatctgctggtgcatggggttttagccaggggagagctgcctatgttactctcctgcgctttttagtgttaaataacgttaggaaaagctgcctgcaatctggccaggttggactgtgtgtcagaaagacggattgcgtcagatctataagagcttgaggcttctccatgtaggagggagtatggtgtttccagttcagtagatcagtagctcagtagtcagaaagggctgatagatgaaggtggttgccccccacctccgaacctggccttggttattacaataagtgggtcctcacatctccctgacaggcatttgcatagctcgagcaggcatttgcatagctcaagcacggccagatctgagacagcctgcttgactattttgacttccttccctggccttttgaggctccagtccttcccttcggggtcagactcagggcatgctagctcctgaatttggttcctggagggctgttggcctcagtaaaggggggtaggctgggacatatggaggaggaatttctgtttcctctggcagctgttgcaaaactggcttctcttgctctttctggggtttttcttttaacttcgtgtcagtcggtgaagctgctcttacttttatttttggctcgggctacaagtgttttgcaataagctgctaaacagggcttgatccaggttagtcttgtctgtgctatatttaaccatgaatcaatataaggaaattgatcgggatactcaggctgtcctcagacccctatcaccatctttaatacatgcccaattgtttcctagtctacagtttcttcggtcagccg

SEQ ID NO: 130900 - DNA, 925 bp, Homo Sapiens
gatatgaaggagaatggaaagcagggaggaagcacggtcacgggaagttgttatttaaagatggcagttattacgaaggggcgtttgtggacggagagatcacgggagaaggccgccggcactgggcctggtcaggagacaccttctctggacagtttgttctgggagagcctcaaggctacggcgtcatggagtacaaagccggcggatgttatgaaggggaggtctcccacggcatgcgggaaggacacgggtttctggtggaccgggatggacaagtgtaccagggctccttccatgacaacaagaggcacggccctgggcagatgctctttcagaacggtgacaagtacgacggcgactgggtccgggaccggcgtcagggacacggggtgctgcgctgcgccgacggctccacctacaagctctgatccacccatctatagtaggagaaactcaaggagacatcggctgctacccaggcaccatgagctcagggttggtgaggcccctccgggagacctgttctccctctcgacagcaggtgtgttttctgcaaaccgtgtctcctgccttgcagccagtattccttaatgcaaagctctatgaagaacctttttttaaaaatgcattctagaaaaaaatgcattcctgaaaataaacgtgttacagcttcttctgacggaaaataagaacagcggatcccaaagcagagaaggctcctcttccacagggacaggagccacgcggctcaggccggtcccggaagccacagaggtcctgggccacgagcacccccaccagcctgtgacgcctcagccatctccgtcccccacactcctagtttacagcttactgctcgacctcccaggacccgagggcttgggcaggcccacacgtcctccagaaatcctcggtgggagac

SEQ ID NO: 130901 - DNA, 419 bp, Homo Sapiens
gggacagattaaatctttattctagaaaagtgtctccggaagcctgagttgctctcagcggtgaccacagagcctcagtcaggtccccagggcttctcggtaggccaggcctctcacggcacaaagcttcccgtctacacgtcacgccttctgcatctagactcggcggaccaactgagcccgatgggttatgagaaaggagtgaatgtgccatcccagctagagctcacctgaccaggcccagtgccggcggccttctcccgtgatctctccgtccacaaacgccccttcgtaataactgccatctttaaataacaacttcccgtgaccgtgcttcctccctgctttccattctccttcatatcgaaagaaggaatttgggtatacgtagacaccataaccgttccggggcggccgca

SEQ ID NO: 130902 - DNA, 1016 bp, Homo Sapiens
  misc_feature (54)..(54): n is a, c, g, or t
agggtcaaagatctttaattgttggatggaaaagaaaggaacctggtgggtttntgaggggggacaggtaccgccaaatgcagatgatgattctgagagcacctttgacgggccagatctcgtactctgagtttatctgcgccacttgttgtctggcaagtccagtgatgctgtggtctccagctgattctatctgagctgctcctggggtggcagctctcagaagtgtgggagaggatgcaggcgatggggagggaccgggaccgcatgctccctccaggacatagcgcacaacggtggtctggggtaggatgaagtataagtgctctgcttcaggccagccttgggtgtgagctgtctctgcttgagctgctcatagagtccatagtttgtagggggagcaagaaggggaaagtcagacttctctggcagccacagcaacttctgtccattccaagtgcggagtggaggcagccccgggttgtaaccatgccggttgtaatggtcgtcataggtgctgatcaggtagcgatgtgggggctcctggtggtgggtgatcaggtgtttgtaaggtagcccctcaactttcctcttcccataccacctggagatctggtctggtctgtggtctgggaaggggatgtattcttttctgtaaatggattggggtgtcttgtcagtgtctctggtgaactttctcctctcttccatccaatttccagtgagcactttcgttgaatacttggtctcaatctgccagctcggagtagagagtggctgtggatttactgcagtcaaaaacatgttaaggatttgccccaggtttctttgacttgatgcagtttaaggcttcaggcggggagaggaaggtgttatgaagttgctgagtttggggtgcctattttgtcttcccagctggcctcctgaatggctagtagatgactccttgctaacctcagagaataaaacggccccaagagttcactgtcagcctttagggagagttgatatatctt

SEQ ID NO: 130903 - DNA, 889 bp, Homo Sapiens
  misc_feature (498)..(498): n is a, c, g, or t
  misc_feature (516)..(516): n is a, c, g, or t
  misc_feature (601)..(601): n is a, c, g, or t
  misc_feature (606)..(606): n is a, c, g, or t
  misc_feature (654)..(654): n is a, c, g, or t
  misc_feature (705)..(705): n is a, c, g, or t
  misc_feature (768)..(768): n is a, c, g, or t
  misc_feature (785)..(785): n is a, c, g, or t
  misc_feature (848)..(848): n is a, c, g, or t
accacacccagccccctatgttttcttctaagagttttgtagttttaggtctcatccaggtctctgatccactttgagttcagttttgtatatggaattagggaagggtctaactttattttttcgcacctagatatccactttactgaacaccatttattgaagaaattgtcctttcccccattgaacaggtttagcatcctcgtcaagagtcatttgaccgtatatacaaatgtttatttctaggctctctcttttgttctataggtctatgtatctatctgtatgccagtatcacactgtcttgattactgtagcttttagtaagttttgaaactgagacatgtgagtcttccaattttgttctttttttcaagattgttttggccatttggagtctcttgagattttatatgaattttaggatggattttatgtctttctcctctcttccatccaatttccagtgagcactttcgttgaatacttggtctcaantctgccagctcggagtanagagtggctgtggatttactgcagtcaaaaacatgttaaggatttgccccaggtttctttgacttgatgcagtttaaggcttcangcggngagaggaaggtgttatgaagttgctgagtttggggtgctattttgtcntccagctggcctcctgatggctagtaatgactcttgctacctcagagatanacggccccagagtcatgtcagctttaggagagtgatcatctggatctcctcgtgcgatctggnctcagggcaatcctaangagtcgataatcgtacagtcaactgttctgtgtgatgtatcgccaaatcaacaatacatcgancaaatgaagctggggctatgtgactatcaatatggtgcccg

SEQ ID NO: 130904 - DNA, 1132 bp, Homo Sapiens
  misc_feature (651)..(689): n is a, c, g, or t
gaggctttgttgtttggttcacacacattagatcattatgtcttcctcataagttaattcatttgatcactaatgtaatgtccctctttatttctagtaattttctttgctctgtagtctaatttataagatattttaaaacccactcctgctccataaaaagttaatgtttacatggtatttttgtccatccttttactttcagcctacctatgtcaaatgaatttgaagttagtttatttaaacagcatacagtcggatcataacttcttatccactctgccaatctgtctttcaattggtttttattcctctgctcttcttttcttgccttcttgtgtgttacttgaacattgtttttaggattccatcttgacttatttatggctttttgagcatagctttttgtataggttttttagtggttacagtagatattacaatgtacaaatatggcttatcacagtgtactggtatccacattttactgcttcaagtaaagtatggaagcctcacctcctttcaggtgtctttacttcctttactttaaaatatcattgtcttgagtataagatgttatacattttgtttcaatcatcaaatgtgacttaaaatactcatgaggaaatggatagtctactgcatggaggnnnnnnnnnnnnnnnnnnnnnnnnnnnnnnnnnnnnnnngtggcattcctctttcttcctaatccttccagattctttcaccattttctttctgtttgaagaacattctttagccaatctgttaggataggcctgctaactgtaagttgtttagttttcctttacctgagaagggctttatttgtcttcttcattgctgaagaatggtttcaccagatacttgtggttgacagttcttttctttcagcacttgaaaaacatgccacttccacctggcttctatagtttcaaataagaaagacactgtcacttgagtcgatgttttcctacaagaaatgcatagtttttctttggctgctcgatttcagaagtttaattataattaacttagtgttgttttctttgggtttatcctatttggaatcttctcctcttctttaatcaaaaggtttatatctttcagcaaatgtggggagttttca

SEQ ID NO: 130905 - DNA, 615 bp, Homo Sapiens
  misc_feature (582)..(582): n is a, c, g, or t
ggtagcaattgtaaatgggattgttttcttgattatttttcagctagtttgttgttggtatatattttgtgtaaactactgatttttgtgcactgatttttaaacttttttaaccacctaagttcttgtctcatgtatgttgattttcgtatcctgcaacttccctgaatttgttaatcagttctgtgagttttttagtgaagtctttaggattttctatatataagagcatgttatctgcaaagaggaaaaatctgacttcctcttttccaatttggatgctgtttatttccttcttttgcttgattgctcaggctaggacttcccatgctatgttgaatgagactggtgaaagtgaccatattgttctagttcttagaggaaaggctttcacctttccccattcagtgtgatgatagctgtgagtttctctcatgtggtctttattatgttgaggtatgatccttctatgactaatttgttgaaagtttttgatcatgaagggatgttgaattttatcaataatttttctgcatctattgaggtgatcatatggtgtcttagtccattttgtgttcttanaaaggaatacccgaggctgggtaatttattttt

SEQ ID NO: 130906 - DNA, 1976 bp, Homo Sapiens
  misc_feature (41)..(41): n is a, c, g, or t
  misc_feature (91)..(103): n is a, c, g, or t
  misc_feature (187)..(238): n is a, c, g, or t
  misc_feature (365)..(484): n is a, c, g, or t
  misc_feature (1897)..(1931): n is a, c, g, or t
agtggcgggaggcgagatcgcggggcgcggcgaagaagtgngagacaacggcgcatacgcgacgcgagggcgcgggaacattcacaaggcnnnnnnnnnnnnncttgttgcaccacggacagcgagtacgcgggggttgggattcgagtccgcggtccgtgtgccgggcgcgggtctcttggttttnnnnnnnnnnnnnnnnnnnnnnnnnnnnnnnnnnnnnnnnnnnnnnnnnnnntagccggggtgtggcccaactgcggcgtaacttagtgggccgcgcgcccgcaacgagagggttgagaaagtttctcgaggggcgagggcggccgacagggtcgcggcggtcgtccggaggcctaaannnnnnnnnnnnnnnnnnnnnnnnnnnnnnnnnnnnnnnnnnnnnnnnnnnnnnnnnnnnnnnnnnnnnnnnnnnnnnnnnnnnnnnnnnnnnnnnnnnnnnnnnnnnnnnnnnnnnnnnccctcctccccaatttttcatacagttgcccctatacaatatacacacccttgagggcaggtagaagtccagcccacctgcgccagggacgctgtggggagcatttttctctgagttgctaagagaaccctgatgggcggtgagcagaggaaccacagaacagccagggctcaaggctggcagcggataggccaggagagatcgctaggccccagaaagccccctactttcagtcagggtgggcaagagggtcttcgcagtgaagtgggaggcaggcctggaggagggagccagggagacccctgggagccctgaggttgggggccaggcagggagatggggatagcagctgcctcagtacttggggaccttgctgtagtcttcggaatggacgtgccggcacaagcagatggacaggaccatccccaggagctcgacgatggccacacccacgcccacgccgaggatgatgcccaggttctcctgcagccacgcctgcaccttctccatgcagccctcctggtacacaggccagtcctcagggtggttgccactctgggtcctgttgccgggggcctcgcagaagcccttcctcacagaaaggctgttgtcctcttcccccttgacttcgcaggaacaggggtaggtgacctcagggcgattcatgagctcagcgttgtctgtccagttgtagaagctgacccagccgcagcacttcacctgagcctgcacgtagtcccaggcatcctgcaggctgtcctcgcgactgctgttgtagtctcgaatgagctcagtcacgatgccgcccatctcctgcttcagcttgcccatgttgaagtagaagagggccccggccgtcacctgggcaatgaggatcaggagcaggaaagcaaagtacagccccagcaggcagcggacctcgttgacggcgccgatgcagcccaggaagcccatgagcatagtgactgcccccacgccgatgaagacataggcccccatcctaagcgagctggaggaggtttgcaggacagagatgaaactgctcttgtcggccaggatccacaccccgaagcccaggatcactgcgcccaggataaagaagatcaagttgaagaggaagagaaagtatttggtgactttgatacaggctgagcccatcccgccagtcctggagcttccttccacgaaaccagtgcagctggtcacagggcccacttctgcctgtgcccacgtgtcgtccacacagcagcagggaggactctgcgggttctgctttctgctccgcgctgcaggcccagcgtcacccgctcgtgcctcagtcggcgtcggactgcacagcccggggctcagtcactcctcccccccggccgtaatggccgaattcccgggcatatgtccggtaccgtcgactgnnnnnnnnnnnnnnnnnnnnnnnnnnnnnnnnnnncggccgcttcctcgctcaaacactcgctgcgctcggtcgtgttac

SEQ ID NO: 130907 - DNA, 1047 bp, Homo Sapiens
gcggccgcctgtatgagtgatttaaagtgcaaactgctactggttgtaagctcaagacttgtctcattcaaactctggcaggtcacaaaacgtttaacacatcttgcttattaacctcaacaggtggtgtaagattagcatttgagagccacgtgttctgaagaccatcctgcatttgtttgagtcagctttggcatgcggctaagctgtcactctgttcatatcttcagaaactagaagctaatacattgtcttgccaagcatttttcacatctagcactgatggtgtacctctgtgttttactataaaatgtaaaagttgaatgaagttgggagttaagcagactctgaaagtgagacttcttgtcactgatttgaaactcagggatgcactagcccctcttagttcttgatgtttcaggcaaaaccctgatgatggtgccatgactggaaaaaaatcctgtatagacagctttttacaaggtacacgtaagactagcttttatctacatgttgtatttaatacttaatctagccaggaactcttctcatctgtttactacatcctcatttaatcttcccagtcacttgaaggtggatatgactaaatattacagtgtacaggtgaggctctgaggcaccaaggagttaagaaacttgctcccattgtagagttgaagaaaaactcctagctttttcactggggtctaggacaccccccaaaaaactgaaattcctaaaagtgtatcagatagagaacttctgattatttctcaagtacccattcagatagtatttcttctaggaagccgtgcttgccacacatcctctgccccttccagcttttattggccattcttgctggcagagttaagcttgactacatacttgcccccatggttccactcatccttccatgggttgtatgagtttgggaaggctgaggaccagatggctcttgttggccatttagcaacaccaataatagttgtcccgggctagatgctgggtctatactggtgaatgaatgagacatggacccaacat

SEQ ID NO: 130908 - DNA, 1011 bp, Homo Sapiens
accccttgttaataagaataccagtcatattagattagaacccaacctaatgatcttgctttaacttgattaccgccgcaaaagccctatctccaaatgagctcccagaggtgaaaatgtcaacatctgattttgggggaaagggagacacaattcaacctgtaataacatgttaatggatacacatgtatgtatgtatgcatgtctattaattcagtatagttatattatcttgatccttgataagcatggttctagttgcatatatgtatgtatatatgtattcctgttagtgtgtatttgtaacacacaatgtaaaacttttttctatttctttcctttctacatacgtaacacagatcacacatatatatccatacttcactgctaaacagaggtgtttcaagccaagtctgaaataaacactcaaaatcggacatattttccaagggaggtaaagattacagtgtaaccaacaggaatgttcaagccagcaataatttaatttagtagctgagccaaaccatgacagtctacttttaaaataagtaaacttgagaatgtgatattgttacaattcttaactatggcatgcaagaacatttcttttaaacttcaagtcacacaaatccattttgtatatttattttttaaaggaaatgtctattcagcacatttggaatttggaagcttgaaaataactgaatcctttttcctgttgggtgcattttaacaccaaatgtaaatgctattatgaggttccagttaccacaggactcaggcttcatgcagacttagtttgatgaaagtctcagaaggaaatactcatggttcaggttccaatggatgaaggcattcaccctgtgaaacacagaaagtgctaccttttttaaactgtaacaaaggtaaccagttatgactcttcaagtgtcataactgacacttgctcttgctcttccttttaaaacgtttgagtagtttctaaaagatcatgcctgtttataaaggttt

SEQ ID NO: 130909 - DNA, 792 bp, Homo Sapiens
tctatgaggttttaatgataccccaaaacaaactgtccacttttggaggatgataaggagctaatcctttatcttgataattagtaaattaagggaaagagtcaagcattactgaccttatgtgaactgcaatactgagtaagcatatagtaggtgagggggaaacatctttttatagatgtgtcccccttaataaatgaaaaagaaatgatagaatatcacagtttttcaatgcccaaagaagttattgatctaggcactgagcatcaatgaaaagagagacaaccagaaattatgtgccgtctataaaagaacagcacctctaatcttgccaaagagatcaggaaatatggaggccagagggatatgctgaactgtaccatgagcgtgcactcagcaaaatccagactgggagattttacaagtcaaactccccaggttctttaacagataaattgtaaggaaagaaaaaggaatgggagacttaaaagatacaccaaaagtttaaaaatttataaaatggcaagacgacttattagttctagggatggatgcatgaatttttatctataaagaaatgcaaggtattaattactataaaaatttggatagtggttaattttgggtggagggagggagttgtaattgggatgtgggacatgtgaggggcttctgggatggcagagttctatttcttgacctaggtggtagttacagggatattggccttgaaataatttattacactatatatttgttcatgtggttctatatgtgtgtttattttgcaat

SEQ ID NO: 130910 - DNA, 165 bp, Homo Sapiens
gctgtatctttctttattggtttggggaaaactggagggggctggaaggccatgaccatgacacaagcaggaccacccacactcagcgaagcacacaacagccgtgcaggaaagacagcccctgaggcccgcctgccagcaccccctcggcttttggcggggcgg

SEQ ID NO: 130911 - DNA, 647 bp, Homo Sapiens
gagagcaagcaatgatagctgtggcggttttgcaaaaaagaaaagggagacaagcgcccagctatagttaccaataaagcatggtactggtattaaaataggcatgtgttctgttccaatggaacagaatagagaacccaggagcgaagccaaatatttacagccaactgatctctgacaaagcaaacaaaaacataaagtggggaaaggacgccctattccacaaatggtgcagggataattggcaagccacatgtagaaaaatgaagctggatcctcgtctctcactttatacaaaaatcaactcaaaatgggtcaaagtcttaactttaagacctgaggccataacaattttagaaaataacattggaaaaacttttttagacattggtttaggcaaaaagttcatgaccaagaacccaaaagcaaatgcaataaaaaggaagataaatagatgggacctaattaagctgaaaagcttttgcatagcaaaggaaataatcagcagagcaaacaggcaacccgcagggtgggagaaaatatttgcaagctgtgtatctgacaatggactaatatccagaatttacaaggaattcaaacaattagcaagaaaaaacacttgtattgtgtttgttctgtaaatcagc

SEQ ID NO: 130912 - DNA, 696 bp, Homo Sapiens
tttagtggttcgaagcaacacaaatttattaccctacagtatgtaaattagtcccacagtgctggttccttccagaggctgagggagagaatgcgttttcttgccttttccagcttttccagaagcggtccccaacctttttggcaccagagaccggtttcgcggaacacaatttttccatggattggggtcggggagggatggtttcaggacgattcaagtgcattgcatttattgtgcactttatttctactattattacattgtaacatataattaaataattctacaactcaccatcacagagactcagtgggagccctgagcttgttttcctgcaactagacagccccatctgggggtgacgggagacagtgacagatcatcaggcatcagattctcataaggagcgtgcaacctacatccctcgtgtgtgcagttcacaatagggctcgtgctgctatgagaatctaatgcccaccgctgatgtgacaggaggcggagctcgggtggtaacgccagcgacggggagtggctataaatacagatgaagcttcgctggcttgccggcccctaacctgctgtgcaccccacttcctaataggccatggaccactactggtctgtgtccggagtgttggaatccctgttctagagactgcttgcaatccttgactagtggtactccttccatct

SEQ ID NO: 130913 - DNA, 489 bp, Homo Sapiens
  misc_feature (323)..(331): n is a, c, g, or t
tttttgttttttgtttggcattattattttaatataatctgtaacttcggttccaagtaccaagggggggccagggctggcctgagtgggggcctcacagtgcgctggacaaagtgaccggtttttctccataaataagacaaagaaaccctggggatctggagaaggatctgaggccattaaactgcaaatcccaaccgaaaacgaagaagcaaaagtttcttttttggttcttttaaacgtctaaagagcataaaattaagaaaaatacaaatccattacaaacacttctcatctgtggggggaaaaggtacaaacgcgannnnnnnnncccaacagccgaatcccaaactcggaaaacaaaagatcaccctcagaaaagccgacacccaagtccccgcctccgcaggctgcgggtggagaggtggcgccgccccaggatcggcgggagctgtgcttgagttctaggaactgatggagagacggaca

SEQ ID NO: 130914 - DNA, 769 bp, Homo Sapiens
  misc_feature (673)..(673): n is a, c, g, or t
  misc_feature (712)..(712): n is a, c, g, or t
  misc_feature (738)..(739): n is a, c, g, or t
gtttattccacatcattctacaatggatttacaatagtttgcaatgatacacacaatacaataaatagaagaaaataaaaacaaaatagagcagagaaaacccagataaataggaggcagagtccactgcttttctgtacataatccatggagacctgggtgagggaaacaatttgctttcaaacagtagagtctttctagcagggccttcccctgaaagtctttgcttaatttagctaaagtgggaagagagagatcaaaaatatcaaatctaaaagcagttgtgagcataagactttgtagaaccattctccagtttacaaagatctttggcatctcctttcattgtcacagccctaaaaataaagaacaggtacaatcgtctccattttacaggtgagcacactgaggctcaggaaggccagagggcccacaggtggtcagggtcattctggatctcagcctgcagcctcaggctcctgatccattctttggcctttcactgggtacctgtgagcttttggctcgcaggcttggggatggggagggttgagagggacagctctttcacattcttgagttccacattgccctggtggtaacttcagtgtcagttgctcagtggggcaagaatgggcacatgtagacttcagccctggtggcacgcttgtanatatctaccgtgactgctttttctatcatgtttgattanaagctctatcctgttacaggcttgcnntagtcagcagaagactagcgtattctgtgc

SEQ ID NO: 130915 - DNA, 1154 bp, Homo Sapiens
gatctttacaaagataatctttattcataatcacaggccacaggggtgagacctgaggtttgggttctgtggtgaaggagaacccctgtcctcctgtcccttgccctgggcctctgctggctgaggagggacaaggtgagggggcccccatggtgctcagacaaccagagcctccctggcagggcaggagtgtgggtgccacagagacaagccccttgcagagctgacctggagcccaccatccccatagcctgtgtgagcatgaagcgaggacccccgggtgggctgtgccctgggcttgtcactgatgccagtggaggctggcacctgcccctcttggcacctgagacagtgagggaaggtagctgctgccgtgaagaacaaagatgctctgagcacacacttgctggggctgagctgaggggcacacggaggcaggccctgcccgtggtctggtcagctgtccctgccgccgctacttttctggtctggggctgtagccttggtcaggttcccagcttccctcttgagaacgctgagcaaagtctgggagctctccaggatcttgaggtaggcggcctccgtctccgcgatggtccggtcgaactcgttgcgagaggcaatcttgcgtgccaggttctcgttgacgcgggccagcttctctgtcagctgcctcacctcattctgcagccgctgcttctcgtcctcctcctcctggatctgccggcacagctcctcccgcttctggcaccgctcctctatgcctgggggccgggaggggcggcgctgtgggcccagggcaggagcgcggcggcggagggcgggcctccttccacccgaggaagccagagtcaggcaccacccccgagcgcccggcgcggggcctgcgagccaggcgagggctcgggccacggacacccggcctccggcacggagggctctgctcagccgcgcgatgcccgcagcgaggcgggtccaggggcaccccgctgcgagccgggaacccggccctgcggccctcccgacctccccgtcccggctgcgccgctcacacttgaccagctcgttgttgtagttctgcagcgccgcgccctgcatgggtcatggtcaacctcgtgccgaattcaacacccaggcctcgtacctagccgtaa

SEQ ID NO: 130916 - DNA, 972 bp, Homo Sapiens
acaggtgcgcacacgggcaacccgcgtccgcgagagccctgtgtcgcagacggagatccctgcccggcggggccgctcggtgagcggcgggggcgccaaggcggaacggcggtccgcataaaccgcgcgccccccgggggggagccctgaacgtttgggttcggtggggagaggagaacccccgtcccttcctgtcccttgcccgggccctctgctggctgaggagggacaagttgagggggcccccatggtgctcagacaaccagagccctccctggcagggcaggagtgtgggtgccacagagacaagccccttgcagagctgacctggagccccccatcccccatagcctgtggtgagcatgaaaggggaggacccccgggtggggctgtggccctgggctttgtcactgatgccagtggaggctggcacctgcccctctcggcacctgagacagtgagggaagggtagctgctgccgtgaagaacaaagatgctctgagcacacacttgctggggctgagctgaggggcacacggaggcaggccctgccccgtggtctggtcagctgtccctgccgccgctacttttctggtctggggctgtagccttggtcaggttcccagcttccctcttgagaacgctgagcaaagtctgggagctctccaggatcttgaggtaggcggcctccgtctccgcgatggtccggtcgaactcgttgcgagaggcaatcttgcgtgccaggttctcgttgacgcgggccagcttctctgtcagctgcctcacctcattctgcagccgctgcttctcgtcctcctcctcctggatctgccggcacagctcctcccgcttctggcacagctcctctatgcacttgaccagctcgttgttgtagttctgcagcgccgcgccctgctgggtcatggtcaacgccgcccggggccccaccaccccaaccgccgcggaagcccc

SEQ ID NO: 130917 - DNA, 843 bp, Homo Sapiens
  misc_feature (200)..(200): n is a, c, g, or t
  misc_feature (307)..(307): n is a, c, g, or t
aaggccttaaggttggggttctggcgtgaaggaagaacccccgttcctccggtccccttgccctggggcctttgctggcggaaaagggaccaggtggaggggggccccatggtggttcaggcaaccagagccttccctggcagggcaggagtgtggttcccacagagacaaggccccttgcagagctgacctggagcccnaccatccccatagcctgtgtgagcatgaggcgagaccccccgggtgggctgtgcctggggcttgtcactgatgccagtggaggctggcacctgcccctctcggcacntgagacagtgagggaaggtagctgctgccgtgaagaacaaagatgctctgagcacacacttgctggggctgagctgaggggcacacggaggcaggccctgcccgtggtctggtcagctgtccctgccgccgctacttttctggtctggggctgtagccttggtcaggttcccagcttccctcttgagaacgctgagcaaagtctgggagctctccaggatcttgaggtaggcggcctccgtctccgcgatggtccggtcgaactcgttgcgagaggcaatcttgcgtgccaggttctcgttgacgcgggccagcttctctgtcagctgcctcacctcattctgcagccgctgcttctcgtcctcctcctcctggatctgccggcacagctcctcccgcttctggcacagctcctctatgcacttgaccagctcgttgttgtagttctgcagcgccgcgccctgctgggtcatggtcaacgccgcccggggccccaccaccccaaccgccgcggaagcagcgctgtccgcgcctccc

SEQ ID NO: 130918 - DNA, 698 bp, Homo Sapiens
  misc_feature (88)..(88): n is a, c, g, or t
tgtgtcagaattaacctaatttgtgttaaaaacatattcccagaccccatccaagatacacagaattggaatctctatgaaaaccacnctgaaaatttcctttttaataatctcttggggtacttctcgtgtgtgtgtgaattttttaagtcctggttgattataaatgataatacaacctgctcttttcattctgtcactgtgttgaaaagttaacaactctcagctcagagaattgtcagtgggtattggtaccaaagtcctctgtgggattttgaccagcactgaagcagaaacttggcgtccgaagtctgccaagtgcaagaactagagctgaaatgatgaagtgagggatggggacagcactgggcactgcccaaactttttgaaagctttcagaatgaaatggggaaatggaaactttcctctgtttgaaatataaaagacaaatgtgtactgaaggcaattttggcaactcaacttcacattgaacaagtgaagacaatatgagtttctccaataaaaactaaaaagctgttttcaaattgacctaagatgattgaaaatggaaaatatttgctatttggttattagtttgagagcaagtgccccaggaaatattttgcaatttaacttaaatggttataatgtatattttcttgaacttcattaaaggatttgtctctttttgcctttct

SEQ ID NO: 130919 - DNA, 530 bp, Homo Sapiens
  misc_feature (512)..(512): n is a, c, g, or t
aatgtttcttcctctgtttggctttgccattgtgcgatttggaaaaaccacttggaagaagggactttcctgcaaaaccttaaagactggttaaattacagggcctaggaagtcagtggagccccttgactgacaaagcttagaaaggaactgaaattgcttctttgaatatggattttaggcggggcgtgggggctggtgacagtaactggtgtttaaatgaaggggaccgtcgctggactggcatgtggtacctgacattcttccaaaaccttgtctttgcaaactggggtccctgtgtaaagtcccctgaccagcggatagccccatgtttctgcttaatgaatttaatcgattctggcattttctcatagtcttggattttctccagctcaagcaggacaactttaattccatcctgaacaagagcattatacatggctatttgctcttcagatgaaccacccagccagctgaagcctgatgtttctctgactaaaatgataatcagncttctgcttttctttacg

SEQ ID NO: 130920 - DNA, 976 bp, Homo Sapiens
atgggaaaaaataaaacttttcaaacactagactgcccccccttgtttaagaatgtttaattatgcaatccaagttattggaaagccaggcatttttaccaaagagcaatgtcactataacttatgaacagaaagttgtgaaatataagggtactcatggaaacccagtgaagagaggaaacccccggcaattgttcaacacggaacagtgagcaggtactttgggagtaaggctctgagagatggaagacgctggtctcagatctgaggtgatgtctggccaatcgtcttggctccaagggggaagaatgcaactggcaggattcgaggagagggcacttctgcagcccccaagcaagtctctagttttcgccccaaagtggatgcactttctaacttcagcaaggcctcctcaggaggatttgctttccgatgtgtagtagcggtacaggaaacctaagagaacagcgcctatgatgggtaaaatccaatatgcccagcaacttttgcatgtatcattttttgaagggtccttgctaccactttcaggtttaaggtcactcggatggatatcaccaatgtagtactgctttagcatttctctggcatcagaagagtgtcctacatcttcaaagctttcacttgcatctacaccagcttgttccagcagaacctcttctcctccagggtgctcgttgaggaagcgggtgacatcgtagactcgcccatggatcacaagccacagttccttcaaggagttgcgctttgccacctcctccaaccggtaataggtgactgaggtctcgacttcctgccctttcccatcgctgccgctagcttccgcagtcgccattgaaccggacatactgcctctccaccgctaactgagattccgcgactactttccttgagagcccgcgctcagccttcccggacgcgtggtcgacgatatcccgggaattccggaccggtccag

SEQ ID NO: 130921 - DNA, 1801 bp, Homo Sapiens
  misc_feature (719)..(849): n is a, c, g, or t
  misc_feature (867)..(906): n is a, c, g, or t
tttttaaaaaaaccgccagtattttattctcatggaaaaacagaacaaacccacaagttggagtcacggagataaaatacagatgaaatggaaaacggtctgttgtcatgaactctcactttcaaataccattttatatggaagttactttactgcggggcaaacagaaggccatgctggagtctcttacttttggaaaatggagaatcaaaaatttgctaatcaacaaacaaaaaaggagggaaactccttggtaaagctctacaaacataattatacatttatattttaccaataaaagatagctagggtagaaaaaacagatggttagaaactggtgccaaaccaaagtgaaagctttggtgccttctctaaactcctatcctgtttctttagaaaacaccagttttctaaagaaagattactctgaattcaccagggttctatcaccccaattcatccctccctttccacccccaagacacgaaagggccatgtagttttttgtccggcaccacttgggaaggggctgggctcaggggctgggaagagctacctgctgccctagcttgaaagggaggaggtggccacaccattctttgtatttttatcacgcacataaaagaacaaaaatcatttggcagttttaagtttaataggtgcaaacctttacttcaggaattaaaccccttatgataaataaaagaattaaatcagannnnnnnnnnnnnnnnnnnnnnnnnnnnnnnnnnnnnnnnnnnnnnnnnnnnnnnnnnnnnnnnnnnnnnnnnnnnnnnnnnnnnnnnnnnnnnnnnnnnnnnnnnnnnnnnnnnnnnnnnnnnnnnnnnnctaaatcagaattttttnnnnnnnnnnnnnnnnnnnnnnnnnnnnnnnnnnnnnnnnttgtcaacactagactgccgccctgttaagaatgtctaatatgcaatcaaagtattggaaagcaggcatttttaccaaagagcaatgtcactataacttatgaacagaaagttgtgaaatataagggtactcatggaaaccagtgaagagaggaaacaccggcaattgttcaacacggaacagtgagcaggtactttgggagtaaggctctgagagatggaagacgctggtctcagatctgaggtgatgtctggccaatcgtcttggctccaagggggaagaatgcaactggcaggattcgaggagagggcacttctgcagcccccaagcaagtctctagttttcgccccaaagtggatgcactttctaacttcagcaaggcctcctcaggaggatttgctttccgatgtgtagtagcggtacaggaaacctaagagaacagcgcctatgatgggtaaaatccaatatgcccagcaacttttgcatgtatcattttttgaagggtccttgctaccactttcaggtttaaggtcactcggatggatatcaccaatgtagtactgctttagcatttctctggcatcagaagagtgtcctacatcttcaaagctttcacttgcatctacaccagcttgttccagcagaacctcttctcctccagggtgctcgttgaggaagcgggtgacatcgtagactcgcccatggatcacaagccacagttccttcaaggagttgcgctttgccacctcctccaaccggtaataggtgactgaggtctcgacttcctgccctttcccatcgctgccgctagcttccgcagtcgccattgaaccggacatactgcctcggacgcgtgggtcgacgatatcccgggaattccggacccggtaccagc

SEQ ID NO: 130922 - DNA, 921 bp, Homo Sapiens
ctttcacacacttagaattgcccgcccttgtttaggaaatgtctaattatgcaatcaaagtattggaaaagcaggcaatttttaccaaagaggcaaatgtccctataacttatggaccagaaagttgtgaaaatataaagggtactcagtggaaaccagtgaaggagaggaaaccaccggcaattgttcaccacggaaacagtgagccagttactttgggagtaaggctctgagagatggaagacgctggtctcagatctgaggtgatgtctggccaattcgtcttggctccaagggggaagaatgcaactggcaggattcgaggagagggcacttctgcagcccccaagcaagtctctagttttcgccccaaagtggatgcactttctaacttcagcaaggcctcctcaggaggatttgctttccgatgtgtagtagcggtacaggaaacctaagagaacagcgcctatgatgggtaaaatccaatatgcccagcaacttttgcatgtatcattttttgaagggtccttggtaccactttcaggtttaaggtcactcggatggatatcaccaatgtagtactgctttagcatttctctggcatcagaagagtgtcctacatcttcaaagctttcacttgcatctacaccagcttgttccagcagaacctcttctcctccagggtgctcgttgaggaagcgggtgacatcgtagactcgcccatggatcacaagccacagttccttcaaggagttgcgctttgccacctcctccaaccggtaataggtgactgaggtctcgacttcctgccctttcccatcgctgccgctagcttccgcagtcgccattgaaccggacatactgcctctccacggacgcgtgggtcgacgatatcccgggaatccggaccggtccagccgt

SEQ ID NO: 130923 - DNA, 578 bp, Homo Sapiens
gaattcggcacgaggcttttctttataaattacccagtctcagatattcctttatagcaatgcaaaatggactaacaatacataagttagggagtgttaattagaatggaaattaaatatgcagaaactcaaaggaagatgaaattgttagggaagacatatgtgttaacctagtgaggcttgaatcagatgtttggaagaaatgagggaggtttctgaggctcctggtgaccttgccattgaggacacatatacttctccccctacacacgccttttcttcttccccagtacaatgaacattaggaattacctgctcattgtagggaaaatgaccacccttcaggcattgcttttcatgaaaagtggattagacaagaggagaagtggttacactttttaattgttacataattgttagactgttttccctatggcaaagttgggaaataagtaactgttggaaactagaggcctttggaagcaagtagactcttagattggaaaaatgtggttctaatctaaaagcaatgatacaatgagagctgttatgaattaataaaaacagaaccaaaattt

SEQ ID NO: 130924 - DNA, 1213 bp, Homo Sapiens
  misc_feature (505)..(505): n is a, c, g, or t
  misc_feature (519)..(537): n is a, c, g, or t
ttttatgggtttgttatattttattttccaagtaatactgattaaaaatatttacacacctacttttaagtccacagtttagcactcttatttgtatggctttaaaagttatagcacaagatctttacattaagaattgggggaaaagattccattcaaaacaaagcctgataattatatacatgtctttctctgtactttattttaaatacattaatttttaaatgctgctcatctttttctcatctggtggtaaaatactagtgcaacttttcatcaaaataaagtttaccacagatgtaaataaattttcccaattgaaaatggcccttcagtggccattaaataaaatttctcaacctaacttaagtgaaaaagaactgggtggttgtcattataagcaaaaatataaagtattatagcatcatctacattgctccttacaacacaaactttgaaagaaccagagatgctttatagaagttcagttggttttgagaaggcnacatgggtgtggannnnnnnnnnnnnnnnnnnaacattctagaaattttgccaccaccactctttctgttgcaaagatggcatctgtgactactggggtagacaagaacgtttgttcaaactaaagaaagccagaagccaaaatttaactgcacagtaacaatgcacttttcatcatgcagccttgtgtttcctatattattcaattttctaacatgcattagaatacataaacttgtattctaatgatttaagtttgattttacaatatggaaaaaatttgaggaagaacatgacctgggaaagagaaaaggaagaacttttaccacaatgaaaatagatacattcgtacccaactatataataagaatataatccatttaagtttccagaaatatacttctcaaaactccccttcagttatggaaaagatccctcctctgtggcaataagtagggggaggggaatcaatgtgtttcaacggaaaacagttcagcacaacaggaaacagcttaactttggtccacttgtctgttaggcttaattaaggacagtcaaactgcccataatcagttcaaaaacccaacaagtaaatttaaaaatatattcatgtgtaatttcattcctaaactggcagagctgttctgtcctcattctctgccttttctgcttcagaatccactgttggcttggtctctaatcctcagca

SEQ ID NO: 130925 - DNA, 918 bp, Homo Sapiens
tttcggtggagtaattccttttaatttagacgtgtgttcacatactttatgcataagaaaatagttcattaagatacattttcatggtaggctgtttaaaatctagcagtaatgtgacaatatttaaactgttctaaaaataactcgaaatactctcagaaaagagcaccctggacgtggctctacattcccctggaagttttgtaaatgctagaatgttctttgtttccactcaaaagtagtcatgtatttactgggaataccaaagaaatattcatgtaaaataaattatatacagaatatacatagtctatatacataaatatacttgcacacaaatgtagaattatccaccttatgtcttttaaatctgggtcattacagaaacgcggtcctctcagccacacccgctacttgtgcagttttccctctggccacagggcttcctgcaaaagcagacgcagcctgttgcactcgtccacctccggggccgcccaccgcctcttcaggtgctggatgtcgatgagacgccagacgcctctggccagcaccagaggccaggaagctgccaccagccttctcaggctcacccaccgcagccatggccaccagcctgtatgggggagacctgctgtttggcgacaggacccagatcgctctggaggaggtcccacgatgtcgatgttcggatgtgtcgtcctgcgccaggaacacggcaggcctggttggggaccactgcaggccggtgaccgcatggctgtcccgtgctgctgtcccgctgcaggaagcggcacacgcggagctcagctggtgcatgcctgatgcttccgtccgcacagccggccaaaaatattggttctccaaatggtgaaaaatcaatgacattaactttcactggtcttataccatgttgctgag

SEQ ID NO: 130926 - DNA, 966 bp, Homo Sapiens
  misc_feature (383)..(383): n is a, c, g, or t
ccttgactgtgaagctcccggagactggagatgcctgtcactggcgcccggaccagcccacggcccagtcccacaggcatgagtaactgggtagctcctgagcagtggcaccatgcttggtggccacccaaaggaaaaggagtgttaggaggaaagggcagtggatgccgggagagggctgtgaaaaaaagggagcgagccctggacgagtggaaaggcccatcctggagatgaagtggaaggtgagggctgagaaggagccatcccagcgggagaaagagctgcctgcagcagtacatcccttccattttgtttaaattgggcttggagaatctattctgaaaacattgactctagacttgtagaaaagagccattttagtntcaactcaaatgtaaagcaaagtagtttggtgacattttgcttttatgtgaaatagtgcacagtatgagttaatctgagcaggtctgaattgaccaaatgcttatctacgaggttcctagagctctgctgacccttggccgaaactctaaaatgtacctattaaagataaatgcttctaccaaagtaaaactctgtgagttgtttcagggcagaatgtaccagccagtcagcgttgtttaacaaaataatcagatttttgcctagcactcggttttggtggagctgacgattttgagggctgaggctggttaggtagctggaatgtgcctatgtgaccagctcacttgcagacaccctgccggaagcagagcttaatcttcctaggactgaggtcttagcacatgtactggtggagtttccagaccaccagtatgaataaaagcttgttctgtgtgacccagcaagtggaaggacaaagaactgtgagcctcagatctttggacctttccaatgcgtctctttctcctgttattgctgcaatgtattttcttgcttatattaaagttgtttcatcagtataaa

SEQ ID NO: 130927 - DNA, 715 bp, Homo Sapiens
  misc_feature (604)..(604): n is a, c, g, or t
  misc_feature (609)..(609): n is a, c, g, or t
ttttttaggcatcttatccttgaagtttaatgcttttaaccccgttccacttcccgccagaagagtgtcctcctcccatccccacagcacaccatcttctgccttttcttctcagcacctggagctgttcctgcagcaactccaggaggtggtggtgaagcatgcagagccagcggtgcttgaggctggggcgcatgccctctacctgctctgtaatcccgaattcactttcttcagccgggcggactttgcccgcagccagctagtagatttgctgactgaccgcttccagcaggagcttgaagagctgttacaggtaggagctggggctggacaatgggacaccccaaacaagggtgggaggggctgcaagacgggggatgtggactgatgagttctgggggaaatgctattgtggatcttctttccttctcagtcgtccttcctagatgaggatgaggtatataatctgggcagccactctgaaacgcctctctgccttctacaagtgagtggctttcctcctcttccccatcccgtttttactggtgtctgtggagttggttccctctgttcttttccagtataacattcccctttctcncccanagcactcatgacctgactcgctgggagctctatgagccatgttgccaactcctgcagaaggctgtggacacaggagaggttccctcacaggtgagtggacaggcta

SEQ ID NO: 130928 - DNA, 706 bp, Homo Sapiens
  misc_feature (614)..(614): n is a, c, g, or t
  misc_feature (675)..(675): n is a, c, g, or t
  misc_feature (692)..(692): n is a, c, g, or t
tttttttcctggtttcgggttttattttagaatttataaaattccagtgtcatccatattcatgagcctttacacatgtttgcatataatctccaaattccaaagttaaggccaagggatggattgtagctatggaaacagatgatatggaagacatccaacaaggaggaaaagcacacgcacgcctcacccctgcctcatctctgcccagggctgtcctgacagcacagacgcttcagggagacaggcctggggacagtcatgtcatcacccttgcaacaaccacccaaaggaaaagagagcgctgaacagtttaggaaagggctcgcgtctaagacatcaagcgacatacagagatgtgcaaaacttggtgagaattaaaattgacctttgggagagggtaggggcaggatgttttatgacactgtagaaaagacaggaggaacccgctgcgatggagattggggggagctggaagcaagcagccaacaggacagagttccagaactcatgcagatggggaagaggtgacagcccttccccactggcctcccccgtggaggtggagtagacagatcccgggaaaggcaggaaaagggccttgctttctttcnctgtttcctaagccgtggtcaccctagcctatgaagctggaagctatattccttccaatcncaatttaccattcctgntaacaggcccattc

SEQ ID NO: 130929 - DNA, 495 bp, Homo Sapiens
ctggtttcgggttttattttagaatttataaaattccagtgtcatccatattcatgagcctttacacatgtttgcatataatctccaaattccaaagttaaggccaagggatggattgtagctatggaaacagatgatatggaagacatccaacaaggaggaaaagcacacgcacgcctcacccctgcctcatctctgcagatggggaagaggtgacagcccttccccactggcctcccccgtggaggtggagtagacagatcccgggaaaggcaggaaaagggccttgctttctttccctgtttcctaagccgtggtcaccctaagcctatggaagctggaagctatattccttccaatcccaatttaccattcctgtaaacagggccattcagggttgcctgagcaaatggggacttgccgagggcagctgcaactagacttggctaagccgtctgggtctactcaagaattcgagtctgaagatgaccaagc

SEQ ID NO: 130930 - DNA, 363 bp, Homo Sapiens
aaatcttgaccaacagaaaccttttatttttatttctgactcttattttttaaaaaatttgcgcctcggtatctggcttccctggaagctctccgagctctggtgctttagttaggtcatttttttagaaatgtgaagaggtctgattggctgcttaaactggaaagggtctgtgattggctggttaatgggaaacggtttttttctttggctgcaggtgttctgctgatatcaacagcttccctattttgaatgcagaaaacagggtctgggacattagtcgttatatttgacttgaaaagaaagaaaccaagtgcgctttgcaatatttattacacaaagaacttgaagaaagccttcaaa

SEQ ID NO: 130931 - DNA, 641 bp, Homo Sapiens
  misc_feature (620)..(620): n is a, c, g, or t
catttcacttggcacaatgctgtatggtttcgtcctacaaactatttataagccgttgttcattacttttggctaccgttatgacatctgtagaggagaaacgaaaagtggctttagattcagttaaactgcgacgcccagaaggtaaactggaggtcccttaacagctggttctcgaagatttcctcgagggaagaaaaaaatatggttagtttcccctaatgatctctctgaaatgattgccaaaaaaactcaaagcaatatccagctttctcgcctcctcctgctcgccccttttacccagactgagccgaggatggcggaaggaggcacattgtgcaatttcttattaaacacatctggaatatgcgcgctctggatttagtgccaggggttttacaaagagtttatgactgtgacagaaaattgtccttttaacaagtttacaagcagtaatcacgggggcttttacagaaccagccctcttgctcctcgccggatctgcagacatttccaagattcaccaactaagggagcaggaagtgggccggggcgccctgcgagacaaacttccacgagcctaaaattatcccaagcggagctgggagagtggagggtantcaccggagtaggaagagacg

SEQ ID NO: 130932 - DNA, 752 bp, Homo Sapiens
  misc_feature (36)..(36): n is a, c, g, or t
  misc_feature (43)..(43): n is a, c, g, or t
  misc_feature (86)..(86): n is a, c, g, or t
atgatgtcacaagttcttgataccaaatagagttcntaccatntgcaggtcataccggtcactgccaagagatggttatttagtgngaattgtctggcactcctagtataagtcacctaagtggggcaagtgggccttgaaacatccctgggagacactcactcaggctgcctgtgggagctgggctttttgtgtcactctcccatgcagcagtgacggctggggtttctaagtggtcagaggagctggaaaatggcttctgaagtaacagtcccttgtcatagtggtacaaagatgtcttcattcatctgttggcacatgtctctgggtaaactgccggcaaggccaaagtgatgggggttattattagtttttaataggaaagttagactggcttcactttccaaccagcttccctagttccagcccatttgcagacttttgggtggtctgtgggatgaaaatttcttgtgaggaggtgagctgaagatggccatccctcctggttgctcttggattgtctgggcttcatttctaaggtggtcccagagcccatgtgggggttgggggaagcagcattgtctagcccctttggtttgtacccatgttcaccccacccccacagccacctgccttttctgtgggacttgaaaagcatcaggaatatcttcctacctgaaattcttccattagaccctgattaattggattaatctaggaaaccagattaaatgaccatttaacgacccttt

SEQ ID NO: 130933 - DNA, 1129 bp, Homo Sapiens
  misc_feature (789)..(789): n is a, c, g, or t
  misc_feature (838)..(838): n is a, c, g, or t
  misc_feature (884)..(884): n is a, c, g, or t
  misc_feature (913)..(913): n is a, c, g, or t
  misc_feature (923)..(923): n is a, c, g, or t
  misc_feature (945)..(945): n is a, c, g, or t
  misc_feature (973)..(974): n is a, c, g, or t
  misc_feature (1003)..(1003): n is a, c, g, or t
tttgtttttccttaatgcttatcctgtttttaaaccattatttccaagttgacaccttttttaaggaaaaataaatattttgcggcattaaagccatatacaaggtctatatcagaaaaatatatttggggggctgcagcacaggactgagggagcggtacatgcttaaaaggcaacagggcctggttttcagtggcgatgatgattctctatgacagtcagggaaacgtggtctctgagagtgatgggcacataaagccttggtgccagagtgcatcgcatggtgtccaggccgagtctctgtcagatggttagaggcctgggtctaccctgccaggagaggcgtgtttgggtaacaggcagatggagtttggaacacatgaatggctcatcacacgccaaccctgagtggggcaggaggcaggaagggtgggctgccgcctctggttggcattctcagagatgcgcagtccatcagcttgttccaaagagtgaacacaggcctctgcgtgctcccaggctccttggtgtcccaacagctggagctcctcgatgagtcacgggagttctttgccaagaagtaacgatagcattactcatggaattgcttcactgctttctgaaggttggcataaaaccgggtcatgctgcgggggaagaaggagtccaccacgttctgtgggaggtaaccgctgaggtcggtatggaagaatgtgaccaggttggtcttggtgggttccctggaagaggtcacagaagcaccacaaggatggttaaatcctctcacanaacctggcttcgggggacataacggatgctccacatgggtggcgttggnactgatggtccatcctcatatctcttgactagcaccaagtccacanatctctgggagaaatgagcttcatggcancggagggaantggaggttctgcttacacacanggtgtcagtgatgctttggatatttcannacggtcacatctcatccactcactcgtangctccacagctggtcaacagtccacactcctctagtgtccaatacatgcctctctcggtacagtcctggaatccaagatgctccagaactgactcatgcttccgggatctcagctgtgtgtcgcgg

SEQ ID NO: 130934 - DNA, 473 bp, Homo Sapiens
  misc_feature (437)..(437): n is a, c, g, or t
tttttaaaataagatgaattattttatttctgaattctgaaggtctgctgggcttggccaggtgattctcattcttgtggtctcttatgaggtcagtggtggctagggctgaaaccatctcaaagccttcctcactcacatctcatgggtgatcccagctgttgctggaacctcatctgggactatcggccaaaacactcagaacttctccatgtgtctgggcttcctagaagacactgttcaagtagagggcaagacaatcaagaatctcaagctctatttcaaaacatttcttcccactccactactgctctatatatttttcacaatactttataccttctaacgtaatagttattatagaggtacacgtatgtcttactataacataaactccatgagggaagatatttttagttttgctcaatgaaatatcnccagtgccaaggaagcactgccctacacattcatcc

SEQ ID NO: 130935 - DNA, 1535 bp, Homo Sapiens
cttttaaaataagatgaattattttatttctgaattctgaaggtctgctgggcttggccaggtgattctcattcttgtggtctcttatgaggtcagtggtggctagggctgaaaccatctcaaagccttcctcactcacatctcatgggtgatcccagctgttgctggaacctcatctgggactatcggccaaaacactcagaacttctccatgtgtctgggcttcctagaagacactgttattggtttttaagtagatcatagccaaagctagagtagcacctggacaagtcacatccacatttatggtatctccttctttgatttgataacttggtgatttatgtttctccctatgcattcctgtttgaaagcgcctatgtcctccaaccatgtactgatagagctgctcaggcacattgagatcagacatacctatcaaattgctgccgtgccccaagcagaccatgcccagggccaagccagcagctaaggagtatgactttctgtcagtgcagtattccatttcaggaccaggaggccgtcctatctcagccaacaggacttctgcagtatgtctgtgagctgtcccttgatatacaaggccaatgccaaccactgcagccacttggacattgtgaggaacatccagctctgtggacgttgggggtaagagagcaggaatgcgaatgctaagaagccgagtaatagacatatccatggtgcctagttttgcagcagaaacaccaagtagcagtccaatgcttgtcatttcatggcccttggtcaagtagtcatggatattgagagtcgccagcttggtaaggtgcccattcaaacccagagccatgagaaagccagcatactcattggccaactcagcatgcttgggcttattgtaaacaatccaagctgagtcgatctgggaggcaggcgctatcttcaggccagcagccacaccattatgaaagctggcccagcttgtcatgttgggaggcacatcgatgtttccactattaaggtctactgttgtgttccgaggaggggcacgcccagtcagattcaatttaggaataggcaatggctctgttggaacaggatggtacgaaaacaaggtaaacattcctcgtcctacaggaagagccatagttcgctgacacaattggagcaatctgttttccttttcctcgatgaactcgtggtcactgagctctgggtactgcactacgttgacacggacaggatgcgcactctgaagaagccttcgcacatcctgcacccttaaatcttcactccatattaatgacatgacctcgtgattcatgtcattcatgccgtcatcttcctcctcagtttctgttcctgaaggaacatctgatgagagcacagacttccctttgggtaagtttccttcgcaggcctgcttggaaagatcctgacgtccaatcaagagacagacagcttctggccagtctgaggcaggctgctcacgacagtgcctcgtgccgaattcgccacccaggcctcgctacctt

SEQ ID NO: 130936 - DNA, 532 bp, Homo Sapiens
ttttttaaaataagatgaattattttatttctgaattctgaaggtctgctaggcttggccaggtgattctcattcttgtggtctcttatgaggtcagtggtggctagggctgaaaccatctcaaagccttcctcactcacatctcatgggtgatcccagctgttgctggaacctcatctgggactatcggccaaaacactcagaacttctccatgtgtctgggcttcctagaagacactgttattggtttttaagtagatcatagccaaagctagagtagcacctggacaagtcacatccacatttatggtatctccttcctattgaaagaagagtttatgcatgtaaaagagttctaaatttttataaaattcctctgataagtatgcttaaaattaacatatttaccaatgtcaggatgaacactagtattttccaattaacttcccagcttccagacttttgatctattactttgctgtgtacttactttgatttgataacttggtgatttatgtttctccctcgtgcc

SEQ ID NO: 130937 - DNA, 666 bp, Homo Sapiens
ggcggtgggcagtttattccacttcatgcagacactgacccacgcactcacggagcttaaaaataatacatcgaaccacacgggtatcatcccctcctccccccagacacagaaagacacttggctgagtgggatggggtccgagggtccaaaagcctccgtcctgggagaaggcagcagtgtgggcccaggtcgggggaggggcagtgtcctttctccccggaggaaaagtgcagagccagggctaaggccccaaggcagggaggcccccctctcacagcagattggcaacgggcaggctgggaaggcgtccttcacagtggccatcccctgaagggccaggccgggccgggcccgtgggctgcagctcttgggaggctcaggagcatggtgggcagcaccctctgtggtgccgggcaccccaggctcagtcttgggcactgtccgagcgccacttgagggcgtggtccttgtgggcgtcggggacaatctggttgcgcatgcccccgagcaggctggacgtggcctccgtggccaggatgagcggcttcaccacagtcgggggcagctggcggatcacgccccccacggcgcccgtcagccccttctgctcatggccccgcgatgccacgtcacagatggtctgagctgtatccaacctcgtgc

SEQ ID NO: 130938 - DNA, 1234 bp, Homo Sapiens
  misc_feature (711)..(759): n is a, c, g, or t
  misc_feature (801)..(801): n is a, c, g, or t
cagtcgacggtaccggacatatgcccgggaattcggccattacggccgggcaccaacatgtatacaagtggcatgtcttagtctgttttgtgcttctataacagaataccacaggctgggtaatttacaaagaagagacatttattggctcgtagtttggaggctgggaagtccaataccaagatactagcatctggtgagggccttctcgctgcatcataacatgacagaagccatcaaatggtagaagagcaaagagacagcaagagggaataagaacccattcttgcgatgatagcattagtccacctatgagggtggagccctcatgatctgaagcctcttaaaggttccacctcttaatattgttacagtggcaattagatttcagcatgagtttggagaagacaaaggtttaaaccataacatggtgtaagtcacataactctgggtcatatgcatatgaaagaattcgaaatttctctatgaacacatgctagtcttatttgggtttagagaaatctttagttgcagctgttaattcatcctgggtccaaggtttacatctgacagttgcctacatacttggctcttgaaagcatagatctttagaggtaattggcattttggaattttaggatattttttgggaaaataaagggggcctgggcaaaggatagaagagggaggaggtgcagaaggagaaagatnnnnnnnnnnnnnnnnnnnnnnnnnnnnnnnnnnnnnnnnnnnnnnnnncagcacctcagtttctgactccagccgcacacctcctgcctntaccagcaggggtgccgccagaccagagccagggccaggtccctgcgtccatcccccccggtaggatggacgtgagccatccttctaggggacttttttcagtgtgcgactcgtctctgttaggtggtaggagccagtttgtgtggcctgtgccacgctccacagtgcgtggctgggctctgtgtgtggcctgtgtcccctgtccctgcaggacccagcaggcatcgtggcgtgacagctgtgtccaagccactgcccgggcatcccatcacccaccagggtgcacggtctctcctgctgggggctttctgtcgcatgtgtgtctcctgtcgactctgcagtttgttctcagagcagaatgtttcctgttctcagtgcacaaagacactggttttcaatcggcgtctaaaaccacgttcctgcctttcattgc

SEQ ID NO: 130939 - DNA, 1324 bp, Homo Sapiens
caacacgaccgccatgaaaatatttatttgtggatatcatacaagtcaacaggaccagcacgaaacagatgcagcctacacagtgctgtaggaccgaggctcacaaacatccacatggcacaagcagggccggccactccaggcaaacgaagccacccccgaaccttgcagaggccgcactccctcggcagggggaccacggaggcgacaggtgctttgatgcctccgaagagctgagctccattccacggagggagcgggctgcgccgccgtcctcccattggtccagttttgcaatcactagatgaagctccggttaaagttctaaatcaggaatgacgcagccatgaagttaaaggcatccagaaggtcaccacacacctggcaccctccaagggcccacgcggagccagctgaggactcacgtccatgctccagaacgtcagcacctctgcctcccatcaccaagaaggggcttcagacacctcatggggacctatgacggctcgagcttgacacaggttctcccagctgctcgacacgttgtgggatgtactggaagggtcttccaggcctgctgaggcctttttttgtcccaccagccttgcacccacccctcctcctgccaggggctgggtcttgggttagaaagtcactcgagggcttcagagccgctgacccagcttgcagctcaaagtgaggacaaaggcgcttccatccaccttcacggagatgctggcttcgcaggccggtgggcgaggcgaggtccatagttttacttaggacaggtttcccaggcagtacccaggtcgtgtgggggatccccaagcagaagcttaggacggcattctcccctctctgttcccacccacctatctgccagacactgggcttgcccttgctgtccgtcccagcactgacgggcaggacagagatgcatggggtgagtggtcctgtggcactggaaggcatatcccaccagaaatgggtttcctgttggacaaagaccagaaatggccccgcagtatactggtggatgggaagaaaggagaggctggcatttgggggtgctgttcccaccacagccttgaagctggggccccccatcaaagcttgtcccaggcaagggtcagagatggaaggggacatctcttgctctgggacagggtcctgcttggctcttttctagtgggaaaactaaaaacacctgtttattctgccagaatcgaaagaaaaattccaggaagaacttcttactaatatacatttttaagatattgaccagcctcgtgccgattcaccccccggcctcgtacctagcctt

SEQ ID NO: 130940 - DNA, 1858 bp, Homo Sapiens
  misc_feature (1041)..(1295): n is a, c, g, or t
  misc_feature (1304)..(1333): n is a, c, g, or t
cgcgagcgtgtatcgccccaagcagaagttaggagcattctcccctctctgttcccacccacctatccgccagacactgggcttgcccttgctgtccgtcccagcactgacgggcaggacagagatgcatggggtgagtggccctgtggcactggaaggcatatcccaccagaaatgggtttcctgttggacaaagaccagaaatggccccgcagtatactggtggatgggaagaaaggagaggctggcatttgggggtgctgttcccaccacagccttgaagctggggccccccatcaaagcttgtcccaggcaagggtcagagatggaaggggacatctcttgctctgggacagggtcctgcttggctcagacagtgggaaaactaaaaacacctgtttattctgccagaatcgaaagaaaaattccaggaagaacttcttactaatatacatttttaagatattgaccagtcatctaaacttactcattaaactgttttaaacaaatgaacacaccgtgttgcaatgaaaggcaggaacgtggttttagacgccgattgaaaaccagtgtctttgtgcactgagaacaggaaacattctgctctgagaacaaactgcagagtcgacaggagacacacatgcgacagaaagcccccagcaggagagaccgtgcaccctggtgggtgatgggatgcccgggcagtggcttggacacagctgtcacgccacgatgcctgctgggtcctgcagggacaggggacacaggccacacacagagcccagccacgcactgtggagcgtggcacaggccacacaaactggctcctaccacctaacagagacgagtcgcacactgaaaaaagtcccctagaaggatggctcacgtccatcctaccgggggggatggacgcagggacctggccctggctctggtctggcggcaacccctgctggtagaggcaggaggtgtgcggctggagtcagaaactgaggtgccgtctataaaaattccaagattccgccgggtgcactggctcannnnnnnnnnnnnnnnnnnnnnnnnnnnnnnnnnnnnnnnnnnnnnnnnnnnnnnnnnnnnnnnnnnnnnnnnnnnnnnnnnnnnnnnnnnnnnnnnnnnnnnnnnnnnnnnnnnnnnnnnnnnnnnnnnnnnnnnnnnnnnnnnnnnnnnnnnnnnnnnnnnnnnnnnnnnnnnnnnnnnnnnnnnnnnnnnnnnnnnnnnnnnnnnnnnnnnnnnnnnnnnnnnnnnnnnnnnnnnnnnnnnnnnnnnnnnnnttcatctcnnnnnnnnnnnnnnnnnnnnnnnnnnnnnntccaagattcccacctccttccacctgcagatggccagcacctgcacctgccaggcaggaacacacgacaggcccagctctgcccagggctacagggccatacaggctctcccctgtgctgggagtccggagtggggacggtgtccacccagacccgccaggccacgctccaggcttccctggcttagggctgacaagacttccgggcagtggacttggcctcccacagccaccctccccagggcctggggtccttctgggagccccctcggccctggtgatcagcatccatctgagtgctcggtggacggacacgggagccgcctctccagcgagtctcagcggaagccgctggcctggcagtgagaggcggcgtggaaggaaaaggctcagcaggcacatccctccggcgggcagagtggcatcggggggccacacagctctcacctggactcagaaagccaggtccaaagttctcgtttccctgtctgcacataacctgctctgctcactcaccctcgtgcc

SEQ ID NO: 130941 - DNA, 635 bp, Homo Sapiens
ttgtataaaaatatcatcattttattacattccacacaatacattttcaaataatttccaacgtccacaagttattttgacacacaggcaactgagcaatgcaaggggtgtcacagtaataaggaaaggaataagaataggaagtaaaaatctttaggttttcttgtttcgttgttgttctttggtaattttcgattatttaggtgtttgcctgctagtttcattttaaagacagggtcttcttaaagatcggctatcaacttcagaaatagtactgtatttcctattcaattctggctttaatcccaaaaatgtgggacaagggaaaagacaattttactttatcttcagcatccagttttgtcaatgacaatgctgattttttgttttctttttctgccttcgccaggaactaagtgatggcaattgctagcataatatcatggaaggggagttcaacccagaaataagggcttccctcctgaaggtgttgacataaaacctctactaaggcaaaagctttatcagcccgagctaggccttcaactcattcactcattcattcattcatattttaatagttgctatcatctctttgtcttctgagaagcaactctaaacacatgcatgcatgc

SEQ ID NO: 130942 - DNA, 971 bp, Homo Sapiens
  misc_feature (24)..(24): n is a, c, g, or t
  misc_feature (39)..(39): n is a, c, g, or t
cttttataaaataaacatcccaantaaagagaaatgaanaatcctaaaatcatcccgcaatacacaagagcactcctagggggtggggcgccggggccctggaggggcgatgaagtgggcccagatgtcccacggcacgggggcgggcgggggcaaggccgggggaaacagacgatgggcactaggacactgcgcatgtacaagaccaactactgggggcggcggccccgtgcgtatgtgtcaggctgttcgttctggaatgaggaggggtggtctttacataatattctgtggctggtgggctcggagagggtctactttgtggagaggatgagggcgacgatgagaccgtagaggccgagcacctcggcgaagatgagaatcaggatcatgcccacgaatagtcggggctgctgggcggtgccccgcacgccagcgtcccccacgatgccgatggcaaagccggctgccaggccgctcaggcccacgctcaggccggcgcccagctggaggaagctcttgtagaggctgatgtcgtcattcagggagttggcgatgaggactgccaccaccaggccgtagatggcgatgatgccagccatgaccactgggatgatggacttcatgatctgctccggccgcatgacagacatggccgcaatgccggtaccgctcttggctgtgccataggcagcgcccagggcgctgaagaccatggcggccgaggcgcccatgacggcgaaaaacgaagcatactcggggccgctcttggactcggacatgtctgcgggtggggagggggcaagctctgcgggccgaggcggtggcggaggcgggggcgaggacgggccgggcacgaaggtttgcgggcgggcggcggcgaaggcgatccggcccgtcagccgctgcgctctaaataccagcaccgcagaacaaaatggcgatcccgggaattccggaccggtccagcc

SEQ ID NO: 130943 - DNA, 1876 bp, Homo Sapiens
  misc_feature (190)..(203): n is a, c, g, or t
  misc_feature (713)..(713): n is a, c, g, or t
  misc_feature (715)..(715): n is a, c, g, or t
  misc_feature (719)..(777): n is a, c, g, or t
aaaaatgggtgtgacgtgggaacacttttgaaaaggcgccaaattttcctatggtcaccaatggcacgggggtgcataagtgttaagggtttacccgccttcacgggggggaggctgtttgtcacattttttcaaatcgccaggggggaaccctttgtggaaaatttggggtaaaaggagggatagaggnnnnnnnnnnnnnnaggggtggtgaggggccctaaagaatttttcaaacaacaaggcccctggggattttcttaaattcctccacaataaacaccaaaccatggttgtagaatccccttcaggttcccccggtgggataaaataatttttgcaatacccccccaggaggcccgggaaaggtaaaaaacttcttcaaagccattcacccccgttatggcaggctccacctttttcaccccttgggacccctttaaaacattttattttttgaccccctttgagtcctcttaaacctctgctaggtacaaacggtccaacctatctcatcttcacaagagtgtgtgggttccaattatcacacctctcccaagaaattcagttttcccccgcccaagatcgttgtaggcccccaggggtcagcgctctaggggtgtaacacgacgcgcgactcagggtgcacgattatacaaggaacccggtgtacgcgtaatctttgacccatataggtgatattctaataaccntncccnnnnnnnnnnnnnnnnnnnnnnnnnnnnnnnnnnnnnnnnnnnnnnnnnnnnnnnnnnncacatccaagaactttattggacacagctccgcgcagggccacgggcccggcggtgagggcggctccatccaggaagtctcagcaacaggaacccacaaggcgacactctagctaaggttatagatagctgggagacaagggccgctccgcagacgcaggaacaggccagatctttataaataaacatccagtaaagagaaatgacaattctaaatcatccgcatacacagagcactctagggggtggggcgccgggggcctggaggggcgatgagtgggcccagatgtccacggcacggggcgggcgggggcaaggccggggaaacagacgatgggcactaggacactgcgcatgtacaagaccaactactgggggcggcggccccgtgcgtatgtgtcaggctgttcgttctggaatgaggaggggtggtctttacataatattctgtggctggtgggctcggagagggtctactttgtggagaggatgagggcgacgatgagaccgtagaggccgagcacctcggcgaagatgagaatcaggatcatgcccacgaatagtcggggctgctgggcggtgccccgcacgccagcgtcccccacgatgccgatggcaaagccggctgccaggccgctcaggcccacgctcaggccggcgcccagctggaggaagctcttgtagaggctgatgtcgtcattcagggagttggcgatgaggactgccaccaccaggccgtagatggcgatgatgccagccatgaccactgggatgatggacttcatgatctgctccggccgcatgacagacatggccgcaatgccggtaccgctcttggctgtgccataggcagcgcccagggcgctgaagaccatggcggccgaggcgcccatgacggcgaaaaacgaagcatactcggggccgctcttggactcggacatgtctgcgggtggggagggggcaagctctgcgggccgaggcggtggcggaggcgggggcgaggacgggccgggcacgaaggtttgcgggcgggcggcggcgaaggcgatccggcccggacgcgtggtcgacgatatcccgggaattccggaccggtccac

SEQ ID NO: 130944 - DNA, 1025 bp, Homo Sapiens
  misc_feature (803)..(803): n is a, c, g, or t
  misc_feature (838)..(838): n is a, c, g, or t
  misc_feature (863)..(863): n is a, c, g, or t
  misc_feature (871)..(871): n is a, c, g, or t
  misc_feature (980)..(980): n is a, c, g, or t
gtaattttgtttattatgaatcaacttgaaaatacagcccatgatggtgtgaaaaagaaattccacacatagtaagacagctacttggcctcagagccagcgccgggctcctgtgtgtgtgttaaacaggtagtctcttccggtacgggagtcctgtgctctgccatcaaaatgctgcagactcatgacactgctgggtgcctgggacatctccatcttcggtgcctccaggaaaccctcgatggatccctcagttccctggatgctgtttagcagcaaagcctgggctggtttgctgggtgcttgcagcagctgggccaacccctggaggagcctgccaagaagccagcctagggccaagaggagaagagcaccagttgctgtcaacaccaccacaaaccagggctgtggctgccagaaagcctctgtgtctgtcacgagcatgggtgtcatcgttgagggcactgtggttctgtgggtgctggtggccactgtgctggccctccggggaactagatgcacaataatggtggctgtggtgctgaggtggggggtggaggggcctgcatcggccacacagatcagtagctcataggtacggggctgctctggccagaacggccccaacacaaggtcactgtgcaccaggatggccccttgcaggatgaatcggttctggctattccctcccacgatgctataggagtagatcaggcgctgtggctcctgagggatctggcatgacatcttggtcactccacgctacggcccagaggagcatagatggtgagttcctgaatggnggctcaactcgggggcatggtcatcacatcctcanctcgatggtatggtcaggagctganagtgatgngtggggtctgggtctggcatggtcatcacaggacatgagctgtaagctctgctgtcatatcaaaggtccagagtgactcccgctgaacgtcaagcaagtgtagacacanagctctgcgattctggccgagggcatcctaatgatctataatcga

SEQ ID NO: 130945 - DNA, 518 bp, Homo Sapiens
  misc_feature (489)..(489): n is a, c, g, or t
agtaacaacattacgaagtagcttttattcccttgggtgaataagatgtgcacatttaataataaatttgcttactaaaggtccttttaggggaaaacaaccttaaaaatacagttctagtccttgggcagtgaacaaagaaaaaatgtgcttgagaaacacagtccaggttaaaggaaaactctcagatcggttaatgcagttgaatttttgcttgagaatgtgagcaacgtatcagcaaatacattcattcttgtgctactcttcattatttagcatagagctaccttaggtgtttctacacatgctctaaaccaagagtaagtttaacatgtcagcagtgaggagtagacattttctactatagcacactgggagatgtttactggtactctaggtagaaatgactccattgtccactaagtttgggaaataaataatatggcaacattgctactggagatacataatgtacagaagcctaactantaagagatttgattaacgagacttaagtc

SEQ ID NO: 130946 - DNA, 629 bp, Homo Sapiens
  misc_feature (590)..(590): n is a, c, g, or t
tattattttattttgtttaccataaatgacagagcagagagtaatacaaaatattctaagaacatttttctcatttcaagacaaatgaaagttctttcttccagctggtgggaaaagaagtatcagaagtgatgtgactagagctcttgggggagcttgggaaagggctcccttcactacccccactcccttgagagccctgggagtcaagagggggcagaacaatggaaatctcggaataagaacaattggagggactcacagagcagacaggaccctggcctgactctggtgggtgcagtccctcatccagcttcatcacctgagtggagagtggcaatggctggagaagtctctggagcaggtgaggaccactacccaagaccctgcattcagcttggaggatgaacatgctcaaaaatttcctgtgtggcaggaggaacacagacatggcctggaaaggaatttcttcagcatggaaaagacatagagtggcctgtgcagacactacctgagtgtgaaaggcacaggagactgctaatgaccaaagctcaggtggtttatcaagcagaggacaatgggagccatangccagacaaccctccccacaatgcctctcccagcataga

SEQ ID NO: 130947 - DNA, 536 bp, Homo Sapiens
  misc_feature (494)..(494): n is a, c, g, or t
tacccatagaatatacaaaaaagaaactaacagaaaacaatttaaaatattttaaatgacaaaacaattaaatgacaattaacaataatgttagcctataaagctattttctaaaacaatttggtaaggagagtagcattgttttatagttctacaaatctctttaatgtttagcttgatagaaggcagctgaattaccatacctgcttctgcattcaacttgctgcaatacatgttgtaaaacctggcttcacacaggtagatatttggaaaaagaggggtatttaatagctttttcagatgatagtgtgcttttatattataccaaacattgatgaagtagttgaaggatactggttcttagtcaattctcataaaaattatctcttaaaactatgacattattggagcacaataccaaaaactaatcaggtctctgtaccatggttcttacaaatttaagatgagccttctagaggccggagtcatattcncttactttccctgcccaaagcatccattcctgtttcttccct

SEQ ID NO: 130948 - DNA, 1458 bp, Homo Sapiens
  misc_feature (117)..(117): n is a, c, g, or t
  misc_feature (230)..(475): n is a, c, g, or t
  misc_feature (506)..(523): n is a, c, g, or t
  misc_feature (824)..(836): n is a, c, g, or t
cactgagctcgatttgtgatctcgtcaggcgccgaacctttgaaaaacccggcacgcggccttttacagtcctgcctgttgtgcctttgctccatgtcgtcctgcgtatccctgatntgtgataaccgtataccgccctgagtgagctgtaccgctccccgcacccgaagaccgagcgcagcgagtcagtgagcgagaagcggaagaggcccatacggcaaaccgctggnnnnnnnnnnnnnnnnnnnnnnnnnnnnnnnnnnnnnnnnnnnnnnnnnnnnnnnnnnnnnnnnnnnnnnnnnnnnnnnnnnnnnnnnnnnnnnnnnnnnnnnnnnnnnnnnnnnnnnnnnnnnnnnnnnnnnnnnnnnnnnnnnnnnnnnnnnnnnnnnnnnnnnnnnnnnnnnnnnnnnnnnnnnnnnnnnnnnnnnnnnnnnnnnnnnnnnnnnnnnnnnnnnnnnnnnnnnnnnnnnnnnnnaagaattcggcacgaggcgcggctgtaggcnnnnnnnnnnnnnnnnnncaaaatataaactttattattttacattcaagtgaaacttccatctggaggggctaaacacagctgccggccacattcactgatttattactttgttgcctttttcgttcacctgatggaagaattcaaccctcttaaaaacataacaacaacaaaaacagctggagagtcccagccgtaatactaggtgtagacacgcacaagcacacacacaaattcaaaaacttctacatagaaaaataaaggataaacattatccatctattttgtactgtgtaatgcaacttttatatacataaannnnnnnnnnnnnactgttttcagtcactgcaaattttcttccctcctctgggatctaaggatccagggaggaggctgccacagtgaagcagaaaagctacattctgcccagggaggaagagaaaaagcaatttctcgctccccttcccaagtccttcctgtccaccaccacctcggatgtccccgcacacagccttccggtgagcggccgtgccgtcccctcctctctctaaggcattggggagcagagggcccataggcagcaccctgcaaaaaaaaaatgatctacgtgtgaggagagggcaaggggctggatgcaggcagagaatgactttaagaaaagattctatgatcccttcctttagtatggagctcgattttccagctggcgcttggtgagaaagtacttgaagaactcatagacagaccaagaaatggcggtggagggcatctggtagatgacacgcgcctggatgcctttgaagtagccggccaggccgttgagctggtacaccgtccggaaggcattggccatacccgacagccggccgctgatgttggccagcgagagggccacgttctcctgagtgttcagaagggtcttacagacgtccaggggggtcgtggcggccgca

SEQ ID NO: 130949 - DNA, 460 bp, Homo Sapiens
  misc_feature (389)..(415): n is a, c, g, or t
tttaaaataagccagaacttgtttattgaaaaagcactaaaacaaaatattttggtaagatcgagcaagaagacacaaatagagaatggaaaaatgaaaattttataaacgcagttgaaatttgaaaatgtgaggatattatgaacaattcatttgaaaactgacaaaatacacaaattactacgagtattttactcaaactaattgaagatagacatgtaatcccacagctcctaaatagtttcagtaattaaaaatttcccccaaagaaaagccttttatagtaagttccactaacctgttccatatggtaccaattcttaatctaacagttaacagttcattcaaaataatggcaacaatgtatttgattttgtacacatatattnnnnnnnnnnnnnnnnnnnnnnnnnnnatagtcgtcatacttaggggtgcttatatataagtggaatgacag

SEQ ID NO: 130950 - DNA, 497 bp, Homo Sapiens
  misc_feature (74)..(74): n is a, c, g, or t
gaagctgccagggaaactaaatatgatgagaagaagaggaatgactggatcaaattaatagaaatagatctttntgcaagcaacataatgattctgatcatcaaccttgaaaagtaaattagaacaagcaaattgctgttgaaaaattctttcagcactctgctgttgctactcagctagtcatagctcagccagagggaaggaaaaaatgcactcggttttgcattaacaaaggaaacattattaaagtgaatgtttacattgtgtttattgaagtgttgaaagaatatttgttgcatcttcaagcaacctgctgctctccagactgttacagtgcatgagtgataataaaaatgagtcagtcacttgtacattttagaaaataaataacttttaacatagtatttctcaactatgttacttcaaaatgtttaagtgccaaacttaatgttaccttctctgctaaagatttttgtctctaggaaatatattccatt

SEQ ID NO: 130951 - DNA, 988 bp, Homo Sapiens
  misc_feature (27)..(27): n is a, c, g, or t
  misc_feature (83)..(83): n is a, c, g, or t
  misc_feature (110)..(110): n is a, c, g, or t
  misc_feature (196)..(196): n is a, c, g, or t
  misc_feature (216)..(217): n is a, c, g, or t
  misc_feature (241)..(241): n is a, c, g, or t
  misc_feature (310)..(310): n is a, c, g, or t
  misc_feature (407)..(407): n is a, c, g, or t
caccccagattttactctaaaagcgtntaatcagtacttcaaagaattcagaaacatacccctaaatggagagcctgtttatntgagacaaccatacaaatataggagcntaggagggtgtagtaccttactgtaatacaaatctattgtacgcatgtgtactagagaaaaacactgagcagttgctcaaatttgntcaacatcagcgaattatanntggagaaaaatcctgcaaatgtantgaatttggaaaaacattttttcaaaaaactacggcgtagaaaacatgaatttatactgaaatgtgttnttgcagatgcagtaagtatgaaaaatatttaatccaaaattgagtctatgtaaatattaaataatttacagtagaaataactaaggcactgacactntagacatacacgtaaaacagagtgttgagtataaaaaaatctataagttgttagattatttgtaaataactttaaaaggagtagaagattctttggagagttataattacattgaaagtatactttttttcttgaaaaaattatggcttatttgaaaagtaaataatgatgaaattcaactctcaaattactttatttcattcctattgtattcacatgtgaaagcatgtgataaattgttgctgtgtcagatataggagagattcttttttattagatgggcattatttatggttttttctgtggaagagtatgggcattaaaatgtaaggtttatgatgaaaatctaagtggagaggccctgttagtttacttttcatattgagtgatgcatgaggtaggtgtttggagtaatattctgcatcatagagaaaagcatttttaattttactttaaattaaatgtaattaaattactagtgaatcattttactaattgtacttttatgctataaatgcagtacatttgaaaatttttagattatgtataagcttaattttataattaaacatttctttaac

SEQ ID NO: 130952 - DNA, 836 bp, Homo Sapiens
tttgtgttgaaatagactctgctttattcaggtagcaaaaggttaggaatcaaacatggtttttaaaacctcctttcatctttgaaaatagaggagagaacatccctgggccagtcacagttactgtatttggctaagcacacacctgtatgagggacccgcccctccacactgttctgataggtacttagcaccctagaaactcatcctctgcaggagagagaagcaagggtctggagcgcggtcacatactctaaggtatcttccaggacagggggctgggctccctcactcccacctggagtcgctatggctattgggatcaaactaccagttacatactggttacttggaatgtcagacccggtgggtatcagtcatcagggagagggaggggaaatgccaggacacgtacatacggatgctgtcaagactacaggcaaggaggagggtggcgacaagcgctgggactccagccaaagcgggagtgcatgcttcttcccctcccagagccctgtggtttttcttcttgtgaggcataaacaggaagcctctccaacaagggggtctccagcactaggggctgaaactcagccagcctctccaaacaaagcaaaggggccagcctgggccagggcctctgataaggatgctcactgtgtttccacgggggtcctgaatgaggaagttcaggaataagatggcagtcatcttcttccttcttggccattggctgacaaaggggaacggagcaggcctgtgccccttgagaaatcgggtagtgcaaattttatgacaaacagcattctcagtggccccgctgccatacccggtgg

SEQ ID NO: 130953 - DNA, 1406 bp, Homo Sapiens
cgcaggttctaactttggcctgggactctgcccctctacctcagcacagaatcgccccgggtcctactacagaatcaatccttgaacactgcctccacgtcgccggctcaatctgggcgagaacccagacttccaccgcagccccgcaatctgcagacctcagcggcagcgcaggtggcagacctgcctcctttgcctgtgagtcatggcagctcccatgaatggccaagtgtgtgtggtgactggtgcctccaggggtattggccgtggcattgccttgcagctctgcaaagcaggcgccacagtttacatcactggccgccatctggacacccttcgcgttgttgctcaggaggcacaatccctcgggggccaatgtgtgcctgtggtgtgcgattcaagccaggagagtgaagtgcgaagcctgtttgagcaagtggatcgggaacagcaagggcgtctagatgtgctggtcaacaatgcttatgcaggggtccagacgatcctgaacaccaggaataaggcattctgggaaacccctgcctccatgtgggatgatatcaacaacgtcggactcagaggccactacttttgctcagtgtatggggcacggctgatggtaccagctggccaggggctcatcgtggtcatctcctccccaggaagcctgcagtatatgttcaatgtcccctatggtgtgggcaaagctgcgtgtgacaagctggctgctgactgtgcccacgagctgcggcgccatggggtcagctgtgtgtctctgtggccggggattgtgcagacagaactgctgaaggagcatatggcaaaggaggaggtcctgcaggatcctgtgttgaagcagttcaaatcagccttctcatctgcggaaaccacagaattgagtggcaaatgtgtggtggctttggcaacagatcccaatatcctgagcctgagtggtaaggtgctgccatcctgtgaccttgctcgacgctatggccttcgggatgtggacggccgccccgtccaagactatttgtctttgagctctgttctctcacacgtgtccggcctgggctggctggcctcctacctgccctccttcctccgtgtgcccaagtggattattgccctctacactagcaagttctaaccctcctggtctgacactacgtctctgcttgtcttctcatttggacttggtggttcgtcctgtctcagtgaaacagcagcctttcttgtttacccatacccttgatatgaagagaagccctctgctgtgtgtccgtggtgagttctggggtgcgcctaggtcccttctttgtgccttggttttccttgtccttctttttactttttgccttagtattgaaaaatgctcttggagctaataaaagtctcatttctctttc

SEQ ID NO: 130954 - DNA, 960 bp, Homo Sapiens
gcccctctacctcagcacagaatcgccccgggtcctactacagaatcaatccttgaacactgcctccacgtcgccggctcaatctgggcgagaacccagacttccaccgcagccccgcaatctgcagacctcagcggcagcgcaggtggcagacctgcctcctttgcctgtgagtcatggcagctcccatgaatggccaagtgtgtgtggtgactggtgcctccaggggtattggccgtggcattgccttgcagctctgcaaagcaggcgccacagtttacatcactggccgccatctggacacccttcgcgttgttgctcaggaggcacaatccctcgggggccaatgtgtgcctgtggtgtgcgattcaagccaggagagtgaagtgcgaagcctgtttgagcaagtggatcgggaacagcaagggcgtctagatgtgctggtcaacaatgcttatgcaggggtccagacgatcctgaacaccaggaataaggcattctgggaaacccctgcctccatgtgggatgatatcaacaacgtcggacctcagaggccactacttttgctcagtgtatggggcacggcttgatggtaccagctggccaggggctcatcgtggtcatctcctccccaggaagcctgcacgtatactgttcacatgtcccctatggtgtggggcaaagcttgcggtgaaggacccagtggcataacgagctgcggacggtcaccgacagtgactgttacctatagctcaggacggtacaatccccaagtggttccgaatggtcagggctggcctcctctcagcgtcctcctctgcctcattccatggacggttccctttgcttgttgctccttcttgcgtggctagcaagtaggcattcacactggggaccgttggcagctgacaccttgggctcctgggaccgccaggtggttggagcttcatcgtgaatgcg

SEQ ID NO: 130955 - DNA, 660 bp, Homo Sapiens
tttctggtttaaatcatttatctccatgtagagatttgagtacaaaaataaacggcaacaaaacagaaggagtgtgaaatccggggatccacagggcttctgtcctccaccttccatgcagctgggggctgcatcctctgtggggtggcttcatcctctgtggggtctgtggggcctgctccaagtcatcagcattccatgcccacctggacctggtcccagactttcggggaagccctcagcctggggctcctggcacccccgttgcggctggggaagagaggtgtggaatccccagagaaagggaaggaaaggcatgaggggccttccctggggggaaggtcacaggctgggggctaagatgacggccaggaggctcagggccagccccaggctgagggcactgtgggcgagggcggtgcgggtgggtgcagcgttgtgcagcttctcattgcacaggtcctcctggcagcactgggtggagctggtgccgctgctgacctggccttgcagggtgtagctgggtgtgcacgactccgcacagtccttcttcaccagattccccctcagaggctccactgtgttcgtggtcttgcagaagcgagagctgggcgggcagacacagaatgcttgcagttgctggagctggtgcacacgtgg

SEQ ID NO: 130956 - DNA, 743 bp, Homo Sapiens
  misc_feature (38)..(38): n is a, c, g, or t
  misc_feature (69)..(69): n is a, c, g, or t
  misc_feature (693)..(701): n is a, c, g, or t
acattcttttttccttgtacatccaagggggggcacangggtgggtggaaaggaatgtctaaaaatganatcccttgatatagagggacctagacggacaggatatgctaaaataatttcaaattctagcccaattttagagtagaataagtcatttttttagactaataaaattaatggctgtcatgttcactctgaaaaaaatctaaatggctgaaatgtacagaaataaaaattagcaaacaattattctagggatattttcagattttacttcatttcttgaaatgcgtgtgccatatgcaattgcatttcttgtgccaagaaactaatagaacttatttcactttacctttttttaaaatgtgaatttagttattatagttcaattttatggccttacagatggcttttattttgtttgcagctgacactgcagttcctttcatgcaaaataccataaactgtttgatgaaaatcatgcccctaatggaaactctctagtttttccatataactatcctactgtacatgtttaaacatattttatttttgctccaatggcttaatgtgaaaagctcctgcagataagtggacctgtcatgtggttaatcttgtttaagccaattcattaactgtgtactgatactgatgctatgttttttttaaatggattttattcccaggtgaacnnnnnnnnnataataatgttcgtctaaaataaaaactacataatgaaaatg

SEQ ID NO: 130957 - DNA, 922 bp, Homo Sapiens
  misc_feature (121)..(121): n is a, c, g, or t
  misc_feature (900)..(900): n is a, c, g, or t
ttaaagtagtaaaatgctgataggcagtaacactgggatctcaacaagttcagctgtgatggcgatagcaattacaatggaaaagtaaaatacatgcatcttgggcgggggccaatacttnaatttttgttggctgtgaggtgtgtgctgcatgtcactgcttctgagttcacttacacttcagacacggaaatcaactcatgcttgatatatccagttcctttagggccatcaagttccattggctctgggtgcttcctttggcctggagtaatactttccaaaggcatggtctttgtcaatatttggatacagatacttcaggggattctcaggaatattctcagcagccatgactttgtaattgcgaatgatgtcagggaaagtaacagcagaaagttctttcttcgtgtagggttcaaccgcatggaagtcaggttcgcctccgttctgggaccgctccacccatgtgaatgtgatggccccttcccgggagctctcactgaaccgcagcaggaaggtccccggctgctggtccttcaacagggcacgctctcgctccttgctgatgaagcccatgatgcacccatcattccagagagggagcaggtgttttttaatgagttctaggatgctttcaatccaaagccagaagggaaaatttttatcatttatattttccttacaaaacctcgtccacggaatgagaccatcggggctggcgttaggaccaagaagcttctctcccaacatgttcagctggtccacattgagacctcttttggtgacagaagaaaactgccaactcagcacttctgaaagctgagcccatcgtgcacatggtggagtcaggaagaaggacagattccctgggttccgccaccagcatgttgtaccaanaggatggaggccaaacgcatca

SEQ ID NO: 130958 - DNA, 1916 bp, Homo Sapiens
  misc_feature (1854)..(1854): n is a, c, g, or t
ttttttttagaaacaatattgttttaatgttgtcttctttgttttttagtcatttcaattgtaaaatcaactgaaacttaggttctcgccatctatataaaaactgagagaggaggcctcagattgtatgcagtgccacggaaagcactgtgtgcatattatatttaatgcaatacagatactttagctttaattttaaaacaaaactcaagaaatctttatctccaccaaagaagaatacagcatttgcatgataatatagttgtggtagcagtagtggaaaaacaagatacagccacatagacagcagtatgtaaaagggaagaaccttgtcaaacccatctcttaatctactttttgtgtcagtgataaggaaggaaaaaggtaaaaatacagtatacttcacgaaacatcatccactcaaaaaagtgtctggaaaaagtacaggagagagaatggaaccattcgcaaatgtgaaaaacacatatatcagcgaaacatatgcagttctcaatgcagttacataggaaatgagttttgaaatgatctgattctcatattatctctggtgtattattcaagttgtcagttactgctttttctactcctttcccaattttgtggctaatagactaaataccaccctaataacaaaaaggacaaagtagcccatttaagaaacatgaattaaatttctgagtttatctacatctatggttaatttcaacttttgaatgagtggttgtgaatagcctaactcccttgggagaactgtaaaaataattgtatgtgaccaagatgaaagcagaatgtattcagctttggatatcaaacacaacttgtgaatttggaaatgtacatccttctattgatattagctagtgtcattaagccataacaaacagtaaagctaatattctcttctcaagaaacagaatttgtctttgtctttaaatagccaatgtgaaagatgtaataaaatacacattttccccctaccagatccatgatggctacctttgaaagaggactgatataattgtatataaacttggctttgaactatttcacaggtaaaccaatggaaaactgccagttacacttaaagcaaagaaaacatgtaagaattctcccacagaaatttaccgttcctacgtcaagcagttccctaaataaccactgattttatccgacaacctataacagttgggcactgacgtttatgcgataacatttgctagatgttgcttaacgtgtgctgcgctgtgtccgcaaaggaccctcattctcgtcctgatactttgggtgtatctggatgtttttcacttgtgaaacccactcttcagagaatgcctttcaagttttaccttcagtaagatgcatgatgcccttcagagtaactgatgtttctgagttagagaaaaattcacttgctatgcaacaggttgcagcgaatttgctggcctttcgtttcatttccctagaaacacaggatgtgaaggaacagagtagcaggagggaatcacagatgagaaggaaaactgtcgccagagaagatgaaaaaaattcatgctctatactgtgttcatcatactgtcgaattctacagagcccactatccgagacacctcgtcaaactcctcaggagacatggggagcaggttgtctgtggtctgaagtctagaagggtgaacttcagacacagaaatcaactcagtcttgatatatccagttcctttagggccatcaagttccattggctctggtgcttcctttggcctggagtaatactttccaaaggcatggtctttgtcaatatttggatacagatacttcaggggattctcaggaatnttctcagcagccatgactttgtaattgcgaatgatgtcagggaaagtaacagcagaaagttc

SEQ ID NO: 130959 - DNA, 1277 bp, Homo Sapiens
tcattaagaaagctttatgttaaagtatgaacagcatttccaataaaacatgaaaagattcatattgtatctacaaaatttaagtctttgctacaataaatgctatatttcttttaaacaagcctaagaaggtaaggaatgtcatgatcaatccgtacattctctttgcagcataagcctggagactttgatgtttaaattggacaatcatagatgtgaatttcctggtcatctccaacagacacaatttttgaaccatttccattgtattttactccccagacctgatcctggtgatcaaagaaggtgtgaacacaagtcctcgttccaacatcccaaacttttacacttttgtcagacgaactggaaacaaagtgagtgtcatcaggacagaatgcaacgttcagcacccaggaggcatggccgctcagcgtgccagccaaattggcatgttgtacatcatagatcttgatgtagccatcatctgaagcagtgacaaggagctgggagtccggggaaaaggtcaaggagcgaatgggcatggcatggccttccagggtatgcagaagttttccagttgcaatatcaaaaatattgatgattccatctatggctccactggctaggtatttcccatcaggactatatgcaatactaagaatgaattttcctctcgtgtccaaagaatattcctttttcccactttccacaccaaaaatgttcactttcccgacatgagttcctgtggccagatactgggaatcaggagaaaaggccaaagtccaggcatccacaggtcctgcatctatggactttatctgtttgccattttccaagtcccaaagacgaatatgagcatcaagagagctggatgcagcaatgggcagggtgtggctgatgtccacagacaccactcccagctgatgtccctccagactccactgtaggtccagcctctcatcacgccatttccagaccttcaccaggtcatctagggagcctgtgaccactgtctcagagttttccttcttgtttgtcccccaagcaactgaccaaatggcatcatcatgggcttgctcttgtttgaagagaataccgtactggttggtcatttccttaaccaaggatcaaggacaaaaggccagacagctcactgcactgccaggctgcacgtcggaagccgggctccgcgcgactgcgacgcgcaaagatgagctatcgaagggccccggccgtaatggccgaattcccgggcatatgtccggtaccgtcgactg

SEQ ID NO: 130960 - DNA, 838 bp, Homo Sapiens
gcaacgttcagccccccaaggaggccagggccgttcaagggtgcccagcccaaatttggccatgttgtaccatccatagatcttggatgtaggccatcatttgaaggcagtgaccagggagtctgggagtccgggggaaaggtcaagggagcgaaaggggcatggcatggcctttccagggttatgcagaagttttcccagttgcaatatcaaaaatattgatgattccatctatggctccactggctaggtatttcccatcaggactatatgcaatactaagaatgaattttcctctcgtgtccaaagaatattcctttttcccactttccacaccaaaaatgttcactttcccgacatgagttcctgtggccagatactgggaatcaggagaaaaggccaaagtccaggcatccacaggtcctgcatctatggactttatctgtttgccattttccaagtcccaaagacgaatatgagcatcaagagagctggatgcagcaatgggcagggtgtggctgatgtccacagacaccactcccagctgatgtccctccagactccactgtaggtccagcctctcatcacgccatttccagaccttcaccaggtcatctagggagcctgtgaccactgtctcagagttttccttcttgtttgtcccccaagcaactgaccaaatggcatcatcatgggcttgctcttgtttgaagagaataccgtactggttggtcatttccttaaccaaggatcaaggacaaaaggccagacagctcactgcactgccaggctgcacgtcggaagccgggctccgcgcgactgcgacgcgcaaagatcc

SEQ ID NO: 130961 - DNA, 384 bp, Homo Sapiens
aaatgttacctcacaattgttgaacagtatctcggcttcattaagtcgtatgcaagaagactttataaatgaagcactttccattctagcccatgatgatgccatttggtcagttgcttgggggacaaacaagaaggaaaactctgagacagtggtcacaggctccctagatgacctggtgaaggtctggaaatggtgagtgcctctcccctaacatacagccttggaaaattgggggctgaggttttgcttctgaactctccagttgcagtccgggaaatacttttttctaggcaagaaagcaatagcaatatggtggtataaaacagcagcttatttttcccacttgttttcctgttactctgtattaaagccctaaagtta

SEQ ID NO: 130962 - DNA, 854 bp, Homo Sapiens
aatcattttttggttatgccaggtgtctcctgtgtgtccctccagatccctctccagccctagaaacctgagctctataaatgttgcctctctccactcatcttctctttggcttcaggttgagttcagccaacagatgcccctgtaggatttggacacagggagccaggggagaggggcatcagctgcctggttagcagggctgtgatgattcttctacctatgactctcagtgctgttgcctcttcctctggatcttggaagcttccatgctgaggtctgaaggttcccatggctgtctctttgcccaaggggcaaactttccatcagggcatcttctgtgcctctgaggatcattttccaattataggcaatggtagtacgtgtttcagtgcagaatgagatagagttgtttaatttgacaataaagcgatgcgtcaaaaacctcagtcaacacagtaagtgttttcttgttttcctgctgaccaacctaattctggtttcatacagggcagccaggtgcccacctaaaagactgcacttctcaacttccagttgtttctatggataatggttggaagcagaaattgggttggggcttccagataatcccccctcacagggactgcttcaagagaaagggatgccctttggttctttctcctttccactgcctggaatgtgatgtctgacactgtggcagccatactggcataatgaggccaactctctgccatgctaagagtggcagagctgggaattgaaaagagcctgctagccttgggttgcttccccttgatcggctcattacttggaagagaacacacccttctcttattattttctttaaggca

SEQ ID NO: 130963 - DNA, 516 bp, Homo Sapiens
  misc_feature (475)..(475): n is a, c, g, or t
tttaatcatttttggttatgccaggtgtctcctgtgtgtccctccagatccctctccagccctagaaacctgagctctataaatgttgcctctctccactcatcttctctttggcttcaggttgagttcagccaacagatgcccctgtaggatttggacacagggagccaggggagaggggcatcagctgcctggttagcagggctgtgatgattcttctacctatgactctcagtgctgttgcctcttcctctggatcttggaagcttccatgctgaggtctgaaggtggctccctgcctcccactgatgtccttagaatcccatcctcacctaatacctggtattgaacactgcctttcttagatgtcatttaggctctcgtttcaattcccagtatgcttcctgcaaagacctcgatagatggactgaggggaatagtgcaaggtcctcccatccccagtattgggatctangggcagggggtcccagctgtgcagtaggttaggactacact

SEQ ID NO: 130964 - DNA, 958 bp, Homo Sapiens
caatgcaggaagttttattagacagtgcagctctcgagttttccttctgatttccagaaaccacacaagaccagttctgtcagtaaaggcatcttgctggtgactatgatcatacattgcttttcagcagagaagtaaatggcctcttcctcctcttcatttcgataaagcgcagggcaacttgacactgagaggatatctggatcaggggaaggcaaggagtgtggtgtgtgttgcgggtggtgagggtgccgagggtgtgacgggtggggggcgtgtggagcaagctgagctcgctgaggctgaggcgaggacggcacaatgctgcggcgtgaacggcacaggctgctgcttctggctaatgatccaggaggtttagccatggtcccgggaaattgtgacactattgggggtgtgtcttcatctaagtcatcaactcctccagcaattggatagggtggaatggagactctgggcatcaccacccagctgtgatcagaataaagggaagaggtcaggctggggagtcctgagttatgggctatctgaaagccacagatcttctcaatttgttgccagcgaaaaagtcgttctcgtaaacaagttgtcaactcagagagagctttctttgcttccagaattttgtggtctacctcatctagggaggagctgtgtgcaacgtgcagagtcccaaagactgtgcttctcttctttttaattttttctgcctcatctttagcaatagctagctgcatttcagcgttttgtcttttaatattgtagtattgcacttctacttcatgtgttaactgaagccatttctgaagtgcatctggaacagaccaactgcttctcagttcaaattctttttcggcctttttcagagccatgcgaacctgttccaattcctgttctgcatactgacgtctacatcaattcacattcagctccctccccc

SEQ ID NO: 130965 - DNA, 1851 bp, Homo Sapiens
  misc_feature (436)..(448): n is a, c, g, or t
gctaggtacgaggctggggtgtgaattcggcacgaggcaagagtggggagggagtctggggtgggagggaggcatctgcatgggtcttcttttactggactgtctgatcaggtggagggaaggtgagaggtttgcatccacttcaggagccctactgaagggaacagcctgagccgaacatgttatttaacctgagtatagtatttaacgaagcctagaagcacggctgtgggtggtgatttggtcagcatatcttaggtatataataactttgaagccataacttttaactggagtggtttgatttctttttttaattttattgggagggtttggattttaactttttttaatgttgttaaatattaagtttttgtaaaaggaaaaccatctctgtgattacctctcaatctatttgtttttaaagaaatccctnnnnnnnnnnnnnttatccaattgaacgcacatagctcaatcacactggaaatgtttggtccttgcacctgagcctgttcccactcagcagtgagagttcctctttgccctgaggctcagtctctcatcgtattttgtccccacccccaattccttgagtggttttggctctagggccctttcttgcactgtccagctggttgtaccctctccaggcatttattcaacaaatgtgggtgaagtgcctgctgggtgccagggtgctgggacatacatctgtgggacaagacatgctgtgggtccctactcctggagcactgtaaaaagagctgatccaagtaagtagatgcctgttttgagaccagaaggtttcataattggttctacgacccttttgagcctagaattattgtgtcttatattagatcactgaagaaagaggaacccccacaaccccctccacaaagagaccaggggcgggtgatgagacctggggtttagaaccccaggtgagacctcaaatcactgcattcattctgagcccccttcctgtccccaggggaggtgtattgtgtatgtagccttagagcatctctgcctccaacccagcagttctctgccaaagcttgtggaggagggagagccctgtccctgccctcaggctccccagtgctcctggcccttctatttatttgactgattattgcttctttccttgcattaaaggagatcttcccctaacctttgggccaatttactggccactaatttcgtttaaataccattgtgtcattgggggggaccgtctttacccctgctggcctcccacctatccgccctgcagcagaaccttggcggtttataggtaatgatggaacttagactcctcttcccggagtcccaagtagccctctgggatcttgcaacacacgtcgacttcccagccactaggccacctccccagttggcccttctgcccttaccccacacacagtccaactcttccacctctggggaagatggagcaggtctttgggaagctcccacacccacctctgccactcttaacactaagtgagagttggggagaaactgaagccgtgtttttggccccccgaggctaaccctgatccatagtgctacctgcacctctggattctggattcacagaccaagtccaagcccgttcttacgtcgccataaaggcccccgaacggcattctcggtacttctgtttgtttttgtacattttattagaaaggactgtaaaatagccacttagacactttacctcttcagtatgcaaatgtaaataaattgtaatataggaaatcttttgttttaatataagaatgagcctgtccaatttctgctgtacattattaaaagttttattcacagaaattggacaggctc

SEQ ID NO: 130966 - DNA, 918 bp, Homo Sapiens
ataagttgtgttatgactggatatgtgtgtatagccaataaaatgcaataagagtattagaacttctgatttctacacagcaattatttttatgtaacaactctaaaaagttcttgacaagttattatgagaaacatttcatctaggagtgatttctaaggcagcatttgagtttccataaaaacagaaccttctgtctcagaaggtatatcaataagaggaccagaatcttctatttccaagtgcattggtttctcctgttcacaactcaggtttgaactgtcgttcatttgaatctcttcctcttccaattccaaagatttatctggggctgaagctaccacttcttcgtcttcattttcatgtagaaagttacaaatcatgttgggtcgataggagaaatcattatcctttatttgcagccattccaccccacctatgttttcttctccttccttcttctctgtcaggagagttcttgtcatgctgagcttcttcattgtatggcatttatattttagcactgttttattattgccttctgtatcagcatgttcaacattttcttcaaatataacacaggtccctagagtgtcttcatactccccagcaaagacacagctgtccacttgcagaatgggcctctcagtgtcaatgcccaaaaccttgcatttattttcacattttgagaggaagtctgaatcaataattcctgataattccaccagaaccaactgctcctcctcttcctcgtcttctccgtcctctggactccgctcgtccgccgccgccgccatggtcccgcggcgcctcgccttctagtcactggccacgcccgcccggagccgccatcttgagtacgggcttcagctccgaggcgaagcaggttattgggttcctgccgctccgctcctcccc

SEQ ID NO: 130967 - DNA, 1399 bp, Homo Sapiens
  misc_feature (45)..(45): n is a, c, g, or t
gaagaagttagaagttaatgaaagcaaactcagttaccaattttntggaaaatatccatgtggtaatggtagactttttaggtggcaatttctaggtctgaaatatagcagaggaaagggcgctgaggcagttgcaggcaggcagccctgtacttaccctgtactcacctcatccgacagacgctgtggatgaggaggggcttggcggaggcgtgagcaccgatgtccctttgataacctgcactcaccaagatgaactatttgccgccctgtcttttcctgggttggggggtggcatctgatggtggcagagtgcctgttggttcgcccgtgggtctcatggttcagacagagggaggtggacggcagggatcagggagccaggagcgcgcctcagacttgcagcaaccattgtgatttgggttgttcggaatatttaaattactgatcagaagatgaaagtagcttttctcttgggaagtcttgcagcccgtgggagtgataccaggagcaacacagagctcagcagcggcgccaaggtgttccctgtttcctcagcacgtgagccttcaccgcctgcttcattcaggagccagtgcagcagtaatacagtctatacattgttctgttttcaaatttatcctgaggctttgttgagcataaatgattatacgataaaggtatccgttattttggaactcatttcagttgggatctcctgtatgcagagtgtgcatttagaggtttgagtcccatcctggtttcttgccgtgctgactgtagccttcaccttgacttgaatgaaggtctgtggttggaatgtgtgaggagccgctgaggtgttcaggaggtgctgcctggaggtcggtttcttcctgggtgttacgggcaactgctcacaccagttgtttctctgtgaacatttccagtgtttaatccaaaatgaaaacccaccaatgcttttgctaacttcagtgccttttataaatcatttttaaatttcctgaacttgctttttgaggatatacagggatattaagtagacgcaggattgtttttgtttgtaaaaattctgaattgaaactttgttttaaaaaaaggcttctttctttcatatgacaagagataggtcaggaatattggaatcaagatttaaatgttaaaattcgattttgttacacagggtgtgttcatttgttttgtagcagacaagatctagatcccagacagaaacaacacatgctattctaaaaagccgcattttaaaaggcaccttggttctcaaaagaaatcagaatatggatattcgtagtgatgatctgttttctctaaaatcttaccatattgtctgtatatggttgtaaattcaaatggaaagtaaaacgttttggccctgaaa

SEQ ID NO: 130968 - DNA, 1196 bp, Homo Sapiens
  misc_feature (371)..(462): n is a, c, g, or t
tgctaccccgctgctccttgtgttgtgtgttctctactccttggtgtgggtttgttcatctgcttgctgtactactccttgtctgtgggtgcccttgccagtgtatagtttgttttgcttgctggatctctgtggtgctcttgtgtgtctctctctatgtcggtcggctccgtgtttgtgtcttctttattctcttccccgttggtcgtctggttgcagcacgtgtggttcagtgtggtcggtcgcttactttcctgggtggtgctgtgttttcttgtcttggctcggtctgtggcgtgtattgctgggttgtgtgtgttggcgccgcgtgagtgcggtctttgtgttgtatttggacgcgcctctcgccnnnnnnnnnnnnnnnnnnnnnnnnnnnnnnnnnnnnnnnnnnnnnnnnnnnnnnnnnnnnnnnnnnnnnnnnnnnnnnnnnnnnnnnnnnnncttgagccaaacagattggtcattattgtacacatagctggaagggaggggtggtcccggggtaaggacagggctgcccaatatttggggggaggaagggactcttcttccaaatgggcttgtccgggaaccggggtcccggggagctgggcgcctggtccacatggaccccctccacctccccacatacgctgtggaagaagggcaggagtgagaaatgctgggggaggacgaccctttggtctgagatgtggaggtgatcataacagttcccgcccgctggctgttttgttgactttggagaggccttcccggaacccagagtccgtcattacttgctccatctgaacatcctcctcgtcctcctggggcagctgcaggtacgggttgttccctgtgggctggaacttgtagcccgtgagcacgaagaaggccagggtggagccctccaccaagagctggtacagccactgccactgaaagggcacagccacctgcagcaggatggcgatgatgcgggtgaagtagacgtagcagatgaccatgacatagtaatgccggaacagcttcagcttggccaggttcactgccaccttcccgtctgtgccagacgcatcctggagatgccggatggaccagactacggggaacaggatggcaccacagcagatgaggtccaccaggaacaaatctccttccacagcacgtagtcgctggcgcttcctcgcgggact

SEQ ID NO: 130969 - DNA, 973 bp, Homo Sapiens
  misc_feature (303)..(334): n is a, c, g, or t
  misc_feature (910)..(910): n is a, c, g, or t
gtgggtgtgaacacgcatttatttacacattgtcatcggtaggcacatacccagcccagcccgttgaagggacagatctcaggctgtcacccatggaacctgcagacccttccctcctccagaacccttgaaggcgaagccctgagagaaccaggaattttaggcttctgttcaagagctaagaactaaattttatgccttcatctgatttctttccaaaaagtccatttcattaagtattcagacttcttagctccatcccattcatactttttgctctcctactacccacccaagattgtnnnnnnnnnnnnnnnnnnnnnnnnnnnnnnnnctgcgataatattaatacttcacatttgtacgaagcttacagaatgttttcacatatagcatctcatctgagcctcccaacagttccgtgaggtaggtattctcacctccctttttacagacagggtaaccgaggctcagagaggtaacgggatttactcaaggccacacagctagttagtggtaaagctaggaatcgatcccagcaccccatatccaagtccagtgtttcaacaccacagctacctctgtaaagtggagcgacatttcttaccccagtcaggcctaaatggtggcctgaggagccaagaggctgacttctcagattaggggagggaagggctcagcagcgtcggggagagttggggtacttggccttcaactcctgtttgaactggcgatataggatcttattgtgctgattttcagcctccttttggggatggaacttcaacgcttttttgaagcccttatgaaccgagaaagcttcgttcaggagctcaaagtcaaaccccgccacatgcagctcgcaggcctggctggatcggttgaagccgtactgccgaaagcccttgtngaagggggcaccttgcctcctgcccgtaaaatggctcccagggtcctgccaaggaaccacgta

SEQ ID NO: 130970 - DNA, 2058 bp, Homo Sapiens
  misc_feature (385)..(541): n is a, c, g, or t
gtgggtgtgaacacgcatttatttacacattgtcatcggtaggcacatacccagcccagcccgttgaagggacagatctcaggctgtcacccatggaacctgcagacccttccctcctccagaacccttgaaggcgaagccttgaagagaaccaggaattttaggcttctgttcaagagctaagaactaaattttatgccttcatctgatttctttccaaaaagtccatttccataaagtattcagacttcttagctccatcccattcatactttttgctctcctactacccacccaagattgttaataataacaattatgataacaacaataatactgcgataatattaatacttcacatttgtacgaagcttacagaatgttnnnnnnnnnnnnnnnnnnnnnnnnnnnnnnnnnnnnnnnnnnnnnnnnnnnnnnnnnnnnnnnnnnnnnnnnnnnnnnnnnnnnnnnnnnnnnnnnnnnnnnnnnnnnnnnnnnnnnnnnnnnnnnnnnnnnnnnnnnnnnnnnnnnnnnnnnnnnncaccccatatccaagtccagtgtttcaacaccacagctacctctgtaaagtggagcgacatttcttaccccagtcaggcctaaatggtggcctgaggagccaagaggctgacttctcagattaggggagggaagggctcagcagcgtcggggagagttggggtacttggccttcaactcctgtttgaactggcgatataggatcttattgtgctgattttcagcctccttttggggatggaacttcaacgcttctttgaagcccttatgaaccaagaaaccttcgttcaggacctcaaaatcaaaccccgccacatgcagctcgcaggcctggctgattcggttgaagccgtactgccgaaagcgctcgtcgaaggtgggcaccttgcctcctgccacgtagaatggctcccaggggtcctgccaaggtaccacgtaggcgggccgcagcaagctctcttccggcaggttgacccagcgggaatagttggtgggtgcctggcagggggtgcacaacccataatagaagggccgcacctcgccaacctggtagagctgcaccagctcgtttttgttcatgggcatgcggcgggctcttcggatttcgaaggcaggcaccaccagcgcggtgcctccccactggttgctctgatccagcatttcccgcaggcctctccacagcccctcgctgggcaccatgtccacatcgatcaccagggcatagttggcccccctcacgagccagattcctcagcaggttattggggtaggagacattggtgcccagcgcataattaatcccgggctgggccacctggctagcttgtcaaagacctcctggcaggaccgcagcagggcaaactcccccggctcccgggggtcgggcacggctgcctcgtaacgcgaggggcacacgaggtgcatggcgaccctggcgcgcatgtcggggcagtggctgctcagcgcgtaggccagcaccgtggccagctgcgcctcctccttggtggccgcgaacaccgacacggacagcgggccctcccagcgctccagcagacccgacaggtgcagcaggttgtccacgctggcgtgcgtggccaggatcacatcgttggggtccatggtggtcttcagcaggcccctgtagacgcggtaatcgccgctagcgtccaggacgcctccagaggccagcgcggtgcggagctgcgccttgacctggtccacggaccgtggggacgggggaaagaactcaaaatattggtcttgctcctcctgcccgtgcagtccggacagcagcgacaggtagagcagctgcagcatcgccaccagcatgagcgcggccagcagcagctggtagaaggcgcaccggatggcgtaggacatctgcatggctctcggggctcggggcgcgcagcaacgaccacccggccacagactacgccagcggccgcatcccgggaattccggaccggtgccgggttttacatacaggtgggactgtagattatagctaaagcattg

SEQ ID NO: 130971 - DNA, 502 bp, Homo Sapiens
  misc_feature (308)..(350): n is a, c, g, or t
  misc_feature (479)..(479): n is a, c, g, or t
tttttttgggtgtgaacacgcatttatttacacattgtcatcggtaggcacatacccagcccagcccgttgaagggacagatctcaggctgtcacccatggaacctgcagacccttccctcctccagaacccttgaaggcgaagccctgagagaaccaggaattttaggcttctgttcaagagctaagaactaaattttatgccttcatctgatttctttccaaaaagtccatttcattaagtattcagacttcttagctccatcccattcatactttttgctctcctactacccacccaagattgtnnnnnnnnnnnnnnnnnnnnnnnnnnnnnnnnnnnnnnnnnnnttaatacttcacatttgtacgaagcttacagaatgttttcacatatagcatctcatctgagcctcccaacagttccgtgaggtaggtattctcacctccctttttacagacagggtaaccgaggctcanagaggtaacgggatttactcaag

SEQ ID NO: 130972 - DNA, 1073 bp, Homo Sapiens
  misc_feature (60)..(81): n is a, c, g, or t
  misc_feature (778)..(778): n is a, c, g, or t
  misc_feature (821)..(823): n is a, c, g, or t
  misc_feature (835)..(835): n is a, c, g, or t
  misc_feature (867)..(867): n is a, c, g, or t
  misc_feature (869)..(869): n is a, c, g, or t
  misc_feature (910)..(910): n is a, c, g, or t
  misc_feature (943)..(943): n is a, c, g, or t
  misc_feature (950)..(950): n is a, c, g, or t
  misc_feature (1035)..(1035): n is a, c, g, or t
  misc_feature (1048)..(1048): n is a, c, g, or t
  misc_feature (1056)..(1056): n is a, c, g, or t
gtgccaagctaaaattaaccctcaactaaagggaataagcttgcggccgcctgctcaggnnnnnnnnnnnnnnnnnnnnnngctcttaaccacgtttattgagaggggccgggggaaggggatggacggtcctccccgcggcggggttttcagccctcgcgggtgggcagcgtcttgtcctcaggtgtagatgctccagtctcggctcagccaaacactgtcagggcccccagcagggccttcagggccttcacggcccccacggcctggggacccagctcagccacacacttctgggagccctctatgaggtggttcacggggatgcccaggctgctcagcaggagcttcagcgggttgagggtgccgagggggttggccagggtcccggccccggcctccgccgccgactccagcgcagcgacaggctgggccacaggcttggccgagcccactaagaaagcagcagctgcaagcgaacagggaggggtcaccgcctgcgcgccggggtccccagaaggcaggtccaggacgcgcccccgcgggaggcgcccaggaaccgtcgcgccctgcccggctccccgaccgcccctccctcctgcgccgaggcctgccaggtgcgagcccccgggacacaggcgggtctggggaggcggccccgccaggagacgctgcagggtcaccggagtggcctgagggtggcggaaggaccggtgaactctgtgcagggtccgggacaggcccccaagggaggggacactcgcgctgcgccttgcangatgaggagccggtctccagacggggggcagacgggtgtcccnnnaggcagggcggnctccatcccggcacgaggctggagacagcctnanagggggaggcgcgggctgcaggcgcggggcccggggtggcngagcctctgggcgcgggcgagctggaggactgngatcacnatcggcgcagcacgcggggcgcacggcgccgagctcagcccacgtgcggcaggagccgggcgtcacgagtgcagacaggcagcanagcccagaggcgnactcatgncggggctcggcccggga

SEQ ID NO: 130973 - DNA, 1277 bp, Homo Sapiens
ggttcgttccgcttggttgcccccgctgctgcttcttgtgtctctctctgtgctcgcccgttgtgccgctgggctgctggtccttgctcgcgtgccgctccgctcgtgcctgctttgttggtgtcctgtgtgtctttgccctgctcgtctcctccgccttgcggctgttgtggcgcctctccttgtccttctgtggctggcttctggtgtcctctggtgcgctcgtgtccgcgtcccgtggtctctggttgcgcgcgtcgtgtgggtgcgtgtggcgctgggccctctctggcggctgtggtggtggctgtctgtggccgtgtggctgcgggctgtgcttgggttggccgcgggcgtggcggtgcggcgtggttgtgtttgtggttgtgatgtggcttggtgtgggttgtgttttttttgctcttaaccacgtttattgagaggggccgggggaaggggatggacggtcctccccgcggcggggttttcagccctcgcgggtgggcagcgtcttgtcctcaggtgtagatgctccagtctcggctcagccaaacactgtcagggcccccagcagggccttcagggccttcacggcccccacggcctggggacccagctcagccacacacttctgggagccctctatgaggtggttcacggggatgcccaggctgctcagcaggagcttcagcgggttgagggtgccgagggggttggccagggtcccggccccggcctccgccgccgactccagcgcagcgacaggctgggccacaggcttggccgagcccactaagattgcagcaggggagctgcgggacagggccacgacagggccccccgcggcggggttttcagcgctcgcgggtgggcagcgtcttgtcctcaggtgtagatgctccagtctcggctcagccaaacactgtcagggcccccagcagggccttcagggccttcacggcccccacggcctggggacccagctcagccacacacttctgggagccctctatgaggtggttcacggggatgcccaggctgctcagcaggagcttcagcgggttgagggtgccgagggggttggccagggtcccggccccggcctccgccgccgactccagcgcagcgacaggctgggccacaggcttggccgagcccactaagaaagcagcagcggagctgcaggacagggccacgcagagccccaggagggcggcgagcttcatggcgcgggggctcggggcgcgcgatcccgggaattccggaccggtaccagc

SEQ ID NO: 130974 - DNA, 1248 bp, Homo Sapiens
tttttttaaggaatatggttgcagcaaaacagaaaggatcccaaagtggttaggggccttgtctaatgcacttctgaaagtccattataaagatgaatagaaaagcaaatggtaggttttcagtcgacccagaaaccacacatagctataagaaacataattgtgcatagttatttattcattcagaatgtgatatgttggctagctctacattcccagtctaccaaagaacagggctgtctactttgctaaacccagggtcctttcgaagctcccagtaggtgtcgttagaaacccaggcttctctttgattggcatcaataacttttttaaaaaattttggtatatgttcaagattgttttcttccatatatcgtctccgagatctctggagttcctctactctttgcttctctgatgctgcagcttctaaatttccttcttccaaaaatctttgatctggccggaaccgggcgtctgttggtggaaggagatcttttagtactggatctaactcattgagctcaatagcaaaccttgtgaagccatagtacagctcatagtttgttggcatggaacctggtctccaaatgcactttgcagagggggccacaccacagtagagtccttcatgccactttccaaacagccggtacaccgccttcccctcctgatctatcaccaccccctggacttcattcatgttagaattccaataattcaccttgacaaatgtgagtttgcaaatgcaaacactgcttttggtatttctgatggttacttctccataatgttctatccatcttctcccactgaggatgttgtgtatgcaagtggtgactttattccacacatagtaatctccatactttggaagcatgacattcagtgttccaacaggcaggatttccatcgacttcccccagaacttgtttttccatgatatcttgccaaaacacaaaattctttgattcacagtgacaggcagaaatgggtggatgatggctaacctgttctgagaaaaagcggaatcccttgtcttctctaatgcattcataagtctccccaaggactgggttgaatggcttacttcctgctctgaaataggtggagcagtatcctgaaactgcaaatgcggcaacgagaaccatgcgctcatatggatcatcagtttccgaagccttgtccaggagctcgctgtattccatcctcggccgaattcaacacccagcctcgtacctagcctaa

SEQ ID NO: 130975 - DNA, 2225 bp, Homo Sapiens
  misc_feature (126)..(126): n is a, c, g, or t
  misc_feature (390)..(399): n is a, c, g, or t
  misc_feature (543)..(630): n is a, c, g, or t
cccgtcgcgctatgtgagatgtgttatgttacacccgattcgacatgactaggagagggcctcaagtcgcgggccccgtaggagttcctttgtgtacagcgtgagctgtcccttcgccgtcgcgtnaggtagagcccgtcggtggtgtggcctccgtttttgagtttatgagttgacataggcttgttcgcccgcgtttattttgaggagcagaggttttatgttggtcccgtgcccccgcgtttttgtcctttcgtggtctggccagcttggaagcctccgggggtggcccggttttcggtgttccttttttccgagtgtgtgaacgggccaaaggttttgggccgccccctaattaagtgaagtttggtttttacccttgtcttgagnnnnnnnnnnatatggatagggaggtttatagtaggtttttctgtgggggcctgggagggccgccccctctctctctgtgggtggggtggatttgaaaatgtggctggtgtgggtgggggtagtttgtgctgtgtttgagtgtatgtatgttgnnnnnnnnnnnnnnnnnnnnnnnnnnnnnnnnnnnnnnnnnnnnnnnnnnnnnnnnnnnnnnnnnnnnnnnnnnnnnnnnnnnnnnnnggctggaattatgatgtgccattcaacctttaattacataagctgttttcaaaaatcacattcagcgtggagattttccagagatgctggagttggcagatggccaccacgtagctctccactttccacaaatggcctctgccagcttgggaagaacctccatgacctgtgtcctgagaagtcagagagcaagggccccacggccatggcagggtggagccgtgtagagggtggccaggtggccagctcgcggattccatccagagaggagactcaaggatcatgctaagtagggaacggggttcccacacgtcctcaggcattcaactcctgggccagggtccgtaacaaagggagacttcagccctcaaagcctctcactcctcaggtctgggcaggaggtccttctgccaagcagctcctcctgcccttcgcctgctttctgccaggagagacctctgtgtagagctggctatgaggtacctgcaccatttaacctattctcatttccatgtccccatccatgaatcatctgtgtgtgcccctatttccacatcatccccagggcttcaggtgggcaaggggctcagagtttacaggtagcctgagccactttggagctagtttttctgttcagggcttgacagataaagtttccagcttccagaagcttctggagattcacacccgtgtgaatgcccaagccctctagcatgtagaccaggtcttctgtggccaagtttcctgatgccccctgtgcgtagggacagcctccaagtcctgccacagaagagtccacgacactcactcccatctgcagggccatcaaggtgttggccagggcttgaccataggtgtcatggcagtggacagccagggcagccagaggcacttcctgcatgacagcagacagcatgtctttcatgatccctggggtgcccacaccaatggtgtcccccagggagatctcgtagcagcccattgagtagaacttcttggtgacctcagctactttagctggggagatcttcccttcataagggcagccaagagcacaggagacgtacccccgcacagaaatattggctgactgcgctgccttcaggattgcgtcaaacctctgaaaactctcctctatggaacaattgatgttcttcttggtgaagagctctgaggcagctccaaagatgactacttccttggctccagcagcaaccgctgcctcgaagcctttcaaatttggggtcaggactgggtagttgatgccaggaaacttctgaatgcccttcaagacttcagtgtggtcacccatctggggaacccacttaggagacacaaagctggtggtttctataacagagagtcctgcttcagaaagcatgtctatcagcttgattttcactggagtagatacgatattcttttcattttgtagtccatctcggggaccaacttccacaattttcacccgctttggtaaagtgcccatagatgaggtgctgacagcccggagggacgccaagcccaccagtcgccgcggaagcgccttcctcattgctgccatcttggcccagaatcccccgcggcagtccccc

SEQ ID NO: 130976 - DNA, 906 bp, Homo Sapiens
  misc_feature (125)..(134): n is a, c, g, or t
agagaaatttctccccccccttttaaaaatttttcttgcccaatagaacccaattctttgtggtttaaagccctcttcaaaaggtttccgccattagaagtgtaattttacccccctttcctttnnnnnnnnnnttggcccatttttaccttcgaaaaattttctagggagggcctctaaaattttccccctcattaaagccccttgcaagtttcctggaaatgtatggcccaattttctttcttcaggggtagaaaaccgaggttactgtgtaaagtccttaaccaccctaccttaaaccaggggttcccaaaggttcggtaggtttcacataggcaattcaggaaattcatagtgattttttccataggaagtttccctggtctgtgaagtagttcaggcacctgtttatttgtacccagataaaactattaatttttaagtatattttaattacttatgcagagaaaactggaatattacacatttgggtcaatatgaatatctgacatacaccttaatgtgtacagtaattgtcccaaaagaatcacagttatgccaaataaaaaaacaatataatcaagtttattcctttaaaacaatgaagtgatttacataaagtagcttgatcgaagagtttcagtggaatcgtagcaaaacaattatagagctggcacagagaccaaaccccttctttgcaaaactaaaatacgcatcgtgttatctctgggtcgtataccaaaggccttagtaagatattacagaccacactagcactacctaaggaccgggattatgtctcttgtttggggataccatatacccagtgccttgtgcggtgactggcatctggtaggcactcaataaatatttgctgaataaatgagttctgcaaaacaggtttat

SEQ ID NO: 130977 - DNA, 966 bp, Homo Sapiens
  misc_feature (850)..(884): n is a, c, g, or t
  misc_feature (887)..(925): n is a, c, g, or t
ctattaccttttttattttccagggaaaaagaaacttgggaaggctattttacacaattaattacacattgacaccacagttctgtttggataaattggatactgtatcctggagtttagacagggaaaagtgatcccaatgttttactttcaggtgtaagatttaaaacaagaatttggaccaaaatgttcatcactgcagttactttctgctttccatttttaagcatgttatcttcatgtagtccacctgaacatcaacagttcagcctctacagagtttctgtaatatactgccttttagtgcttggagtttgtaaattgtcttccctttcttctttaggaattgttccccaagatttcatcaagattgatgtctttcatccagtcatcattaccaggctctgtcttcaataaagaatcaatgaaatcagcatcactgtttagggcagggcccatgttatcattttgttggctgaggaagtcaaaagctaagtcactgctgtggtcagttccttgaaaagccctggaactttggttgggtgaaggaaaattgctgggcgtcagggatggtggctggttgatgcccgtcctcgactgattcaaccctgttcctgactgattcaaattaggcaaaatctgtgtgcttagctgattgggtctgagattcagacccctgaggggacccatggtttgcccatttagtgtttggctcatttggttcatgggtctcatttgcactgctggtgttaactggttaggaggagccactgccctctgggaaaattgctggctacctcccggccgtaatggccgaattcccgggcatatgtccggtaccgtcgactgnnnnnnnnnnnnnnnnnnnnnnnnnnnnnnnnnnncgnnnnnnnnnnnnnnnnnnnnnnnnnnnnnnnnnnnnnnntgcagacgagctagcgcctatagtgagtctatacatccttt

SEQ ID NO: 130978 - DNA, 702 bp, Homo Sapiens
  misc_feature (642)..(642): n is a, c, g, or t
gctgatcaaattcatttaatctttgttaaaagcatcacaaatgattcatcgatttttaaaaaggaaaaataagaaggaatgcattgtctctttgttatgtgcatggcagctgatggcctcgttcccaggcgcccaggtctacctgaacatcagatatgcagaccctcgaatttacaaccagggacagccacgggcccacgcctggatctccatgggtgcacagacgggaacgtatcaggctgtctcagatgccacctccttcccaggtgcttgggtccacatgcccaacatgttcttaatagaaatattaacataaaatacaggaaacccacagataactaaggggaaaaacccaacccaaacagcagatagaattaaatggagtggtcaaggaaggccaacgacctagagtggctaccgcaggcactgtgagctaagggggagggcagttcccagggttccatgttgcccgtgggccccgggcctgcactgtgctcgccatgtctgtccctgtgtgcctgacgcttgcaggcggcctgctggccagggacaggtgtgggtggggtggccagcaggacaaaaatccctgcaaaggtgtccttgcagactgcaagcaggggaatgggggctgtggcaaggtcncagagagtcatggccccacgtcctggatcccatctccaggatgaccttgaggacacttgt

SEQ ID NO: 130979 - DNA, 583 bp, Homo Sapiens
  misc_feature (78)..(96): n is a, c, g, or t
gttattttctacataggcaaagagaattcgagggatagacagtctccaagaaaagtgaagtggtgggagagaattgcnnnnnnnnnnnnnnnnnnnctctagtttttctttctggctgagatttccgtgcaagacagcacccaatagactatttagagttgacatttgacattttaatgggcgccatggctcattttgtagattgagaaggtgcgtctcccctgctccaagtctcatcatgacagcgtgctgacagctgggagtctgtggccttcctcacgcagaggccttaaagctggacacagaagcacgcctaggctgggcagggatgggacccatgccccctccttagaggacgggcttcctggttaggaaaggacacgtgggggtgccttgcataatagttcactggtcaccgtgcttttatgagtagtgtttttgtgcacttgccaggggttttctctctgtgtgcgaggggagtgatttaagcaatggtgtctggagtaagccttacaattttaatagactttttcttatcatatccctcatttctttccctgaaataaaaatacacacaagcaaa

SEQ ID NO: 130980 - DNA, 1020 bp, Homo Sapiens
  misc_feature (765)..(765): n is a, c, g, or t
  misc_feature (814)..(814): n is a, c, g, or t
  misc_feature (825)..(825): n is a, c, g, or t
  misc_feature (873)..(873): n is a, c, g, or t
  misc_feature (920)..(920): n is a, c, g, or t
  misc_feature (922)..(922): n is a, c, g, or t
  misc_feature (931)..(931): n is a, c, g, or t
  misc_feature (952)..(952): n is a, c, g, or t
  misc_feature (976)..(976): n is a, c, g, or t
gactttttgtctttaaattttaatataatctgttttttttaaccagcccatagacttaatatataagcatatacaagaaaaagtctctccccactctgtacaaaagttgctgtctttgtgtgcattctattgcattttataagtttttttgggggaggggagtcatatttgagtttcctgtaccttgtccttggtatgggtctgaattatataaggttcagagatagtggtgactgtggggtgcagagagttccccaggctgttttctgtccagtgggccccatgtgctggtttgtaggtgttgtagttaatatggtcatgaattgtgggcagcactactgccccctcacctgatacaccggacggagctgctgttgctgctgcggatgttgctgctgggatgtcttcgtccacctggattatctcaacagtccgggcggctgtgactgtactccgctgctggtgccgcttacgaagtttatagaagacaatcaacatggcggcagctagcagagtcactgccacaaagcagccaatgatgatcttgggtggtcttcatgacttcatccaggctggtctgcatcttgtcagtggtgtctgtcgcgggtactgccacctgcttgggcacacgggtagtctgaatgagcaccgtggtagaggtggtatatgccggctggtaccagtggacgtggtaggaacaggcttgtactttcgcgttgtgtcctcaggcgagatctccgtggtctccactgttactgtggtganagagctgtagttggaggtgttaagctcaagcgtgctcacattgaggtangcgaggcgttngagtttgctgcacattggtcacatgcatgtgtaaccccagtgtctganagcagcacgtgctcgtgccgaattctgggctcgagggcaattcctanantgagtcgtnataaatcgtatcatgtcaaanctgttcctgggtggaattgtatcngctcacattcaaacaacatagagcgggagataagtggtaagctg

SEQ ID NO: 130981 - DNA, 2140 bp, Homo Sapiens
ccagggaaacggggactttagggagggtgaattcatttacatgtaacttctgacatttcactttgggcaaataaaaaacatgaggatacctgtgctgcccaggggactgtttgtacacacacccatttcaccaggcgcagtgcaaactgtctcatgcccatgtgggcgctgggatgcttcctgtacaaatgtctcatgccttcagttacacataggtgttcctgtttacagttcctggaggtcaaaagcacaggcacgaaaaaagcaggcccgttcttccgtggcccacttcttcctttgaacaaaggctccttggacccagtggcggaaaactggccctcccacaccccctgcctgttctgggggcagcagtctttggaggagtaatgccaggcagcccctcactgagggccccagtctcccctgcattttttccctgattgattgataggaggtggctgggctgccactgaatttgtcaacttagactcattgacaacacattaaggggctgtaattatatttattagattaacaaggcagatgtgaattttctcttctataatccagtaagtctgtgtattcgttgactcagacagacaagaagccacaaggaaacaaagaagtaatcatttgttgagagacgttattaactatgatcttccctgaagctaccgggatgggaaaggtcagtgtcttcctttgaaccctgagacaattaggggctcttgaggcctgctgtgcccctgctgccaaggcagcctcaagttcaaggagcagctaatcacccactcctgcattcagtctgtcttgcctgatgagggctacgcaggctgcctcccattggtgtgcactgtttcctttttcagctgctaaatggctgaacaccatcggcctggggtatccctttttggggaatacgtctgtctgtctgaactcctttcccttcaaatggcactgtgataaaatctggtcataccatgctccagcactggaagtacatgaaagcacgcagtctgtgagtgcccatgaggactctcgtgctgggcccccgtggccctggctagctgtcgtaccagtcgaggaagagcaaggagaaggagcacatcacgaggaagaagaggatccacacgcggaagccagcgttgtttttaatggcctctcttatgtcttcgttgccttccttgatattttcagttgcccccacaactaactggtgaatgctgtcaatctcagcttcctgttgcaaaaccttttccgtgaatatctcttggagtctggaaatctcaaccactctcccttcgatttgcctcacttcatcaaacaagctgttcatttcaccaattagtcgctgattttcctgttcaaacatttgtatttcttctggggataactcatcttcgcctttgccatctccccacgttcccaattcaggttgtgtttcagccaaaattttttctggacgttcttcagtggcagggttttcttcagagtcttttgaaggactctgtgaaactttctcagaagatgtggattctcttgtctttgtatttggttctggttccagcttagataatcttttcttatccaccactcttttaactcggatggctctctgttctgagtaaagtttacatactcttttcaagtaatcttcaatgaaatccaaaacagcggtcctgtgctccttcacttgctgggaatgtatctccttgtgagcttctgttcgtagttgctgaattgcttctgaacaggtcctcatgaatatctgggcatcctggtctatctggtctcgttctgtgtctgtcatcctcccatattcagacatggtatggctataagcattaatataatctttcctgtgttccagaagaaaatctctcagtttgccaatgtgagaaatcacttcgcgggcccggctggagaagtcgcccttgggccgggggctccggcggaacagctcgtcccggctgccatcgaccccgccgcccaccgccactcccagcgccttgttccgcgtcttcacggtcttgacgctggcccggaatagcagcgtgatgtccaccgccatagcgacccgcaccctcagccccacactaggcccggcccacgtaagcagccggcgaccgcggcgcgaacc

SEQ ID NO: 130982 - DNA, 1175 bp, Homo Sapiens
aaaaacttttcattgtaaataactttcatgaaaaaggttaaattgccccacggggcaggagggtggatgtgggacgcagcccagggagtccgggtggagcaaggcacgccccacgcccccgaggagtgcaggcaggggcgtggggtaccccgcttcttggtcccagtagttccagcaagctcggcatccctcccagttaagcctcagctacagctacactcactacattagtctgtctgtcctgccccatacagcttggctgccccggcccccaaaccaccaaacccaaacttccagctgctctcagcctcaagtcgggcttaaagattagggatttacgtcccctccccgccccctagggatggggccaggcaaagaccccagaggccttagagaggatctccttgccccaccctgtgccaccacctcattttggtctcctctctctgccccctcccccagtccatcttctgccctgctccgccccatccacagcctgccccggccccagggaggctctgccaggagaagcctccagggggttaatttgctgtcatctaattagcatttgttgtacctggggactctctctggatagagacctggggaagcaggggggaagcggaggtgctctgggagggcccagttctgttcctccccagcctgacccgggctcctccaggcctcggctctcatggtgcagggtcctttagccggtttctggggctgggaagacgcggagcaatgaaacactgtgtgtacaatgtggggctggggagaggaggcagcgattctggtcctgggccctcgttttcagcctcctgggcttgaatctgatggcagctggggctggtggccatgtggcctctggggcaagccttggagcctggcccagcccctgcctaggtggtggggtgtctgtggacctgtgttggggggcagttctggaccctgacttgggcactgtccagaggtggggcagggcctggcctcttacaagaaggcccccacgctggcccagtcctgcaggtcggaggccagggtggcatccccagcctcaaagaggggctccgggggcaggcagccactgccgctctcgtcccaggggtgctgcaggaaggatgtggccaggaaggtctcatcgaagtccaggctgtcggcagcctgctccaccg

SEQ ID NO: 130983 - DNA, 1046 bp, Homo Sapiens
cattgtaaataactttcatgaaaaaggttaaattgccccacggggcaggagggtggatgtggacctgtgttggggggcagttctggaccctgacttgggcactgtccagaggtggggcagggcctggcctcttacaagaaggcccccacgctggcccagtcctgcaggtcggaggccagggtggcatccccagcctcaaagaggggctccgggggcaggcagccactgccgctctcgtcccaggggtgctgcaggaaggatgtggccaggaaggtcctcatcgaagtccaaggctgtcggcagcctgctccaccgaaggcccccaggtggcagggcagtcgatgtggcggccgtggatggtgaggtccacgtccacgtgtgaggcggggctcagaggcgggctcagctccagggcctccagtgcacccagctccccgcccagagtgccggcgtcgaagatggcctcccagtcaaagttgcctttgaggggttccagctcaccctgctcctccggggtgggcagcagggtgctggggggccgcgggaccttggccacccgcttgggcagcggttgtttgcgcttatgccccagctttcctttgcctgcacctcatcccgcctccctggtggcctcctcgaactcccgcagcagctgttgggcctcggtattcaccgtcagcggcccggcccgggggacagcgctgggctcttgcgcggcctggcgggcaaaggctgggtggatgtgtacagggggcagtcgccgcttctctgaaagcgccgctcagtagccgctccgcgtactgggggtcaatgcgccagaagccccccttgcctggttcgtcgttctcccgaggcactttgatgaagcacttgttcagagacaggttgtggcggattgaattctgccaggtgggatctgtgtggcggaagtagcagaagttgtccgtgatccacttgtagatggccggcagggtgatcttggtggccttgctggcctgcatggccatgcagatgagcgcatcccgaaattccggaccgtagccatc

SEQ ID NO: 130984 - DNA, 870 bp, Homo Sapiens
  misc_feature (148)..(264): n is a, c, g, or t
  misc_feature (842)..(842): n is a, c, g, or t
ggtggggatttccaaccccttttgtctgggcccgggttttcctttgggaacaccgtattggccccgttccctttcccctagggggggcccccggcccaaacaaaggttttaaaaagttttttaaggggccagggcgccccccaaaggnnnnnnnnnnnnnnnnnnnnnnnnnnnnnnnnnnnnnnnnnnnnnnnnnnnnnnnnnnnnnnnnnnnnnnnnnnnnnnnnnnnnnnnnnnnnnnnnnnnnnnnnnnnnnnnnnnnnncgctgggcccggcgtggtctccgggcgggtttaattgagtcccggggcgcaggaagcgccgcccgccgcccgcggggccggggttcaggggcgggaaagcggggccaaggcgggctttgaggcctgcccctcgggcgggagtgagggagttggtccgaagccgccgtgtgaagtcgggggaagcgggaaggagcccgcgccgagggccaggccgcgggggcggcccgggtaggcgcggggctggtgcgggctccgggccgtccgtttcggggtccacctcgcttggtcctggcggcccactcggcctgcgcctcggctgcgctcacaggtgcgtgtcctcctcgaacacgtccgagtcctcggggtcccgcttgccccccatgagcgccccccagctccccgggccgttgagggccccgccgccgttcaggctggggtgcttctcctgcatctccgactggctgtcgctggccacgtccagcgtggggttgtcgtggcagccgttctccacgaagcgcagctcctcgccgtgcgacacgtgcttgagcttgggcagccggcgctgccagcagttgtanagcaggccaagcgcaatgatgatgatgc

SEQ ID NO: 130985 - DNA, 2104 bp, Homo Sapiens
  misc_feature (2069)..(2069): n is a, c, g, or t
  misc_feature (2071)..(2071): n is a, c, g, or t
  misc_feature (2091)..(2091): n is a, c, g, or t
aaaacttatttctcccattttgtttcctttaaacacatacactcactcactctctcaagaataggtagcacaccaaaactttatctgtgttataagatgtgtacaccttcatggtttattgtggttttccttaagttttatccttattaggatgaagttcatgcatttctacactactcttaactaaggctcaagagacaataaaaacatagaagtaattttttaataaaaggaaataaaataatcaagtactctgagtattttcctccattctcttatccagaattttaaggcctctgaaaaataatgaaataataaaaatagtggttttgagatctaaatttattaatattttggattccttttctcagccaaaagctactatctgaattaagcttttcagtttaaaagcctggaagaccatccttagaagacattaaaaaattacttctgatacacacactcctaataatttagatagatatgaaaacaatctcaaataaagatcaaaaaataaagtccctgtaaaaataactttggttgctcccacccacacgtcatatgatgatttaaactgcaatcatgaattttgaaaaaatagacgtatcttatctataaaaacactaccatacaaacttgaaactaaaatgttatctgaagtgacacagatgttctaaatctcaaggatactgaaaaatacattttttattcgtaaaataaaagaataaaaccaatctgattgtgttattaggaaatttgttctggaaacttattcataaattattgatggaaattcttaatgtccattgtgctgtcacctaaaacagattcaatcattttcttgtaaagaaatgactgagtaaatgagtaaaagaataataagtaaatttataagctacaggttaaccatcacatattacaaccaagtatgactatgtgataacaacaagagtggtcacacagtacttaagatttggctgtgtccttaaggtcttactcggaaactatcacaccaacctacctttgggataattttatcagtagacacaggcaatgggtatctttttatcctgttttcttaaagtttgtatcactagtctataacagatagcaatgagatagttctagcaatagatgaagcaagggggtaactgtgttctagaagaaacatttatctgtcttttgatccaagtttctctattaattcttgaagaggtgccagctcacgcctatcaatcagattaaactcctgaacaaagaaaataaagtgcttaaaggaggtgttgaggtgggcctcctcttgcagctgcatcacagaatcaaagtgctggtgataaatatgggcataaaccctgagcagacgctttagaatagtctttgccacagacataaagtttttgggaaatgggacaccaatcttagaaggaaaaagagtttcatcatcaagctgatcttgaacccaagtcatcaaatagtcaatgtattttggtgcagaacatttgattggctttttaatattagtaccatctgcccagtgatattcatatctcggacctgcagacatgactggacagcttgcttcagtgcagaattctgtaatagttccatataacatgttgatctggttaaagaaatccacagtgttcacagcaatccattcattgagatcctctccctcaggcaacataacagcttgtctcagattcccacttcctagagttgcttctgcatgttttaagagttcatactgatgagatccttcagggatattcttctttggtttgaatgttttagaagagcggctgctgaagaggaagctcatcttcggtcctcagaggggaggcgaggggccctggcccccgcctggatcaggattcggagctggctagagggagcggaccgtccttagctcacgggcagcggaagccgggccgccgccgctcggagccgggtttctggccgctgcgagcctttgcaaacctcggcgcccgccttgcccgcctaccccacctcgccggacgcgtgggtcgacgatatcccgggaattccggaccggtaccagccaggtntntgcgtgtggggtgatggggntgttgtggtgggg

SEQ ID NO: 130986 - DNA, 699 bp, Homo Sapiens
  misc_feature (438)..(494): n is a, c, g, or t
  misc_feature (554)..(554): n is a, c, g, or t
  misc_feature (586)..(586): n is a, c, g, or t
  misc_feature (683)..(683): n is a, c, g, or t
cactgttgagaaaaatttattatcaatgtctcagagccaacgacgacacgaacctacatgaacacaactcttaatttaggacccaagggtgactgtaaacatgataggagcgctgggacattgtcactgaggcagacagcagccactagtccacaatggtttaaaaagtcagtcctgtgccccctcactggaagcttccattctgggccatctgcagatattccttgtagagcttctcctgagcctcgaagagcttcttcagcttcttggcttgccctttgctgagctctttgccctccatgtcatgtgtgggcagaccatgcttacattttcatcaaacttggagtatttgtcggtttctgacaagaacatctcactggggggaatcttcatcttggccagctttgctgcttcttgttcctgtttcctccgggccgnnnnnnnnnnnnnnnnnnnnnnnnnnnnnnnnnnnnnnnnnnnnnnnnnnnnnnnnnttaataaggtgtttctgtctaccagtttcaccactgtgggcagtccttcgtggtcttcanaccgcaccccaagctcgggcaggatgttgtcncgcagggcatcgctgagctgcagaatctcagggactttttgctctcgggcaatcttccgcactcctttctcggaattctgataacacctgaaggtanggcatgactgtggcct

SEQ ID NO: 130987 - DNA, 611 bp, Homo Sapiens
cactgttgagaaaaatttattatcaatgtctcagagccaacgacgacacgaacctacatgaacacaactcttaatttaggacccaagggtgactgtaaacatgataggagcgctgggacattgtcactgaggcagacagcagccactagtccacaatggtttaaaaagtcagtcctgtgccccctcactggaagcttccattctgggccatctgcagatattccttgtagagcttctcctgagcctcgaagagcttcttcagcttcttggcttgccctttgctgagctctttgccctccatgtcatgtgtgggcagaccctgaaaacccagagcacagcggctattggtctcctctgcacctgggtaaccccaactcccctttctttgccctcccgtctcatagtgtctatctccctgatgcagccatgtcctcttgcttggacattcagtcaccacactgctctggagtcagcacactcatctggcagtgctggctccagcagctaagaatgggagaggggcgaccagagtctgggggtgcttcctgcctaaggtgaggggcactgtgcccctcagagcctacccatggctgagttctgacacagctggc

SEQ ID NO: 130988 - DNA, 559 bp, Homo Sapiens
tttttcactgttgagaaaaatttattatcaatgtctcagagccaacgacgacacgaacctacatgaacacaactcttaatttaggacccaagggtgactgtaaacatgataggagcgctgggacattgtcactgaggcagacagcagccactagtccacaatggtttaaaaagtcagtcctgtgccccctcactggaagcttccattctgggccatctgcagatattccttgtagagcttctcctgagcctcgaagagcttcttcagcttcttggcttgccctttgctgagctctttgccctccatgtcatgtgtgggcagaccattcattttcatcaaacttggagtatttgtcggtttctgacaagaacatctcactggggggaatcttcatcttggccagctttgctgcctagaacacgcaacacggcacagtcactgcccccgagcagcacctggggctccgcactgtgaacgacatctgctcatacctccagccctcaacttgcttccaagccctcagattcagagtgttcttgttcctgtttcctccgggccg

SEQ ID NO: 130989 - DNA, 1200 bp, Homo Sapiens
  misc_feature (61)..(84): n is a, c, g, or t
  misc_feature (179)..(190): n is a, c, g, or t
  misc_feature (795)..(839): n is a, c, g, or t
gtgccaagctaaaattaaccctcaactaaagggaataagcttgcggccgcggctgtaggcnnnnnnnnnnnnnnnnnnnnnnnncaatgcatgaatatttgattttatttcaaaagacaattatttataacactgaccctctatcaaaaagaatatgcttttctgatggggaagtgacnnnnnnnnnnnnctacacagaacaagagtaataaagttctcaagtaaggattgcactccaataggaattgagtgattctctcagagagcactcattacatcttagacaacgtcactcttctttcctcttggccatatgttcaggtctcatagtctttctgaacacagaatggcagtggccagcattgtccattatctatgttccgcttgtttactaattaaaaagctttggtcttcagtgttgtaaacgcaatttctgccttcgatatcaaaaggtgagtgaatgagacaagattagttgaaggaagtacttgatattttactccagatagctgaatgaaaatgggtattctcccttgtactttggagtccatcgtttcctactcccaatgctctcacagacagtaaataaaatagtttaactcgcaaatcttttacaaggatgttcaaaacactattctagagaaaactttattgatggttgaaaacaaaataaaatacacataaggttcccttcccatctctaatatggaaaataaaacacttaatatgaatactcagttttaaactttgctctaagttttattttattttattttgagatggagtcttgctatnnnnnnnnnnnnnnnnnnnnnnnnnnnnnnnnnnnnnnnnnnnnncagtctgggtgacaagactgagactccacctcaaaaacaaaaacaactggcgactaaacaactatatgacataactcttttgcaggctagggcccatggtcttggcatagcccggaccctagataccttccgcacctgcatgtatggcctccccatggctctaagttaccccagcatcaggcagcagagaacagcagccctaaagtctcacacagagctccacctcacagcttggtgaagggagcgctgtggagacacggcaggtacatgtgcagccccctacagcccataccttctggagcctcagaacgttctggattaagaaagcgatagcattgtaccatgggagcagacatccttt

SEQ ID NO: 130990 - DNA, 1002 bp, Homo Sapiens
  misc_feature (612)..(620): n is a, c, g, or t
  misc_feature (845)..(846): n is a, c, g, or t
  misc_feature (858)..(858): n is a, c, g, or t
  misc_feature (900)..(900): n is a, c, g, or t
  misc_feature (915)..(915): n is a, c, g, or t
  misc_feature (940)..(940): n is a, c, g, or t
  misc_feature (942)..(942): n is a, c, g, or t
aagtggcaacagtcttcttcaattgtttttattacagtaagaggaattttactcttaatgcatagaagctgaagaaaaaaatttatataagcttttaaaagaggcattttaaacaattattaatacaaatgtgaaacaagacccttcaaacaaataccaatttcagtaacagtttacatacagcaataatttattctgaaatgttcatttagtttctgttgagacacaattcatgtctcattaataaaagagcagccatctcacctcaaataccagaatatacaacaaattacagcatagcaaaaattctacctactttcagataaaatctagttcaggtaaaatagtttcattcaatgttttacagttacacagatttttgttttgtttggagcacaaaatagtgtaaattattacactgtagctatctctatgcacatcatgtgaccacataactgttaatcattacttctgaaattgaaccatcagtttcattcatgcagtaaagcaaagcaggctgggtaaacttgttcatcgggaaccatattactgtgaatttcacagccacatgattaattatgatgttagatggactcacaaggacaaaaacannnnnnnnngcataaataccaatttttcccctgatgtagtttagtcagtttataatctagaaatgattgataacagcaatatatcatattttctatctgtagtgttcattattttaagacaagcaatatttaaaggaagttgggatgggatgctactttaaatacatgtaaaacatactgtacaaacatacttggctttactatttttttcctaaccatcaagagtgctcccannatagacagtgangacaagtaactatcaatatggctccagacaaaacctctacangatcaactattacanattttcatctttaagttcattgaananatgtcaaagcagtggtatacaagattctagtcatctctctcttacaattcaaggtagacc

SEQ ID NO: 130991 - DNA, 1646 bp, Homo Sapiens
  misc_feature (550)..(567): n is a, c, g, or t
  misc_feature (821)..(920): n is a, c, g, or t
cgtcttggcctcagcggctcgcgtctcttgttgtcatgttgtcatctctacagttgcgttacctgctgggttcttccgcgctagcttctctctctgactggcttcacgctctgatgtcgcctgctctcctcacctcctcatgctccgttgctctactctctcctctcgactcacgtaccttgtcagactcgtgcctgtgtaccttaagcctcgactgttctcgctgctgcatcatcttacgatatcgttgtgtcctacccctcttctatctgtctcgctcacgttccttccgtctgtgtcttagccgcacatcagccccgtaactactatctatccccacccctcgtccccgcgcggcctgtgacgactctcctactcttcggtgcctctccgcgccctggctggggactgcagtagtagtctgattcagcctactgcgtctagtctgtgtcgactgtctgtgctgtctttcttctctctcgttctatatgttcgctgctcgtctcagcatctctgcctattcgcgtgtcgtcgaactgtgtggctgttnnnnnnnnnnnnnnnnnngtgtattgtggctcttgctactcttctatcgtcttttgcttctctcgcgcttcttgctctcctctctttatttttagctgccggcggctcgctcttgggcgttctgacgtttatctactctgacctcgcttcttctctggttgggcggccgctcctccttcccctcctaccccgcgcgtgggctgcgtcgcgtcgtcgcgctggccggtccgcgggggagtgtagttttgccgcgccgcccccgcctcctttcnnnnnnnnnnnnnnnnnnnnnnnnnnnnnnnnnnnnnnnnnnnnnnnnnnnnnnnnnnnnnnnnnnnnnnnnnnnnnnnnnnnnnnnnnnnnnnnnnnnnctgttaaaaaagcttttatccaacaagagcctatagcttcgctcagcatcagagccacggcctcctgttgggtcctccatgtggggagcagggatgcagctcagcctccagcccagggctctcctggtagtctcggggtatcctcaattgtggctcccaccccataccttgtccctcttgtcctcatctggagtcctgccaggcccacctggggtccccacagccaacccatgcacgggacagccccgggcgactgagaggggatacgaaggtcttctgggccctctcatcccaggccagcgtccaccacaactcaaagacagcggggggactgcacccaccactcctcccaagaagcagtggttgcacatttccaacatagcgaggaggaccacatgagacccctgcagccacggatggagccgccagacctgcccttccagggtgcacgtgctgggagcccccggtgtcacccggcctttttctgggggcagcagtgggttcagggcagacagtgggaggaagtcagtggaggatgttcccagccaaggggatgagctggatcccgggcgcctggtcagcctggctcgcggcaccttcacagacaccactgatcggaagacctggtgtgggaatacaggcgtgtgccaggcccaccgtcagggtttacagcgcttgctctggccctcggaggtggctggggcggcccgctgttgcggtggtggg

SEQ ID NO: 130992 - DNA, 1011 bp, Homo Sapiens
  misc_feature (811)..(811): n is a, c, g, or t
tttgccgtgttctagtaaaattttatttgcaaaagtaagcagccggttggtccctggttgaggctgaggaagacattacttcctgctggaaatacttgggacttacatttgacacaggctaaaagtatgggatgagagaggaacaaaagcttacaaacaaagagcagccagtttggccaaagaggaatgtgcatgaaagaaggtggcaacagactgacatgtaattcggtaaggataaatacatttacaaatgtgcaaactgaccttttgctggttcatctttattttagtcatactacttaaaaatatatatttaaaaaatattattttaaaagtcatcttccacttgaatcataaacttcttccttgtatcaaaagttgtgccactatcctggttacttgtggattcaccaagcagtccagcaagtcatccgtagaaatgaatgtttgaggagtcgtagtagtatttgaggcaatctgttcctcaattgcattttcactgttgctcattatttgttgtctcttggcacaatgcaattttccaaagtgttctccatccttgtccacaaagtctttcccatcacttccaaatatgcctcctctttctgaaggcggttcttcggacctctgtgctacagggaccagatcagggccaaagggacttgctgcctccggtttgtctgttccctgtggtcaagttctggctacctgtttggccacctccatgtggttgcacacatttattcctccttttcatgtgctctcatctgtctcagtgctggattctacactcagatgtctgcacgatcanaatgcagacagtgcatttagtacacattgctgatggacgttcctcactcatggggttacagcctgtattgtggtctcgcatttaggcaaacacaacggtatgctctcacggcagtatcctccatatcagattaacgctgcagtatgtctctagccaagctggaaaaactaacacagagtgagaagatcattccctcattg

SEQ ID NO: 130993 - DNA, 591 bp, Homo Sapiens
  misc_feature (447)..(447): n is a, c, g, or t
  misc_feature (482)..(482): n is a, c, g, or t
tgcaaactgaccttttgctggttcatctttattttagtcatactacttaaaaatatatatttaaaaaatattattttaaaagtcatcttccacttgaatcataaacttcttccttgtatcaaaagttgtgccactatcctggttacttgtggattcaccaagcagtccagcaagtcatccgtagaaatgaatgtttgaggagtcgtagtagtatttgaggcaatctgttcctcaattgcattttcactgttgctcattatttgttgtctcttggcacaatgcaattttccaaagtgttctccatccttgtccacaaagtctttcccatcacttccaaatatgcctcctctttctgaggggcggttcttcggaccctctgtgctacagggccccagatcagggccaaagggacttgctgcctccgggtttgtctgttccttgtgggtncaagtcttgctaacctgtttgcccacttcaattgngggtgacacacttaatatttctttttaatgtgcctccatctgtgctcagcgcgggaattctatacttccaaagtctgcgggccatcaaaaatgcgaaacgctgctttta

SEQ ID NO: 130994 - DNA, 1356 bp, Homo Sapiens
agcatgctctactggatatttaatatacatttttgtattcattataaagtactcttacttcaatagtaaaacagacgttactttgtttttaatcaggaaatacaagtaccagtctctaatttatattatatttagatggtctgattcacacaaatcctgaagtgacaggtcaccagatgcctggcacctcttaacagtaaaagtgacatcagaaacgtatagtaatgttcttaccaaaattaataaatgcttagatataagaacgactacttaaaacttctaagtcacaaaacaccatgctaaaggtttttatcaacctcttctttacagaacataactacttctcttatgtgggggtagacttgtgaataggccaaaatttcataggaaggtgggacatggaccttccccctccttattaaaagtcattttgtcaggacttatggtggctatatggtgtttcaaatgctaacaggaaacaaatgagtcaacttatgcacatgaaaagcaaactgtgaataaagaataaggaaggggaggaaacagttcaataagttcagatacgacttgatgatactgtcacaggctgtcacaggcctcagtatcttctttatgtcctaaagaaattgagccaccaacaggaaaaaaggtcacctcacagagaatgctgtgagatttttaagttgctagactcctttccatcttctccttctcctcagctcttgatactgctgtcaaattctacacaattcaacatccatcttcacataacaattagtgtgacccaaattcatccaagatgttaaaagggaagacaatctactaggattagccataactgtccatagttgcaatctcaaaacagagaagatgcatacggatagtgggaaaacctcctttagtatcaaccatagcttcaggcatcagggtgttgaaaagccgggaggacgtgtaggtccacgagggtatcttgcttttgtgcacttatctggggtgctatttgcagagaaggagctcctttatagagtgtgcccaagatggatttctctaagttgctctcagagttgtccagctgccctcaccaataagtcacagtctttgtaggatgatagaaaccaccagtcaaagcagatgcatatgggttgtggggaagccttctttagtatctaacataggtgtagtgctgcggtttctcgggctgtgcctgcagcacctgagcggtagcggccgggggcgccgaggaagctgcggagccgccgggcccggggcccttcgacatggtcttgtcttcctgcctcttcgccgctcccctcggacgcgtgggtcgacgatatcccgggaattccggaccggtcc

SEQ ID NO: 130995 - DNA, 697 bp, Homo Sapiens
  misc_feature (68)..(68): n is a, c, g, or t
agcaatccaaacgtgccaagtactttattaattccaagggcataccccgctactgctctgtgactacncaggcagatgggagggttgtgcttgtgggggtcgctcacgtaggggtaaaaagcggggtcccccaggcagcaaagactgggggacagcactgaaagggtgtgatgactacttgtttatagagttcttgaaaaggtgtcttcactgggacccctttgcccgcttgaccccagctcaagcattaagacacccttggattagcaagtctgtccccagacctctcaccaccatagacaaggtgtcagggaaacgggtagttaatcctgcaagtgctttccagggattgggttctaagctgcctccagttgttggaatagccaataagcttaaagctaacttaatgtcagaaaccaatggtagtatacccctatgcagtgtattgccaaaactgattagctagtggacagagatatgcccagagatgcatatgtgtatatttttatgatcttacaaacctgcaaatggaaaaaatgcaagcccattggtggatgtttttgttagagtagactttttttaaacaagacaaaacatttttatatgattataaaagaattcttcaagggctaattacctaaccagcttgtattggccatctggaatatgcattaaatgactttttataggtcaatgc

SEQ ID NO: 130996 - DNA, 1388 bp, Homo Sapiens
ccaagtgaggtctcggaaaggtctcccccacaatgtgtgtgggggggccccccctcgtagttgaagggggcccacttccaaaaattgtcttaggaatccaccctaagatttctgctgtccacggcttaaacccccaccagtggaaaggagccccccctgcttccatgggggaaagagagaaggttttcttacaaaaataaaggggccggggaggggcccctttaataaggttaagttcacagcttaagtgggggtttgggggaaaggtttattaggaaggcaccaaagggatcccgtttttcttttaaggccaaggtaaagggtaaaagaaccgttggagccagggcgataaaagcccaaatgcacctgaacttatgtccataaggggaattttccaggcctgtattgtaaaaagccacagtgaacatgatgccagcaacaaggaggatgaagaacagcaaagaaaaagctgagggaaaccatcgaccaaagcaagcggaggttcaaaagagagacgagcttcaggatcaggaaatgaacagggcccttcagtcacggagaagtcgttgttgccagaacagtcagtcacttaactgcttagaagatcaccgtgttaccatataacctctattgtaggctaattaatttttaaaatctgtctaaaatttactgattttaatataatatcttgtcatttttggcaacaatacactgaagtaacaatgtagtttgctgtattttgtttcacaaatatttacctggaaacactggagactttgtaaagagaaaattactaaaaattactccttcactacaggacagtagatatttaatatttatttagaaagctattgacacttctgatgactactgataactgagaagattcaacatgttataaatatgagttgtaaatattccatcccttttgagattatatacactaagctttttactaccactggcctttctggatactttcatatttagagaatatagaacttcattctgggagatttgacaatgacctaatattacactaatgaaaagtcttcacagtcctcaaaataatttagaatttaatgttttctttaataagcaattaaaatggaatattttctgcctcctgaataaatacatgtctgtaaccaaccatccctaaagaaggatactaatatattttgagtgattcaatccacccatggatatagtcacatctttaaatgttttccagtgtgaacaacagtcttttaatagatggccattgagttcaagggtcatattatttgctaacaaattattatttgggccagaaagtatctgaaaaaagtttaaccaaatttcctacacatctcatatctctagtttattaagcattatttatttat

SEQ ID NO: 130997 - DNA, 1071 bp, Homo Sapiens
tttgacacaattcagctttatttttacttaattataacaatttttaaaaactccatgactttgtgctatttctaatatttaaataaaaaacatttcaaattttgcacaaataatttaggccaatacataactagatttgaataaagtcagatgaagcaataattcctcctctgtgtttgaaaggaatgagtgtggttacaaagtcacaggatgagtccctgggatctggggtgggagaaggggtggatcaagaatgacttgggcttgtcactccctagcaggctgagggcgtgacacagcagctcggtggcggagaggtctattctagtttctaacactccaatgctaactttttggatgtatttccttctagcatgtagaaagggcttttcttggctgccaggaagtagggagcagggatgtggcatggtgatgatctgaggacagccaggcatatgctcagacactttggaaaactggggagggggaacagggagacagaatcttcatcttcttccttttgtgaactggggaggagggtgcttggtgacattttcctgagtataaagaaggaatacaggtttgaaaggtttgtaattgtatatgaaaacaggtattgaaaaccaatactgggggaaaaaaggcattgtaaacacttctatttaaaatgaagatttctggaacaactatactatatagtggtatcacaagtctttagctggtaagatctagcactgaaacaactcttaatttttaacttgtgagggttctttttaaagcaccacttaagacctatatattaaaaaaattaaatatagaaagattgttctatctaataaatgagtttgagaatgcacaggaaacaacaaaacccatttttaacctctggtaactgaagtggagcattaaattcaaagccactttgaggatttcctacattgttcacctaagggaaaacaaatgcagagctatcaaagagcttctcgataaattcccagaccttggagggctacagcttttcataaatatggtcactggactgatgatttctaaattttaaatgtaataccc

SEQ ID NO: 130998 - DNA, 801 bp, Homo Sapiens
  misc_feature (614)..(661): n is a, c, g, or t
  misc_feature (801)..(801): n is a, c, g, or t
tggctgtggttttttcccctttttaatctaactgcctgttgacattgacactcatcacggttgtaggctgtcatgaatgtgtacgtgcttaaccagtgaattccgtgttgctcttgtgaggcctttcctgtcatgacccagtgtgcttaagaacctgcctgatggggagtgtcggctgtgaaatctgcaaaaagagctgacattccagctgctgtgatcatgaatttgggggtgtactgtcctgcctgtgcatcttctcgcactgagattttgaggcagttgcagccctcggttagtctcccagtggaaaaatcggttgtgcctccctgcttcccaccatagctgcctgaaaacatgacgctctcaagcttgtccttccttcaggaagatgtccactcatgcccacccatgagagggcttgccgtatgccctggcctttgggcatatttatgtagagttcctttctcctaagacgtgagtttctcatgggggatgtacgagtaaaaaggttaacttctgttcttatgcgtggcgctgtgttcactttccagagtctctgttcgtttgtttggatggcggtctcggggtacggcagcgtgtgtgcgtacgtgtcnnnnnnnnnnnnnnnnnnnnnnnnnnnnnnnnnnnnnnnnnnnnnnnnaaatcgtgcaaatctacaacatgtcccagcccattctccgttgaaacagatcacagcaacgacaaacgctcatggcgctgctttgctccacccgcttcagatagatcattgttagatatttcacatttttgtatggtggn

SEQ ID NO: 130999 - DNA, 923 bp, Homo Sapiens
  misc_feature (169)..(169): n is a, c, g, or t
gaccccgggggcccaccagttgggccccacccgggcattcttccgggttaaaacaggtgcgggacaggcccgggcccccacagtcaggccacccgggagggctctccaggtccccacaggccccctccgctggttcgagggtaagcagcaagggtcccatcctgcaggnccagcgagcaggtggaaggggctgtgtcgcaggcagagcacaggctgcagacctgggctcctgcagctcaccaggcactgggtgccagtgtccacactgctgtagaggaggatgctgccatcctggagcccgaggcagatggttggatgcaccgtggccgaggggtcagcaactgtcgggctctcgtctctgctctccgcctcctcctccagctccgggatatactccatgcagagcacaggggctgccagtgggaaggacttgacggtgcggggcgagggccggttcaaggaaaagatttccacctggccccctgcgccttcctgtccgcccccgacccagaggtagccctgtggaagggaggtgctgactgctgagaaacccagcaggggacagttgacaggactgtggaccagggccccaagctgcaggctgagtgcccgggaggagaaggcagggatgcagcaggccaggatcgggcaccagaatggggctttgctcttcttgtcctcatccgggcatagccagcctggctggttctcctcccggagtccgattttggccaaatgtaacctgttgacccaggaaatcttgctcagggggttgggggtgatgaaaaccaccatgaagctaatggggcggccggacttgtcgggtttcccaggaagcaggagcctgagacggcacttgttggccgagtggatctcttcctccttcacccgcatcagccctcgtgccgaattcgccacccagc

SEQ ID NO: 131000 - DNA, 1161 bp, Homo Sapiens
  misc_feature (160)..(180): n is a, c, g, or t
  misc_feature (229)..(241): n is a, c, g, or t
  misc_feature (324)..(334): n is a, c, g, or t
  misc_feature (420)..(433): n is a, c, g, or t
  misc_feature (468)..(481): n is a, c, g, or t
  misc_feature (497)..(670): n is a, c, g, or t
ccccatgcgggggatcggggggtatgtggttcgcgccgccgggaaagtgaatgtgtttttcatccccctcctttgttttagggtggcttccccccccttgtcagggagaaaggggggttagtaaattttaaaccacacacaatcctttctaagatagtannnnnnnnnnnnnnnnnnnnngaagaatctttataattattaggccgccccgggatatgacacccctctnnnnnnnnnnnnngagaagaagaatggccttggaaaaacccccgatgggggtgtgttgtgagaaaaaaggtgtggtgtttcttcccgcccgggtcnnnnnnnnnnngtgggggagaagagacactactttgtttagtgccacggtttgttttttgtggagaaacaagattgcctcgtgatctaccccttttnnnnnnnnnnnnnnccccaacaaaaagtgttagagaaaatttttttgtnnnnnnnnnnnnnncgcacgggtgtgttgnnnnnnnnnnnnnnnnnnnnnnnnnnnnnnnnnnnnnnnnnnnnnnnnnnnnnnnnnnnnnnnnnnnnnnnnnnnnnnnnnnnnnnnnnnnnnnnnnnnnnnnnnnnnnnnnnnnnnnnnnnnnnnnnnnnnnnnnnnnnnnnnnnnnnnnnnnnnnnnnnnnnnnnnnnnnnnccataatcagatttattttcctctaataagacagtttagcatctccgagttttgcattctacagtcttacaaactttagttattagcatcagaaacacaaaaacattgcaagacctcaaaacacaaataaataccaaataaaaccacacataatatacaataaacaaaactagaaaacagtaatgctatcaggaagtcaggcatgttgctaactcacagtaacaacatgattattgctgggcaataactcacggtctttttgttttttcttagaagagcggaaaacaggacccaaatcactggtcacaaaatcacttggactgtcaagatgtgtcttcacagcaagcggctactacagacgcaacttttaaaacaggcagattaaaaagacagggtcaaatgagagattggccttctttggtctttgtttttgggtaacagaaccgaacagaggcaccggcagagaagaggctgcgcatctgcagatgctg

SEQ ID NO: 131001 - DNA, 1084 bp, Homo Sapiens
  misc_feature (169)..(197): n is a, c, g, or t
  misc_feature (432)..(432): n is a, c, g, or t
  misc_feature (616)..(625): n is a, c, g, or t
tggtagctcactctattttgctagctggctggccatataatttattcttcccttaaaaatgctaagcagctataccagtacatgtgttgatcttgctgtttattgttgaagaaaagcattgtatagttaattttacttgcttctaggattaattctagaaaattcctgnnnnnnnnnnnnnnnnnnnnnnnnnnnnntcttatcagcgcacataaaatccaaatcccacttgaaccaactgaagaaaagaagaagattggactcagatgctgtcaacaccatagaaagtcagagtgtttccccagaccataacaaagaacctaaagagaagggatccccagggcagaatgatcaagagctgaaatgcagcgtttaagagacatgtccagtggcctttggaaaggtggtggggatccagttcaggagggaggngtatgtttgtctcccagtctgggcaaaggagtgctatgcggaattctctgcatagcagaaaagctcccaccattttcttttgatgtggttttaaagtctcacgttctctataatagaaacagcaggtcttgtcagctccttgtgtggctgatgtgtctggaaatgatgtagttcaggaaagcannnnnnnnnnctttgaaccttaaaggttctattattaaaagcagcacagattccacatttttatacatgaggatcttctttgtggtgaataccaggattgactgcatccctttaaagaagttttatgtccctgactctggctaaaattatctaatttccagatgcttttgtagatgactgaagtatttgtgagccacatattgggagttctagatttgagtgaatggcaggaaagggccatctccattgagatgattaagtgaaccaaactagttctcagaattctacagagaaggagggaatcagactgaggaagctgtgacataggacttgaagaccaaagactttgaaatttgcgagctgctcatgtgtgagttattatcactgctgtctttctattgagttacaaatctatatttttattgaagtttaaataaagaaaaaatttacaagagcctctttgatcctt

SEQ ID NO: 131002 - DNA, 910 bp, Homo Sapiens
tgaagaggacatcttgtaataaatttattgtattttgttacattttccacttttctcttaattccaactgtatactatataatcaacgctgtttcagaaataaaacgtttcaaacgtaaaaatataaattctgcttcttaaaagtgcatacactttgaataataaaacatacaaataaataacagaaatcagtgacacatctcatgcacttgttctaaaataaatttaaaatgtacgatacacttttcttccagcctctaggaaagacatcctgccttccatattactgtacaactgaaaatgaaaacgacacagaaatcactatccacggtgcatgagtaataccaaagcactttgtgtacagtgatgtgacatgcagctttcaagacaactacagaaattccagtgtaaaaactgaagagttcaatcaagaaacgacttatgtcaatgaggcttaaattcaattttaaccagtggtgagaggcacagttggtgagcagacctctatggaatgcaaacacgtatttgaaaggcctacaaagagaactccaacttcggaaatactgtaactgcttttgcatttggtatgacaccacaccgtttataatagcacctaggaaatttcatattgcatttggacgactgcaacagatatcattattctggatggcctttctaaagaaacatttccaacttgcatgtctacttgtatcttcattccttaaaaagttgaaaacaccaggtaaattgtggtgttttgtaggcagcatgaggctcgacagaatgaaaccatcagattacttggaaggtgttgtagtgcattcagctcaccacagattaaaactaaattttatttgcctccacagttaacacagagtgccaaattctgggatgtgtattacttaatggt

SEQ ID NO: 131003 - DNA, 703 bp, Homo Sapiens
  misc_feature (255)..(372): n is a, c, g, or t
  misc_feature (376)..(385): n is a, c, g, or t
ttttttgagcagtggaaggggtatttaatgtcaaggctttattttgaatttctgttccagatgcctctccacagcattcatcacaccttccttcacacttgaagggaaaagtccttaagagttcaccacattttggtgttatttttagcataaacatttgtttttctataagaagtatctctctggattcaaaccacagaaatgtcaatgaatgttatttccattgtataatcatttaaaagtcacctacagagnnnnnnnnnnnnnnnnnnnnnnnnnnnnnnnnnnnnnnnnnnnnnnnnnnnnnnnnnnnnnnnnnnnnnnnnnnnnnnnnnnnnnnnnnnnnnnnnnnnnnnnnnnnnnnnnnnnnnnaggnnnnnnnnnnggcacctacaaattgaaactgacttgatagtttaggatcatttatcaccagtcccatgtacttgtagttgatttcaaatgtttggtacaggtgactgtaagacttcaagtattccatgaaaataacattcatgctgggatcataaaattacatttctgggacagtatttttaaagtctgtttttaacttttgtcttcaagagctactttcttcttgctgttctgaccagtgacctttttctgtttatccttagctttttctaagaaacattttggagttgtactaatgctctccctttccaatggtttcttaatcatc

SEQ ID NO: 131004 - DNA, 726 bp, Homo Sapiens
  misc_feature (582)..(607): n is a, c, g, or t
gtttaaattacattatttattttttagatcatccctcttagtcctgcatgcattgttagcacaaaaagttgaacttgatcacaacttcctttgaagagagagtaggtacacaatgaccatctgaagagtttctccacggagggaccaagaattccagacgctggtaacactgtcagtaacctacacaactttcaatacaaaaaaatttaccaaatatcctgtttaatgtaaacaaggcaggaggcaaaacagagtattacagtaacactattttacagggcccagaaaatgtgattatctaccatgttttaacacataaagtgtcacaatgacatgcatatttgatttactacataacccaaaatataattaccatatagtgtggttttagcacttcactgtaacgtcttctgtcaatactgatggacttcataattaaatggcaattgtatgttaatgcaataatttatgaaaacattaccatgaatttatgaagtaattccataatttgtgccctgtaaaattaagtgtaacaatgtttacactagcaacagtgtaagcgagctaagaattttggtcctnnnnnnnnnnnnnnnnnnnnnnnnnncacacacaataatgtacaattaaaccaaaaagctatgaatccactcacagcttccatattgcacaaacagatacattacgacgaaagttacatagttatcaggtgagtactatatggca

SEQ ID NO: 131005 - DNA, 1356 bp, Homo Sapiens
tttggcagcttttctaaggtttagtaaacagggatctcaggtgccaggtgggcaaatgctactgtcgctcaacgagaggaatcccagagaaggagaagcccctgtcaaccttttattgggagtggaacacatgaggttcagctcgtgccgggcactgtacattcactgaagcagctcaaggggctcagccccgacactgacgccacactgagcaggatgcacggcccggggctcacactgtccatggaggaggtggggtcagcccgaggtgggcggatggtggcccgagacaccgagagcttggttctgggactgtggctcagctgacccgtggcacagctgcacctaagacatggccctggctaggcgggaacagctcacagtagcgatacattcacaggacacagttggtgtccagaaaagggggctcagaacacagtttctacacaagcacttggcacccacacgacagagacgtcactcaagcagcacagccacaaatagtttacagcagctcatgcccggcatccgcccatgctgggagactccctgaaaggtgggcacctgccgtctatgaggaggtgtctccctccatcattaaccccaaaccacacaatgtgtgaggagagcaggcctctgggtgaactcacacattcatacccaaggaagaggcaaacacactcaagtccagagttcccagtggtgccgcccagacctactgtcccgggggtgttatggctgtccctcaggcttccccagacgcagccaggacagcctgcaccgcctcccagactcttgcaggaaggggagctctgccctggggaggaaactgacaggctgggagacaagactcccatcgcagggacatgcacagcagcagccacagccccgcggacggggcatggggatgggacaggcagggagccacactgccccctcagtgtgtgcctcgtaggttctgtcctcggtcctgcccacttggagcccaggcagacaggtggcattcgaagcacgggcccaggtcacagacagccctctggcacagatgtgactggaagaggactgatgcgcagggcagcaccaggcctctctgccagtcccagagccagtgtgcagaaagttccagcacggcctgtgctgtggctcctcaggatgaagtcacgtccaggacaggagggtttatgcagacacacagacactgctgacggggacagaggatggctcgtccatctatgaggctgaactcttctgtctgttcagccgacgcatggcgacgcgtggtcgacatatcccgggattccgaccgtacagcctgcttgctaaccactgttcatagtactaaccttgcgcctttcg

SEQ ID NO: 131006 - DNA, 356 bp, Homo Sapiens
acttcaactaaattttaatgttagcataaagaaaaagttccttgatatctttatcaagtacacatcgaaacaacctaaaatcatttatcaggtactagaaaatgtttccaatgtatgatacagactagaaagcatgcagtcctcaatgtaaactaaacacaataaatttcagagaaaaacaattttaaaatggcttaaaaatatatctaatgaaatgtggggtcaaagaagaacattttgaacacataccgtagttgcaaaacaatgatgttacctcgtaagattataccaaagctttcatgagaagcagttttttatattactttaattttattttagagatggagtctcgctct

SEQ ID NO: 131007 - DNA, 1641 bp, Homo Sapiens
  misc_feature (164)..(164): n is a, c, g, or t
  misc_feature (304)..(304): n is a, c, g, or t
  misc_feature (329)..(329): n is a, c, g, or t
  misc_feature (719)..(736): n is a, c, g, or t
cgggcggggggcggtggggctcaggagaagattttgctgtcatagaaaagtgcggcgcgggcgcccctaatataatggtgccgctcgttggccgcctctggtggcgacggcgaccccccagttgagtttcatgggtgttctccgtgggcccgggtccgtgttgntggagaaagcctcccatggcttatccccttgtggagaggaaacaaagaagaggagtttcgtttatacttttctttttcgacatcccgacggctaaaaggccataaaacccccgccaccgcctctaggtctgagggagagntgaggttctatgtttgtcgggtttntggcacagaggcacaggacaggggatttttacgcttcccctcgcggcagagaaacaaataaggggggttttcgtccacaagcggaagttatttgcccttttttgggtatctgctacctaaaaaagaaataagaggtccccggcttccagtgtaaggggcgtgggttacaaatttttcccggggggtgtccttggcaggcgcggattcactttaaagggcagggtttaacgctgggctttattggaaaattaattcggacctcccctatagggaggcccgggcagatcttaccatctttgtacaagaaaagctgggtcggggaaacagtctatggcccatgtggcatttcattacctctttctggcgcgcccggacatagatgcctcgagnnnnnnnnnnnnnnnnnncagaaaaagtaccctctttatttgcattgcagaaatgccagggggctcggacatgggtgcccacagggtaggtttccacccaggtcgtcatcatctggcaccaggagcctggggggaggtgcccggcggcagaggctgagaggtgcaggggtgaggtggacagtcccctgagccatccctgtggggcacacgggccacctgtccagcacttgcgctccacgctgaccatctcacaggcgctccaggagagggttgaggccccccaaacctggcctgcagccatcctgggtctggcctccgaggagctggcggcgggcgcaccgtgtgccctggcctgcagggatggcgcttaccctcagcagcctgtcaccgtggggtccaggcctgagcgcttggagatgcgcagcttgactacctcctcagagcatgtgggatggatacccacggtccgcatcacctgcgcataggaagccccacacttgatccccagagcaaatccttgagtaacttcgcctgcgttggggccaaggaaatgcaggcccagcaccagctgtgggggctccctcaggcacaccatctttacataacactgggatgcatctcgtccagccaccgtgaactccagtggtttataatgggcgtgatagacctcaacatgctcctgcccgtggcgagccactgcctcctcctcggacagccccacacagccatactccagcggggtgaagacggtcgtgggaacattgtcgtagtccatcagatctgaggacccgccgaagagccgctgcagccacggagccatcccggccatgatcgctgtgggtgtccgctcaggccgcccctccaccacgtcaccaatggcgtagagcctcgtgccgattcaacacccagcccgacctagccga

SEQ ID NO: 131008 - DNA, 1136 bp, Homo Sapiens
cgctgccggagtcagttttattagggaagaggggctccctgccccacccctccccacaccctccttccgggaggtctgtcagccccaactgtagaagtagattttctgccaggtgggcaagtaatccatgagcggccttgtgaccaggccaacgccagggacgtggtcggccagcaactggagcaggaagaggatcctggcctcggagaagcggtcgtagaaaggagagcgcagcaggtagtagagcagcaggatggtccggcgccgcagctcccgccgctccctccgggtcaggccctttctgtcactcaggaggctcaggctggtcacgtccacaacaccagccaagagccagggtttccacgacctctgaccccacaggcccaggctgagcaagtgcagcagcggccgggcaatgtacaaaaactctgcgatggtctcctgcagccccagggggttggggtcgcactcagctcctcgtgatgctgctgctgccgtccctcccgctgctggggagctccccagtgcctggagtgcagggacggcgtgttctggagggttcgcaccacccggtttgaccgcttccccacgtaggactgctcatggttgccagggctgtggtcaccatccgggggctgtgcctgggtctctctgtccagtggaacgatagggggtgaagtctggaggccagccttgaaccagagcagcaggagcatccgcagtacagccttggccagctggatgagggcgatgacaagccagcggcccacttcaccccacaccttggcagctcccatctccatgaacacctccacgcactccagcacgctcagccatgtcagcagcttctgctgggacagcgacacaggcaactttttccgaagctccttccgtaggatcccgtcattgagcagcacaagcaggttagaggcagagtacaccagctctgacagctcgtgcgaatcggcgaatcgacctgccagcaggtaactgaagccccgcactgctgtctccagctgggccgtggcggccgggtgacgagtcacgtactcctggtagcggaggcccaggagccgcagcttcaccatcctggccctcgcctcgtgccgattaacacccagcctcgcacctagcca

SEQ ID NO: 131009 - DNA, 699 bp, Homo Sapiens
gccccagggggtggggtcgcactcagctcctcgtgatgctgctgctgccgtccctcccgctgctggggagctccccagtgcctggagtgcagggacggcgtgttctggagggttcgcaccacccggtttgaccgcttccccacgtaggactgctcatggttgccagggctgtggtcaccatccgggggctgtgcctgggtctctctgtccagtggaacgatagggggtgaagtctggaggccagccttgaaccagagcagcaggagaatccgcagtacagccttggccagctggatgagggcgatgacaagccagcggcccaattcaccccacaccttggcagctcccatctccatgaacacctccacgcactccagcacgctcagccatgtcagcagcttctgctgggacagcgacacaggcaactttttccgaagctccttccgtaggatcccgtcattgagcagcacaagcaggttagaggcagagtacaccagctctgacagctcgtgcgaatcggcgaatcgacctgccagcaggtaactgaagccccgcactgctgtctccagctgggccgtggcggccgggtgacgagtcacgtactcctggtagcggaggcccaggagccgcagcttctccatcctgccctcggcaccgaccctcgtgccgaattcaacacccagcctccacctagcctta

SEQ ID NO: 131010 - DNA, 1021 bp, Homo Sapiens
  misc_feature (148)..(187): n is a, c, g, or t
  misc_feature (244)..(337): n is a, c, g, or t
ggcggcagataatgacaaagcggctactatggcggggcacatcggcgggcgggggatgtatattagggaacgtgtttggggggataagaggcggtagagcgacagggggggtgtggaggagcggctatacatacggcgtagtttagcnnnnnnnnnnnnnnnnnnnnnnnnnnnnnnnnnnnnnnnnaacaagtaggcaatagggagatcgggaattcgttgtacaacgcaatgggttcttttnnnnnnnnnnnnnnnnnnnnnnnnnnnnnnnnnnnnnnnnnnnnnnnnnnnnnnnnnnnnnnnnnnnnnnnnnnnnnnnnnnnnnnnnnnnnnntccaacgggtttattcttacacacggcaccatacagagcagcacaggtcactgagccgggcccgccccttacaaaagagcaaggacagagaggccgagggcgcgaggagcacgcccggggcgggggcgtaagagaagcgggggcgaggaggtggacggtggggctgctggtcgggagcacagggcgcgacaaccgggagcgcaaagtccacaagtgagcgggcagatggcccgtctgcggcacagacaccacacggcacgtggcaccgagcgcgtcggcgtggcccaaggggcacagtggatggacagagagaggagagaggccagaagaggccctgcaccctgtcaagctcctggggcagagtccacccgaatgcggatcctaggaaatagggggaggccaaaaagagggggcaaggcaagcgcggcggcggcggcggcttccggagcaggagcaggaacggcagaggtccatgcaggaaggagcagaggaggggaggggcaggaaagcgccccccaggagcagccgggccgggcgggcttggactcccccgcccctctgggcctcgtcgcgctggccagcgccgggcgtggggccgagctgccttcttctccatgcagcgagcctgcagcgtccggccgggcctggtccccggcagcccccagcgcgggctccggcgctcct

SEQ ID NO: 131011 - DNA, 1266 bp, Homo Sapiens
  misc_feature (160)..(160): n is a, c, g, or t
  misc_feature (163)..(163): n is a, c, g, or t
  misc_feature (168)..(168): n is a, c, g, or t
  misc_feature (182)..(182): n is a, c, g, or t
gggccactggcagggtgctgcatgcctgggggcagggaagtggtggcctcactccactggtcggcgctggaaacggagcaggagcgctggtgcagcccctcagggcgcgggccagcccaggccgagctgctgagggggcgctcagagtgcagggatgcgntgntggcngagtggggggcacntgtgcccccacccagctgtgtgttactccgctccacggacagcccgttggcacgggggctggtgcccggggctgtggcaggtgtggctcggggcaggcgcttccctggcactttcaccgttgtccgcagcaggtcaatctccttgccgtggatgttctgcatgtaatcatgcaggctggggtgataggtgagcagcccgttgtcacagagcgtcacatacttcttcttccactccttgttcagggacttgccgctccgctttagcaggatcccctgcttgatggggatggcgcggccgctcccgatgctgtccaccttgcactcggcagccttcttctcccggtccaggtcagcacccttccgagacgtgaagatgttggagcgccgcttggactgctttcggatgggtgtgggggtggaggaggcagcgatggtctcgatgcgcagctcccgctggctgatgctgggggtggaggggactgaggacgagtagtcgctgaaggcgctgccgccgccattcgtggcctggttgatgtgcacggccgggatggaggcggcggacacggccgagtggctgggcgagttgggcagtgacttgcagggcccgatggccagttgctgcttctttcgcaaggccactaccttctgggccacgtcctggaagacacgctccacattgagcccgtaggtcgcgcacgtctcatagtaggtgcaccgcttcagatctgtggagagcttgcgggctctgctgtcgtcgataacccggggattcgcagcgctgatggcatcctgcgtgcccacaagcaccatgggcacctcgctggcgttgcggaagctgcagagacgcaggaagtagttgtacaccgtctggaaactgatttcatcctccaggctgaacacaaacaccactgcatccacccaggcagcaaattgtgccgggcgggcttggactccccctgccctctgggcctcgtccgctggccagcgccgggcgtggggccgagctgccttcttctccatgcagcgagcctgcagcgtccggccgggcctggtccccggcagcccccagcgcgggctccggcgc

SEQ ID NO: 131012 - DNA, 1927 bp, Homo Sapiens
  misc_feature (71)..(71): n is a, c, g, or t
ctgcgcagggagcgcggactaggacactctttttgtatagtgtggtctataaggttggtcattactaacanttttgcgttttgtcgtgggttgtgaactagtgatgtatgcatatagatgcgcgcttggcctccatctctacatatggcttatatttttttggatgttttaggaccttatggggagtggcgacggatgaaggtccgctacagaaagggtgccaggcttccacctactcaaagtccaattcgtcatgaggggagtggtagttggatatatagtagttcgagtcggaaaaggggctgatcgtgggtgggggggatagtgagatgtactccccattcggctgggtattctgtggcttgtggtggtccccttctactcgcaactggaatcagggtcacgctcgttaacgtaagggacggcgcagtggggggatataggaaatcttagttttgtgattgggcgtgcgcgccggtaggcgccgctcgtcaatcgtgggagaccttataggtattggtggagggcggggtggagtagttagtttcggcgcgtcgttggagtgtgtgaagggtgggcgtttgattttatccccaggacacggcgatgccctaatgatggtttccggtcccgagggtattggtctccccgatccggtccctacaggcgtcagggtaccgggccgatactaagtcctttccgggttggttggtgtttagttccaaaaagttgccggtggggtttatggagtggaaagctcggcgaccgattgtggatgtgagagcagtgctcagtggcccggcccgcctgccggcccctcacagggggcatgtccagaggtgcggtgtgtcaccatgtggtcttgtaatttggaaaggagttggaaagggcttttttgttgatgaaaagttggaaaccagtggcgcatatcgtgaagatgttggagcgccgcttggactgctttcggatgggtttgggggtggaggaaggcagcgatggtctcgatgcgcagctcccgctggctgatgctgggggtgggggggactgaggatgagtagtcgctgaaggcgctgccgccgccattcggtggcctggttgatgtgcacggccgggatggaggcgggcggacacggccgagtggctgggcgagttgggcagtgacttgcagggcccgatggccagttgctgcttctttcgcaaggccactaccttctgggccacgtcctggaagacacgctccacattgagcccgtaggtcgcgcacgtctcatagtaggtgcaccgcttcagatctgtggagagcttgcgggctctgctgtcgtcgataacccggggattcgcagcgctgatggcatcctgcgtgcccacaagcaccatgggcacctcgctggcgttgcggaagctgcagagacgcaggaagtagttgtacaccgtctggaaactgatttcatcctccaggctgaacacaaacaccactgcatccacccaggcagcaaactggagctcaggggggcctccttcatctcggatcagcagcaggtaactctggccatccaccacaatctccttcttaaaccgccccccttcaggggactcctcctggacataggtccccgtcagatagcggtgcaccagggctgacttcccgctagacaggttccccactatgcccactttaagctccggtacggagcggctcagcgtccactcctggctgttcacaaacgagtcctcgatggagatgacgtgctcccggatctggttctgcagcgccaaatcctcgatgcgctcgatcaggtcgtagatggcgtagatattgggatgcacggactcgaagcgctggatctcggcccggatggccgcggagaaggagagcgcgaaccctcgtgccgaattacacacccaggcctcgtacctagcctaattt

SEQ ID NO: 131013 - DNA, 528 bp, Homo Sapiens
ttctcatctgagagcagtcccagggcccggcccgcctccggccccgcacagggggcatgtccagaggtgctgtgtgtcaccaactggtcttctaatttggaaggagttggaaaggcctttttgttgatgaaaagttggaaacagtggcacatatctgagagggaggaacgaggcagcgtggtgaagcccaggaaaagatggctaagcctttgttaaaccaatcacagcggtgggtggaaagcatgaattttcccctcggcagtggggtaacggaaaaagagccggaaggcgacggggaggcctgggctctgactctagctgggccagctaaccctctgtgtcgccttgggcaaacagccttccggccgccggttcattagcgtgaagatgttggagcgccgcttggactgctttcggatgggtgtgggggtggaggaggcagcgatggtctcgatgcgcagctcccgctggctgatgctgggggtggaggggactgaggacgagtagtcgctgaaggcgctgccgccg

SEQ ID NO: 131014 - DNA, 1246 bp, Homo Sapiens
ttttctgctacaaactaattttattgattcaccccttggtcctgggccaacagtatatcttcaagctcttacttcccccagcaatgccccagacaaccgaacacatgttgcaggggctcccagactggcttacctctgacggggcccagcacccggtgggtgaccttttgggtactagagcccaggcctggcagccctgcaggccgactgccatgaaaaggaaagctgggggaattcttcatctgtggagaattttgttggctgctgctgctaccaccggcacttgtgccggtgctaaaacttcgtgcccgactcaaggtgttttcggagcaggagacaggcaacccattgtgacttttgggtggagttcgaaggcccctcttcttgttgacacccacattcagagtgctgcttaggcctcggctgttgcgtacatgtttcagcatccaggcccgtagattagtaaggctgctgtgctctgacagtacaattcggggccacggattacattccgccatgtccagggctgcaatggccatagctcgtcccacctgctcaaatagttccacagtgtatctggaggggaaagccggcgggggaggggggctggcacgcccattgtcatggcaggcagcagggatgctgtttactgagcgtccagtgttgtagttgcattcaagtgtgtagctgtggattatccctgaggctttgtagattgcaacacggccgcttccctctttagactggccatctctacggtctcgggcatacatattcttctctgagaaattgcagccctggaagtcgaagtgggctgaattcaaggagatgagctttggatatagcatgttttccacctgggtgctctcatcactaaagctgtttccgtacatgaagcagccccttttggaagcatgtccatgcaggtccacatagtaagcaacgccactctctttgggggggatggtatcaggggctgactcttcaagccccgcagactgttgtggcataatccacacactgttgagcttctgttctgctggctctgtttgtttccaggcttcagcgttatgcctgtcagctgagtgcccacactgagcttcattttggagattgttggctttctccaggtcagaaacaggagcatcaggagggagacaggaactgggctggtgctcagaggaactctgggagttcagacgagagcggacgcgtgggtcgacgatatcccgggaattccggaccc

SEQ ID NO: 131015 - DNA, 774 bp, Homo Sapiens
gagctttactgaaatctattaatccagtatttagcacatatttagcattaagcctcaaacgatacagcaatatgttacattctcttgtgaaaacagttgttgtagactgttaattttttttaaatgtaactccgacttgtgcctaataggatttgacctttaagaggtttcttttgctgtggatggggtggctttgcttgaacttccattctgtgccttgtagctggtgaggctgggagtatggatggtcctggtgcccttggcaccttgattcaatgttctgtaggtgttttttctaatttcatcagttcttgaaatcggagatgtactctcgatgctgggctgctcttgcctcctcactgtgttttcaggggtgtcttcaggttgagacctagcgatttcgaagcgcttggctctgcggtgagaatgaaagatggtgacctttacctgtatgagtgaggctctgaaacttcaaagagccattagagacagaagggatgagggaggcagagtgagcaggtggtcctgtttgggggctgagagggttagaagcaatcgatggtttagtagcaggtggattagggaggttagagctgtcaccactagaagagggcagagaactgcttttcccagagctgggagaaagggctggaatcttagaagcaggtaaggagggggaagtaggcttaaagtccccaccagatttcttagcacttccattagcctgacgatattggcggggatcctgcagtttggactgcttgccgggtttgt

SEQ ID NO: 131016 - DNA, 737 bp, Homo Sapiens
  misc_feature (619)..(619): n is a, c, g, or t
  misc_feature (720)..(720): n is a, c, g, or t
gcgcactgaacgttgctttattcattggttaattttcctaacagcgttgtaaacccaggccgggatgtcctgagcgttctggcagaggcccgtgcagcctcggccccttccggtccgcgctagcctggcctttgccctgagctccctcagcttcgcaagatgagcttcccagacggggccggggcctggctctgagggaaaggcgttcccgccaggtctggggccgccttcccatgttctctaaagcccagcacctgtggttcgttggcggggctcgtgggattggggtaagggctgtggtttcgaggccgtctgtggccgcccccagcccctagtctgcgagacgccggccccgcctttgggcggcctcctgcctggggggcctccaggcctggctacgccgaccggcacctgaactccctgcacgcgttgcatgcctcccacagagatgggactgcttagtaagaccttgctcaggtcagtcaggaagcgggttggcgggcaccgcgggacactcagactggcaaacaccctctccgagtgctgctctcttgatcccacttagcatttttgtctcggggttgctcacatggaggactgcttggtgagaggccggtancactgaaaagggcactggacgatctgcttttagcattcactcccacccccaacctccctggccctccctgcagctgcgatccctgtgggtcatttccctgncgctttgtttgcatgga

SEQ ID NO: 131017 - DNA, 881 bp, Homo Sapiens
cttcaacaggcgcccccgggagctgatttattggcggtttatttggaaaaacgctatcgctcttaaattctggaggggggaaaaaacacgctcgcggtggactttaaccttgggctgaaaccacagcgctttgttttcggaggtgcttcctggggcgccgcggcagggctggggcctagcgggggaagctgggccggaatgtggcccagcagcctctccactcccaggctgcgcttctgcctgcccgggcaagcgctcaaattcctctgggcccggccggaagccctcggtccctccaaaagtgcttctagaaattctaggaaggagccgaagctccttggctgagggcgtccttggagcgaggtttccaaaccctcccatcccaagcccccggcatgtgccacccgccgtttgcagtcgtgtcactggcatggtgaggttttcgggaggcatccatgaagggctgaatgctccggtttccgtgcaccttaagtctggagcaaaaccccgctggaggtggttggctccaatcgcgcccatggtttgcttggctgatgtaagacaccagcgcgaaggcctgttcccgcccctctggcagagataaactaagcgttattattgcaaatgcgccctctctggatctgctccccacgactattcgtgtgtcaaaaccgccgcttccaccaggcagccacaagggcgagacccattcccgctttccccattgctgagccaaagctcgcaccaaggagggctccaagccgggaccccggttggagaaaatcctggggcatccagcggcacggagggtgggaaccagatgagcctccgcctccgcgcacggtgcccacagtcacaccccccgttggtccacctgtgcc

SEQ ID NO: 131018 - DNA, 1379 bp, Homo Sapiens
  misc_feature (98)..(158): n is a, c, g, or t
  misc_feature (817)..(817): n is a, c, g, or t
cccccccgggcccacaacccccttttccctttgtccactcgggggggcccctctttttgggggggttgcccctgggcaacccgggtttttgttgggtnnnnnnnnnnnnnnnnnnnnnnnnnnnnnnnnnnnnnnnnnnnnnnnnnnnnnnnnnnnnnccccgctttgttgctgccccctggcccttggccgacgggcgccggtgctgttgctcccccccgttctttgtggcccttcctgaccccgccaggcctggccgctgggcccaggcgggctgcaagggggtgtattacgtgtgcgcgctcagcatgttcgccagcgtgctgctcacgggcctgctcagcctgcagggctgcctggcagtcacccgccccttcctggcgcctcggctgggcagcccggcctttggccgccgccttctgctggcggttctggctggcggccctgttgctcttcgtcccggccgccgtctaccgccacctgtggagggaccgcgtatgccagctgtgccacccgtcgccggtccacgccgccgcccacctgagcctggagactctgaccgctttcgtgcttcctttcgggctgatgctcggctgctacagcgtgacgctggcacggcttcggggcgcccgctggggctccgggcggcacggggcgcgtgtgggccggctggtgagcgccatcgtgcttgtcttcggcttgctctgggccccctaccacgcagtcaaccttctgcaggcggtcgcagcgctggctccaccggaaggggccttggcgaagctgtgcggagccggccaggcggcgcgagcgggaactnacggccttggccttcttcagttctagcgtcaacccggtgctctacgtcttcaccgctggagatctgctgccccgggcaggtccccgtttcctcacgcggctcttcgaaggctctggggaggcccgagggggcggccgctctagggaagggaccatggagctccgaactacccctcagctgaaagtggtggggcagggccgcggcaatggagacccggggggtgggatggagaaggacggtccggaatgggacctttgacagcagaccctacaacctgctgcccttccctgtccctttccaccccccacccaccctccagaggtcagtgttctgggacatttggggacccttctttgactagagtttggatctggctgggtaggattactatacacttggggcaggcccaggctcctccaaactgagggattatgagggtggtgatggtccctgttaaggactattgtgtgcttgcaagttggcatgtacccatgtgccagcattgcttacttgttgccaatagctgttattgtgaaatacactgggaagccattagatgatg

SEQ ID NO: 131019 - DNA, 948 bp, Homo Sapiens
agccagcttggtgcccccacgcctcatccattgcttcattcttttattcaacaaatgtgtctgcttcttaaacacatatattgtgtctggcaaggataagctgctagagagcctgaactgcaaggtgctggatgtgtaccggcactgcaccggcacccagcaggaggccaacctgggcaccgtgcagatgctgaccatcattgagcaccagctggatgagctgctagagaacctggagcacgtgccccaggtcaagatcgagcaggccgagagggcaaaggagaaggagcggcgcatcagacttcgagaagagaagctccagatgcaaaagatcctacaggaggagcatttgcagcgggcccgggcgcgcgcccaggctgagatcaagaagaagagaggcaggacactggtatgccgctcacgacccccagcccacaggatcaaacaacagtctgagcacacactgatggacaaggaggaggaggagctgctatttttctttacttaatcttcgcagaccatagctgttctggctgaaggcttagcaaagatgttggcagaggaagcagagactgggctgggtctcgagtggcccaactgagtcctctctgtctcctgtgtgctcccttcctcacctgaataaattcatgtctctctggagtcttgaaggcctgcttaaggatgcagccaccattgccaaatctcagcaccccgccggttcatcatttaaccctaagcagatgcttgagggcaagagcatgacaccttggttcccatctaaaacagctgctctgcgagacaaaagctaattccacgctgagtgtagtgtgagatcagcctctgtgcaaagaccaaagaaatacaagcaggcagctaggtatatggcagggccagcactaccaactaaaggagaaacaatgggctgaatgccatatatgtagctacttg

SEQ ID NO: 131020 - DNA, 758 bp, Homo Sapiens
  misc_feature (699)..(699): n is a, c, g, or t
ccatgttaattccgaaggcattaaaatttattaaatgatgcaataacaacagaattctttatttacaatagcattatttaacatcaaataagcaaatagcatcagcaaagcaatattaacttgcataaatgtatttaaaatttctctgaatatatctacctttgcataaactgctcacactagaaatacaaacatcaatgcaggtgaacaaagtgatgttcagagtcaactccattttgaaaataaatcacaacctgaaacactgtaagctttctcctgaagaaccatagttaatatattgcttaattttacccttgtataatcttttcatatacacacatctcagatgcaacttcatgaggaactgtacaaataaaactcacaaatgacaaaggaaaaaaatgacagttaaatgtctgaagaaatgtatcatcatcactattcaaacaacataaaggttaagtgatgatgcacttattcaaaaattgtacacaattcactatacaaatataatacatcggacagctatgtaggaatatacaagacttaaaaacagatctaaggcattatgctagattttagcattttgaggttcttgcacatagcttttacctgtagtaagaaacttaaaagattttgctttagtctataaagaaacaccagggagaaaattctaattaaaatcgaagccactacagntattttcttttgtgcagaggatgctttgctcttaggcagcatacaccatacaacactag

SEQ ID NO: 131021 - DNA, 744 bp, Homo Sapiens
atgtaaactatcaaatgtttatttaaatttccatttaaaatattttcaagtaaaatatgtacaaaaatggttataaaatggttgaagcaactagaagcgtgacaggtataatacatataaatacaaccaaaattcaattcaatgcaaagttgaatgacatcatattgcaccaaaatttattccatacaaaagcacatgcatcaagagtttccataagatgaaaacaaacacacttacttcatagcatcttaccacttacttacacaaatagcccataaacaccatctggcattgtgattgcagtaccagaactctccccagagggaactcatttagctatagaagaatccattttatttcacatatcacatgcttgtgcaggcatcagtgctaggaaccctaagaaacaacgcaatccacagatgaaagtctctctgcaccatttatatcttcatagataaatatcttagttctaatatgattggaatgtggatgcagaaataaaatgcagttttgctctttaagaattttatcaatgtaagacattgtattaaatttgtataaaatacacacaatcccctctactaagtttcatgatcacagtgccagagtgaagaaactctgcttgagttgaggaccagttagttaggatattgaggatcactctttttcagctggatctctctgttcttgtgttttcaatcactagaccaaacccacgatgcccctgaaattctgggaatg

SEQ ID NO: 131022 - DNA, 582 bp, Homo Sapiens
  misc_feature (372)..(372): n is a, c, g, or t
agaacacagaaatctttattttacaaaatgtactttgcctctgcaatattcttattttaatccataacaactcaaacataattggcaagaaaaaagtatccaatcatacgtagctatattctgatttgaaaaatacagtatttcagagttgcatgtttgattctctgctgtggtcttttgtttgctataggttgttgaaatcacagtgagaacatctcaatcatcacattagtccacaaacataatagaaaaagaaggtattacacatttccaggtattctgcactatcgtgacattccttaaaaataagtcaaatttcttcattcattcatttattcacttgttgctgtatatgcaacagggagttccatnaatatgataatgcagattctgttctgtcttctatcatgttttgaagggagtttgctttcattggactctcatcccttattacataaagtattgggaaaaatggtctctgctctctaagccaagagatgaaagctattattctggcagattctggtgtatcaagttctggaaggtctgtcataggctgtgggattgatgcatagttttgaa

SEQ ID NO: 131023 - DNA, 364 bp, Homo Sapiens
tttttaaatgttaactattatgtttactaagaatatgctggcaagaagcagtctttattacatcaaaacagaagtaaaaacggttacccagtttttttgaatatgcatccaacttgtaagctgcctgctcaagagctgctacctgctcttcaatgacattgatctgatccagataaggctgcagtccagcatatttctggtttaagtcctttaagttcctactaatgtttatagcaatatctttcatttcaagatacttcaagctggtgagtttattcatattttccaggagcttatagtcttcactggtggcagtcagttcaccagtcaggtaagtggccattttggagaacatgtcccggca

SEQ ID NO: 131024 - DNA, 1858 bp, Homo Sapiens
  misc_feature (1740)..(1774): n is a, c, g, or t
cagtggggtgtccacgtatattaagtttcctgttagcaggtggtttttttaaggcagggggggtaattaagggggccagggttataccttttttaagagaatgggcttattggcaagccaggtgttgggaagggttgttttggaaaggtgaccagttttaaagatgagaagggaggccccacagccaaccatttccaaggaaggatcaggagggaataagatgaatgactggtttgggaagcaggagggggaaaatgtccagaaaacaggaagtaagaaaactgtttggggatatgtaattgggggacttcagacaccttccccaggtggttaatgtggtgttctggggtaaggggctgcctatctttcaacgtagactggtcagtcagtatgtcccattgtctgatgtttttagtgtgcaaagaagtcgattaggtccctaagatccccccaaatcctacatacacagtaggaaggtattttataaaatcctttattttatgagtggcaatcgtcacctccctacccaacacataaacacacatacccatctagtctttgttttcatcacatttcccaaactgatcgcatgtcaatgtgactcacatagaaaataaacaagaggggcccatcacatacgccaagttatcaatactcctttcaccatttctgctcaatctagaagactcagcttggaattattttaagattttatgttatttgcaatattatggaaaagtaagttaccgacattcacaaggtgataagctgcaaagaacaagtttgttttgttttcctttttaaatttagaatcttgtttacaacacattagcatcattaacagaaaaacgaccatttacatagtaactaaaaaaccagccacttaagaaaataatgtagtaatcaaccactaccagagaaaataggtcctctcatttgattttactggtaagtccagctgttttctgaactttgtgagagtctctgtcctgaatatggcaaagcattcaagtaaaaggtaggaagttataagtgtgagattctgagggattctgtctcaaagaaggttcaggaatagccacagtcctccagtttactcgaacgttgagatgttcctgtgatgaccagcataatttccttttgaggaattttcacaattcatcagcctcaggattcaggttttataagacattcttccacattgaaaaagaaaagactctgtcccatagaaataagtttctcatcgcttctccagcttcttgtacttggcttccagtttttttgaatatgcatccgacttgtaagctgcctgctcaagagctgctacctgctcttcaatgacattgatctgatccagataaggctgcagtccagcatatttctggtttaagtcctttaagttcctactaatgtttatagcaatatctttcatttcaagatacttcaagctggtgagtttattcatattttccaggagcttatagtcttcactggtggccgtcagttccccagtcaggtaagtggccattttggagaacatgtcccggcagagctcagtgatgtcagcttcagcaggctcctttgcttcctcagctgtctccacggcggcatcgtctcgggcgggctcatcactccgggtcgccagtacgccctcggctgccgccgccatagcggaccccgcgctgtttccccggccgtaatggccgaattcccgggcatatgtccggtaccgtcgactgnnnnnnnnnnnnnnnnnnnnnnnnnnnnnnnnnnncggccgcttcctcgctcactactcgctgcgctcgtcgttcgaaatggccgacgctagcgccctatatgagtcagtgccaagttt

SEQ ID NO: 131025 - DNA, 1234 bp, Homo Sapiens
gtgagggctgggaaattgtaaatttccttttttcagtatgctttaataattctctttcaaattacaaagtgcacgttttaaagaaagcccaatgatgaagatgttgactcctaagcagtgtgcccacaccactcctgcctgtggccctcattctgcctgctgtgcctttgaaggattcagctcaggaggctgggatcagcttcccttcgcagaaggagccataccaggttggaagtggggagttccacttcaacaaagccctgggccactgagggcggggagctgcagggagggcgggaggctttccgtacagcacgcacagctggctgcctcttttctttgagtacacttgggctgaggcaatgagcaagcacaactgcttcgcctgcagtgccctctcgtggcagacttgcctctagagatagcagccaggcaaagcctgcatgccagcgctgctgacaaatcacttttgaggctcagagctgaacaaaaaagtatgagaatgagtcacattgtgcatttacatgtatgtcctaggagagggttatgtccatcacttgaggcaggaccagtggtctggggtagggcagctgggcatctaagaagccggaagcaaggctaacgtccatcataagtagttaccatccacagactgaacccccatgccaggccgtggagcacagctcaacgtggcttttcaaagaggtactcaagatctggggcacgcagtctctgctctttgtttttgtttttagcaaagtctctcagcagggccatgacttcattttcaaatatttctggggctggtttagcttctgtggcccagtagtaaatatcccagtcattactaggctcgttaatcaggcggtcatagaggttcagctgcttttctgtcatgtgctgcagatgttctttagcaaaaagactaagaagaatgcagttttccaacattcccctctttctgctctcatagagcaggcgggctcttttggtttctatggattcatcagttctctcctgccatggaggcaaagggatttcaatcatgtccttttgggaatctgttgggctgtcacctctgtagaagcgtctgaatgatgtcacactgagcaaaggagacaataggctgtgccttgacagagcaagcatcagcgacgaagtcgagaacactgtagacaccgccattttcccctcgtgccgattcaacacccggcctcgtacctagcctaggttt

SEQ ID NO: 131026 - DNA, 1352 bp, Homo Sapiens
cagaggaataatgctcttcccagcaccaaagctttaattcctcaggctgacagcggtgcagggggcctggtcctcatcagggtttcagcagcagatgccatcacatcttgttcttgggaaactgctgacgaccgaaccctggggctgagctcccaagacagaggctgggcagggccagggccttgaacccatgcacacctggctccagtccctctggctggtccgtggagagcgctggggtcgcgccctcaaatccctctcctgttctctggtgacttcccacttcccactcccccacctctgtcctcacaagcggcgtggctgagggaagagagccatcccactccacgctgtagcagaggctgcccaacctgattaaagctgcccagagtcaagaggagcctgggattgagactaagtcccctcaactgcatgacatgaaaagttcctttttggcaaagctgcacctgagagtcctgaggaattctgaaggggccgagtccccgtccttcgtgccccttatccctgctgtccacgctgaggcctgagcctgcctctctgccttctcagcagagcggccggccgctgtgaccactgctctcaggagagtgggggatgagaggccagaggtgatgcaggctcagaccccggcttcaggagctcggggtggggtcgtgggaccgtgcgcgatagcatcagtccacaggggcaggcagaggcggtgtggagatgccacggggaagccacctgcccacgaggggtccacgggagtccaggctacaggcagaaagccttgaactcagggcaagcagcatggaccttccctgagagcctggctgcaggtgagggatggcaggctaggagggtgcccaggaggggtgggtgcagacgtggccagagggaaggcccaagagacgtctctgaagccaccgttcctgattattcagaggcagggtccacagtgagtgactcggtggggctggaggaacccagggtgacccagagggggctctggagcgggtccctaacatctgaaaaagtcctcccagggaactcggagctggaacttccaggcagcttcgggggtgacatttgtatccggccagccgagcggggaaaggagaccttgtgtcctggcaacagggagagccgggactgggatggccacagctcagcctccaggtgaggagcccagggccctgctcgagctgtgacctccacggtcacggagtcctcggaaaaagagaagttgagcttgttcccctggtagaagatgccggagacgctcactctggagatccccgacagacacacagggtcaaaggtcacacccgagggttaaggggtcccgg

SEQ ID NO: 131027 - DNA, 700 bp, Homo Sapiens
ggggaaggccatatcctttattaaaatcgccacaaatacaaaagcatcactgaactaaaaatacatcatatacgtatattctcatattcttagaaacttatcacaggtttattggctttccatcttatcacatgtcatatctcgaaaacattaaatagaaacaaaagtctccatgcaattttcagatgaaaaacattctgtgcattttcaatttgtgtgttttcatttagatggttgaaagggtttgctaacaactgtttcccaatttaggctttctggccatgggagtgacatgtcctgtgtcatgtagaatttgatagcttgtaatgtccatttaaatttcaagtgtatcttgccttctctgtagcaagagccagcctgcggatattggatatacaaccagctgcagcttcctggagatcctggtcaggggacccaaccatatccagtagaagctttactgcaccattctcatgcatggtgatgcagttatcggcgtcttctgagagttggtacaaggcctgagctgtcgcccgatgcacgttggtgtcatttgatttcagataacgcactagtggagccactgctttgtgctcaccgaaggccactctattcctgccccacatacagcaacgtgaaatagcttctgctagatgatgtctcaatttattgttatttgtatttgccagtttggacaata

SEQ ID NO: 131028 - DNA, 364 bp, Homo Sapiens
ttttagacttcataacaaaaaacatttattaagtagccacaatctaacaagccctgctcacctgcctcttctccttcctgtctgggagggggctccttggtgtgcagagccacaaggtgggggtccaagttggggagctcccagttcttccccataggccttgctgtcagtcagccatgggtcccttttggtaccagagacttgtgaccctggactcgaacctcttctgcccaagcactcgcctgctggcaactctggctggagggcttggcccagcttctggccccacagccccctgaggtccatgcagccctgtggcagccaggcctacttgagcacgagcatgggctctgtgccatccttg

SEQ ID NO: 131029 - DNA, 1033 bp, Homo Sapiens
  misc_feature (860)..(896): n is a, c, g, or t
  misc_feature (915)..(930): n is a, c, g, or t
cacttttgaattctgttttatatcaagctataaaaacctggatcctgttcaacatacatacaaaagcagtactctaaaaaataattattattatattaacaatatcaaacacgctaactcctacacacgtacaaagaccttgggcatcctttataccggccacttcctggccacagctttgtaaggcagtacctgggaaaaggggacagacccaagagagccggccccaaatcctgactcagcactgcagaggcatcagccgggctgagtcatgcctgagatcgaagggccccctctcaggctgagaaggaactttcaggcccagggaggagcagagccttagggggagcacatgccgagcaggaaaacgagctcacattttcctggggtagagcgaggtgcccggcagggcaggggatgaacggagggtgcggtgggcagaataacggcctcccaaagatgtccacgtgacagtccccagagcctgtgactatgttaggttacacagccagtgggaactaaagttgcagatggaactaaggtggctaatcagctgacctgaaaatagaaagacgacctgggttctctgggtaggcgcaatgtgatcataagcgtccttaaaagcggtagagcaggccgggtacagtgactcatgcctattatccccagcactttaggaggctaaggctaccagatccccttgagccccggagttcccagacaagcctaggccaccagaatgagacccctgtatcccacccaaaaatatgtagctgggcgctgggggattgttctcacggggactgagacacagaggatcacttgaacccggaggtcccggctgcagtgagcccttgatnnnnnnnnnnnnnnnnnnnnnnnnnnnnnnnnnnnnnccgcaagaacctgtctccnnnnnnnnnnnnnnnngtggtgccgctcgcgatctagaactacgacgcgtggtcgacgatatcccgggattccggaccggaccagcctgctttttgtaccactggtcctatatcacatg

SEQ ID NO: 131030 - DNA, 658 bp, Homo Sapiens
  misc_feature (430)..(541): n is a, c, g, or t
cacttttgaattctgttttatatcaagctataaaaacctggatcctgttcaacatacatacaaaagcagtactctaaaaaataattattattatattaacaatatcaaacacgctaactcctacacacgtacaaagaccttgggcatcctttataccggccacttcctggccacagctttgtaaggcagtacctgggaaaaggggacagacccaagagagccggccccaaatcctgactcagcactgcagaggcatcagccgggctgagtcatgcctgagatcgaagggccccctctcaggctgagaaggaactttcaggcccagggaggagcagagccttagggggagcacatgccgagcaggaaaacgagctcacattttcctggggtaaagcgaggtgcccggcagggcaggggatgaacggagggnnnnnnnnnnnnnnnnnnnnnnnnnnnnnnnnnnnnnnnnnnnnnnnnnnnnnnnnnnnnnnnnnnnnnnnnnnnnnnnnnnnnnnnnnnnnnnnnnnnnnnnnnnnnnnnngtggctaatcagctgacctgaaaatagaaagacgacctgggttctctgggtaggcgcaatgtgatcataagcgtccttaaaagcggtagagcaggccgggtacagtgactcatgcct

SEQ ID NO: 131031 - DNA, 609 bp, Homo Sapiens
  misc_feature (431)..(542): n is a, c, g, or t
tcacttttgaattctgttttatatcaagctataaaaacctggatcctgttcaacatacatacaaaagcagtactctaaaaaataattattattatattaacaatatcaaacacgctaactcctacacacgtacaaagaccttgggcatcctttataccggccacttcctggccacagctttgtaaggcagtacctgggaaaaggggacggacccaagagagccggccccaaatcctgactcagcactgcagaggcatcagccgggctgagtcatgcctgagtccgaagggccccctctcaggctgagaaggaactttcaggcccagggaggagcagagccttagggggagcacatgccgagcaggaaaacgagctcacattttcctggggtagagcgaggtgcccggcagggcaggggatgaacggagggnnnnnnnnnnnnnnnnnnnnnnnnnnnnnnnnnnnnnnnnnnnnnnnnnnnnnnnnnnnnnnnnnnnnnnnnnnnnnnnnnnnnnnnnnnnnnnnnnnnnnnnnnnnnnnnngtggctaatcagctgacctgaaaatagaaagacgacctgggttctctggtaggcgcaatggatcata

SEQ ID NO: 131032 - DNA, 592 bp, Homo Sapiens
  misc_feature (432)..(507): n is a, c, g, or t
  misc_feature (520)..(520): n is a, c, g, or t
  misc_feature (538)..(538): n is a, c, g, or t
  misc_feature (579)..(579): n is a, c, g, or t
ttcacttttgaattctgttttatatcaagctataaaaacctggatcctgttcaacatacatacaaaagcagtactctaaaaaataattattattatattaacaatatcaaacacgctaactcctacacacgtacaaagaccttgggcatcctttataccggccacttcctggccacagctttgtaaggcagtacctgggaaaaggggacagacccaagagagccggccccaaatcctgactcagcactgcagaggcatcagccgggctgagtcatgcctgagatcgaagggccccctctcaggctgagaaggaactttcaggcccagggaggagcagagccttagggggagcacatgccgagcaggaaaacgagctcacattttcctggggtagagcgaggtgcccggcagggcaggggatgaacggagggnnnnnnnnnnnnnnnnnnnnnnnnnnnnnnnnnnnnnnnnnnnnnnnnnnnnnnnnnnnnnnnnnnnnnnnnnnnncagcagtgggaanctaaagtgcagatggaanctaggtggctaatcagctgacctgaaaatagaaagacgaanctgggttctctgg

SEQ ID NO: 131033 - DNA, 852 bp, Homo Sapiens
  misc_feature (109)..(127): n is a, c, g, or t
  misc_feature (141)..(166): n is a, c, g, or t
  misc_feature (169)..(257): n is a, c, g, or t
  misc_feature (334)..(334): n is a, c, g, or t
  misc_feature (545)..(754): n is a, c, g, or t
  misc_feature (767)..(767): n is a, c, g, or t
  misc_feature (817)..(817): n is a, c, g, or t
  misc_feature (831)..(831): n is a, c, g, or t
gcccccgggttttctttttgggaaacaacattttggccccctgttttccctttcccttttgggggggcccccgcccccacaaaaaaaagggtttataaaaatctttttnnnnnnnnnnnnnnnnnnnccccacattttttnnnnnnnnnnnnnnnnnnnnnnnnnnggnnnnnnnnnnnnnnnnnnnnnnnnnnnnnnnnnnnnnnnnnnnnnnnnnnnnnnnnnnnnnnnnnnnnnnnnnnnnnnnnnnnnnnnnngcgctcaccaaagcctcagagttttattatcaggagctcacattcaggtacagattcctatgaagtttgcctcaccntggagggaagagggagagagcagggctggctgagatggggctgccagaggcatggtctccagctgggtaagcgggattctgagagcccctggtgcacacggagcctcctggcacacacaggattgtctcaaacacagaggacctctggcacactcaagggcactgaatctagcaatgagtctgcacttctgttatgagagtgggtttttcnnnnnnnnnnnnnnnnnnnnnnnnnnnnnnnnnnnnnnnnnnnnnnnnnnnnnnnnnnnnnnnnnnnnnnnnnnnnnnnnnnnnnnnnnnnnnnnnnnnnnnnnnnnnnnnnnnnnnnnnnnnnnnnnnnnnnnnnnnnnnnnnnnnnnnnnnnnnnnnnnnnnnnnnnnnnnnnnnnnnnnnnnnnnnnnnnnnnnnnnnnnnnnnnnnagctgcttcccanagcacagcttcctccagggagtctccagcagcgcgttgctcagcccgtangtgcctggcgtcanacgataggatcaggctccctc

SEQ ID NO: 131034 - DNA, 807 bp, Homo Sapiens
  misc_feature (721)..(767): n is a, c, g, or t
gtcctgcggcccaccgaccggtaacaaccaaccttcgcccaaaaaccgcccccatacccacaaatccagccgccgcccccgcccagggcccccatgcgacctgatagaccggtatggtggctgcccccataatcagcatctaccacatcccacgcgcatggggtctctcacagcggcaccatgcccatggacagatggactgacccacaggcatccacatgtggtgctgaagaagccatgaggaaagggggagtgtgggaagggcctcgtccagggtgtctggctgcacaggagacatagcagctcccactggcaccctgcatacaagggaaaggcctcgaaatgcgctcaccaaagcctcagagttttattatcaggagctcacattcaggtacagattcctatgaagtttgcctcacctggagggaagagggagagagcagggctggctgagatggggctgccagaggcatggtctccagctgggtaagcgggattctgagagcccctggtgcacacggagcctcctggcacacacaggattgtctcaaacacagaggacctctggcacactcaagggcactgaatctagcaatgagtctgcacttctgttatgagagtgggtttttcggccaggcatggtggctcacgcctgtaatcccagcactttgggattacaatgtgagccgctgcgcccagcccaaatcttccttttttgtgnnnnnnnnnnnnnnnnnnnnnnnnnnnnnnnnnnnnnnnnnnnnnnnctcgtgccgaattcaaacacccagcctcgtacctacctga

SEQ ID NO: 131035 - DNA, 1183 bp, Homo Sapiens
  misc_feature (91)..(151): n is a, c, g, or t
  misc_feature (354)..(354): n is a, c, g, or t
atttcccggggtaaattttctgggcccaaagcccacggggggccagtgtccatatgcccgttatggccaaaaggaaagttttttcccgttnnnnnnnnnnnnnnnnnnnnnnnnnnnnnnnnnnnnnnnnnnnnnnnnnnnnnnnnnnnnnaggaggtggggttagctctgcagtgggaactcatagggttcgggtctcccagtgggagaggtcctggtccatcatgctacgctcagtgaagtcacggtggccgtccgcatctaccaggatgatagtgttgttctgggtgccgtagccagggcagcgcacgcacacagccgcgtacttgctcagcatgggctgcacgtactccnccaccctgttcctcgatggccgggtctggcagctgcgcctcttcattgttgagcacatccaggaggctggcgatgagcacattccttgggcagcgcctggctccgttccacagcctccaggaagagctgcttcccaaagcacagcttcctccagggagtctccagcagcgcgttgctcagcccgtaggtgcctggcgtcaaaacgataggatcaggctcccctcggttcccatagtagcaaatgacgtctccctttgctgtgctcaggtcggctgctatgaggttgaagccattgtacagatggccctccatagagaccttcttcaggtaggacaagctgtccacgtcagtggtcagaaagtgggtgacaagttcacctcgccctcgggcctgccagtccagctgcggctgcaggtagttggtgagtgctgccagcttgccacgtgtgctgatgcccagccatgtgcctccttccttgccttcctccatgtccagcccactgaggatctcgttgttgttcccccagaagtcagctaacttggagggtcggctgtagaattcatccctgttggctgccaagatgagcctgtacgcgtttttggaaacagggcgaggatcaaacttaaagaagatgatgcacatggtggtgcagggcggctctgctgacacaggtcgcgaggtcttcaagcagcctggcccggtccgcgcacccagagcaccagagcccggagcccccgagcccaggccgtccagggccactagcggagtcggccagccccggaagccgcgcactcaccgcctccgcatcccgtaacccggagcgtacagc

SEQ ID NO: 131036 - DNA, 576 bp, Homo Sapiens
ccacaagtgcccctcaaaggcagggccccccaggagcccactggccaggcccagaggtggggttagctctgcagtgtgaactcataggttctggtctcccagtgggagaggtccttgtccatcatgctacgctcagtgttggtcacgtggctgtccgcatctaccaggatgatagtgttggttctggtgccgtagccagggcagcgcacgcacacagccgcgtacgagctcagcatgggctgcacgtactccccaccctggtcctcgagagccgggtctggcagctgcgcctcttcattgttgagcacatccaggaggctggcgatgagcacatccttgggcagcgcctggctccgttccacagcctccaggaagagctgcttcccaaagcacagcttcctccagggagtctccagcagcgcgttgctcagcccgtaggtgcctcgccctcgggcctgccagtccagctgcggctgcaggtagttggtgagtgctgccagcttgccacgtgtgctgatgcccagccatgtgcctccttccttgccttcctccatgtccagcccactgaggatctcc

SEQ ID NO: 131037 - DNA, 1077 bp, Homo Sapiens
  misc_feature (245)..(260): n is a, c, g, or t
ctgggaactctaaaagtttgatttgtatttaagatttttacaatctatatataggttggtctttaataaccatttatacattgcttctttttatataggtcatgtattctcctgggagagtaacaagattagaaataacaaatacagtacagaataaattaaagtgcttcaaactgcattatataatttcagaaaattggtttcacactgaaacgtttaaataagaaaaccaaatgatttcagtnnnnnnnnnnnnnnnncctcatatatgcatttgaattgctattgtttaacaaattttatcctcaatagtgtggtactggtatgttttcacagtgttccagtaacgtggcagtccgtttgggtcaaaatggatgaagttattatcatctttctttatttctggttatttaaaaagttgacttcattctccttgaagatgaataggatttattagtcaaaacgtcaaaggactatcataaaagtaattgtatttttatatataatttttcaaactcttgtatacaaaatgttctcattacacttggtgcaataaattcagaggctgttatgggatgggagatagcaaaattgggaccaatacttttctaattacttaggaaaataaaaagtggggcttggttttcctttcacaactaagtgatggagacacgacgctccagagagtctgttattctggctggttttgtttgtttctgtgaagtttagcatcactctccttgtaccaagtccttaggcctttttcaatttttctattcgtgcattaaaggcctcttcctgtatttgcagtttttcgtttatctcggtctgaatgccgattaaaatgtcatctgtgacttgatccagcactgattttacatcttcaatggtgaaaccaactaaaggatccatgtctgaggtgtcagtttctggctgagactcctcagggccttgttcttgatccaacctcttcatttccgtatccaatattgtggggggctctatgaatgttgaataaatatcaaatgagattccttcttccagaggatttgggaaagggccacatgcacctcgtgc

SEQ ID NO: 131038 - DNA, 703 bp, Homo Sapiens
tctatagcattctttttgctgcattttctttattttaagccacaggtctacttggagggtcatgcagcaagtggcttataaataaaatcaaagtctatgaatagtgtcattgcattaagagacagaattgctgggttctttcattatgtaaaaagctcacatcttgggaatccatgagttggtaggttttatggaataccactttctggagattgagttgtaacccaacccattgacttcatcacagctttcttccatgtagaataacgaatttcactttcctccgcattaatctgaggttcaaaccgctccatcgtgacggcagacaaatcctcgggttcgagactccatacgccgactccttctgcagcccctgccgccatagccgcacccagtgcagtggtttcgggcattgagggcttcactactggtatatacagaatgtctgcttgtagctgcataagaattttgttgctggtcattcctccatctacctgcaaatgactgagtggaattccacagtctcgattcatggcatccaaaatctctcgagtttggaaacaaacagcttctaatgcagcaaaggcaatatggcatttgttggtgaactgagtgagaccacagattatccctcttgcactgggttcccagtaaggtgcatacagccccgaaaaggctgggacaaagtagcagccataggacc

SEQ ID NO: 131039 - DNA, 934 bp, Homo Sapiens
ttttttttcctacaatcaagtttattactcaaagcaaaagttgtccatataatacattggtcgtcaatttttatttccacatggttacacaggctgaatgactagctcacaatcccaggaggtattataagttttgctcttcaaaaaatggtgttactgttgtaaggggaaaagtcctcaatgacaaagaaatgacactaatgaaaacaaaatcaagaatgatccactggtactgcaggttacagagaagctgtcagtgagcagttccccacctctcgcaagcaaaggggatcaagggctaaaaataccttagaaaaatcaaacagcacctgcaacacatgcttatataaaggccaaacttgcaaattcttccttctcgtccatgctgcccaaatgtgaaggaattacatataaggctaaaatctggcgaatcttctcacttcttcctcttctttgtggaatataatttttctgcgagtgggactgggacaatcccttcacattcttttagttcctgggtcagagggtgtttgacaatattccctctaatcacatctatatctcgagacaagtgctccaccatgctttcaacagctgcggtgggtgcataaaaatccaccaagaaatacccgcctctgttgtgctgctgactgtgggcagagatcctataaggaagcgctcgttcacccaggttttccaagtccctcactattgctcctctgtccatcagggcctctatcgtacgtttcaaagtagcagcagtctctggccgctgcatggctttcaggattaaagccagctcgtagcggggcatgcctggaggatcggcgagtgcggctcggaagccagccggttcccgggacgcgaaggggcgggacggcggggacagtggggacctagaaactgctgcgccggacggctcccaggcggccgc

SEQ ID NO: 131040 - DNA, 684 bp, Homo Sapiens
gccattctgcctgccaaacaaattatattctgaagatgcctgttttgtaacccttgatgtgaattttttggtgtctgaaatttacaaaagaatgaaattgaaattgtaaaacactaaatgctttgggtttattttgaagtaatctgttactttaaaatgtcaacattaggaagccataaaacaagatattatgaaacccagtattataaatgttatctacatctaaagtattttaaaataacttattggcagctttattctttttttccttacaagatttagaatctttttggttatatgtctatttttcaattttgttatatttttaatttaagtggccaatgtggttatgaacaagatttgtatggtcagcttctgttctttcctaaaacttcagataaatatcattttagctataacctaaaaaagtgtttaaataaaatgacagatgttaatttaaaagcagcatatgctaatttactttttcatatgatgatggtctaatggaagttacatatgctttcttttgtcctaactctgaaaagtatatgtcagagttctggaatatgtctttagccaagaattttattcacttaaatttgtttacaacttgtataaagcaaaaaagaatgtgtgtaactatagtgaacgcatagttttgcttatattatgtgatgtttgccc

SEQ ID NO: 131041 - DNA, 660 bp, Homo Sapiens
ttttttatgtatgttttactcattttattagtttcaaggcttctttacaaggtgtcctttcacaaactgtatgacatgacaagtttatgcaagattactttggagtagcttttttacttttgggtggtttccttatcttattagggtttggaatcagtttctttattttaaggggttgtaatgttacagaagcctgccgaccgtcagcaagctttctcttaggttttgacagatcttcaaatgaagtgtccaaaagctctctgtcttggctttccagaggttcagtctctaaattttccccagaatcttcaattctgtcttgaagccatggtacacttaaactggggactctggggatgatggctcttacttcgtccacaaagtcagtggtgttctttttgaacgccaaggctagaacacattttaagccaatgacgggggcgattctctcactgagccgggggacctgacaggcagggacacttctgcttaggcttaactgaatcaagtgtgaggtgatcatggcaggcttgactgatttacacaccagaactaacagcagttccctcctttccagggctctggtgacttgtttacgccaatggcaagctgctttctgacgtgtgcatgcgtacactctgacacttgctggttagcatc

SEQ ID NO: 131042 - DNA, 1305 bp, Homo Sapiens
  misc_feature (698)..(698): n is a, c, g, or t
aaatgatgcaattattcataccagtttattgtaggtattgtgtttcaaaaaatttatagcataaataacttttcatgtcataaaataacttagtagaatttataataaaactttgagaatttaatatctcatcaaaatacaataaaatatggttttcaaatatgattaaccctttcggcttttcttttacttgagggcatataaaccaaaaatacccaaactatggctgcacacttaaactttaacatatttggtttattttaatgtaactcaaccattctaaattaatacatagttttccttcctgcatggttctttgtaatttttgttccttttgacttatttttctgtttcaacacagcttccttcttcattttcacctctttccatctgcaaagtcatctatctccgggcccccagaacatgtagttgaactcactcagccccttggcatcagtttctgtaatccttgcatcagtgtagggagtaactgcttgagtaactacaaaggtatttcaaaaacttcagtgcaatttggttcagttattttcattcagatgccatcaccgttcagggagattaatcactggaacccattgatccatgtagcgactttcccggcaaaaacaaataagttgacttaaggcaggatccttccattgagatgaatgtggattcgtcaccagcacgcagtgcangtccgggggctgctcggcgccctcgctcgccgcggggccagcgtcggtctccaagagcaggagctccgccagccggcccgggttgctgacgcgcaggatgttgatgtcgttctcgcagcaaaaacgcctggatcagggtgaagtggatctgcagagccacatctctgtcgtcgtcctcgtccgccgccagcaggcacaacaccacgttatcggggtcgctttcggtcttctgctctccagccgagaattcctccaaagtcatattgcaaactgcaggtcgcccagggagagagcgcggcgtgcgggctgctcctgccacggctagcgcgcgggcgcctgctttctgcactcactcacaggcgccgctccggcagctcaggacctggcgctctccggccgcccctcgcccgcccgggctcctcctcctgtgccagccgccgcagctccggccacccctcccgccttgcttgctcgctcgctccccggacctcgcctcgccacgggccgcacgacactaattggaccgctgcctcccagccactgcctaccagccactccccggccgtaatggccgaattcccgggcatatgtccggtaccgtcgactg

SEQ ID NO: 131043 - DNA, 1065 bp, Homo Sapiens
gcgaaattatcactgaccactgatccaggtacgacttgccggcaaaaccaatagttgactaagcaagatccttccagtgagatgtaatgtgaatccgtcacccagcacccagttcaagttccgcggctgctcggcgccctcgctcaccctcgggccaagcgttcggtctccaagacacggacctccgccagccggcccgggtgcctgacgcgcaaggatgtgatgtcgttctcgcagcaaaccgcctggatcagggtgaagtggatctcaagagccacatctccgtcgtcgtcctcggcccagccgccagcaggcacaacaccacggtatcggggtcgctggggacagcgggcggggccagtgagcgcagaaagcgcgggcgccctcaaccccctgcccgggtcccctgggggtcaccgcccggcccgctcgcccccgtccctttccgagacaggcagaaaagcgacaggaagtggcgcggccgggcgaggggcgcccagccaaggcgacctacccgggctggggcgggaaggggtgccatgggggacgcgcaagggccccacttacacgttgagcagcttggccgcttcgtacaccccgacagtgatcgtgcgctgactcagggctttgctgagcacttcctccagggcatcccccaccttatccatcctttcggtcttctgctctccagccgagaattcctccaaagtcatattgcaaactgcaggtcgcccagggagagagcgcggcgtgcgggctgctcctgccacggctagcgcgcgggcgcctgctttctgcactcactcacaggcgccgctccggcagctcaggcctggcgctctccggccgcccctcgcccgcccgggctcctcctcctgtgccagccgccgcagctccggccacccctcccgccttgcttgctcgctcgctcccacggacctcgcctcgccacgggccgcacgacactaattgggccgctgcctcccagccactgcctaccagccactggaggacccccggccgtaatggccgaattcccgggcatatgtccggtaccgtcgactg

SEQ ID NO: 131044 - DNA, 527 bp, Homo Sapiens
gctcttgtttaggtggtttttatttccacatctccaacagggagtctggaaacaaactgacaatactcgtgaaatcaacacccagatgaggtagaccagcactccaggatgcccctccccagtatccctcccctgttaactgttcccctggcttctaacaccatggatcagttttgcttatttctgtactttttgtaggaagagaatcatacaatgaattctctcttgatgatgaggactctgacctcttttgcttgacctcatgtctgtgaaatttatccatgttgctgtgcatagcgatattttcattcatattcgttgctgtgcagtagtattcgaccctgtgacttcactgtagcttcaactgtggatggacatttgggttggtggatggacatttgggttgtttcaggtttggggctacagtcagcgtgtggttagaaacattcttgccaatgtctcggtggacatagctttctgtggtgtacatacccaggagtgggactgctggatcagtttatacgtat

SEQ ID NO: 131045 - DNA, 1749 bp, Homo Sapiens
  misc_feature (89)..(655): n is a, c, g, or t
  misc_feature (691)..(712): n is a, c, g, or t
  misc_feature (1466)..(1466): n is a, c, g, or t
  misc_feature (1565)..(1565): n is a, c, g, or t
  misc_feature (1624)..(1624): n is a, c, g, or t
  misc_feature (1626)..(1626): n is a, c, g, or t
  misc_feature (1636)..(1636): n is a, c, g, or t
cccgaatgaggtctacagcgtgagtttggaaagccccacgtttccgaaggagaaagccgacagtatccgtaagcgccaggtcgaaccannnnnnnnnnnnnnnnnnnnnnnnnnnnnnnnnnnnnnnnnnnnnnnnnnnnnnnnnnnnnnnnnnnnnnnnnnnnnnnnnnnnnnnnnnnnnnnnnnnnnnnnnnnnnnnnnnnnnnnnnnnnnnnnnnnnnnnnnnnnnnnnnnnnnnnnnnnnnnnnnnnnnnnnnnnnnnnnnnnnnnnnnnnnnnnnnnnnnnnnnnnnnnnnnnnnnnnnnnnnnnnnnnnnnnnnnnnnnnnnnnnnnnnnnnnnnnnnnnnnnnnnnnnnnnnnnnnnnnnnnnnnnnnnnnnnnnnnnnnnnnnnnnnnnnnnnnnnnnnnnnnnnnnnnnnnnnnnnnnnnnnnnnnnnnnnnnnnnnnnnnnnnnnnnnnnnnnnnnnnnnnnnnnnnnnnnnnnnnnnnnnnnnnnnnnnnnnnnnnnnnnnnnnnnnnnnnnnnnnnnnnnnnnnnnnnnnnnnnnnnnnnnnnnnnnnnnnnnnnnnnnnnnnnnnnnnnnnnnnnnnnnnnnnnnnnnnnnnnnnnnnnnnnnnnnnnnnnnnnnnnnnnnnnnnnnnnnnnnnnnnnnnnnaagaattcggcacgagggcggccgcggctgtaggcnnnnnnnnnnnnnnnnnnnnnnacagtgcaagggttttaatagtccacactaaaataggctgtacagttttgtagtttaacattaaaagcaatcctgccttattttaaaatgcttctacttaagaatgcttcttcctcccccactccttcacttaaggtataagtctacccctaaagtgcatttctcaggcattaaaaacagcactgtgatttgctttccacagagtcctaaataacagccaccttcttcatttgagaggctacagagttcaagctgagctgtgacaggagccagggggccagggccccagaatagctttttcgaaaaaaaataattatgccaccctcctccgcggcaggtatcttctcttaccacaaataaatatttaatgcatccttggagtcatgaaatattgagaacccaattgacacttcaatttccagaaacacataaaatcatgaaggcattgtgtaaatattctgaatttggtggaactgagacaacgcgtaagggggcgggcctgaagtctcgggtttggaactgggggtttggggtagtgctgggtaggcagtcctggagcgcgcaggctattggggctactgcttgtcctcgtgggggtcaccaggaaagcctgcctcctccggggacctgcccgcctccgggagcagcgtggcgcgcactttcctcttctcccttaaagcggccggagcgcgagatcttcaaattgcggcggctgctgccggcatttgtccccgtataacttgtctggtttggnggggctcgccggcgccccccgaggagattggggtgctggttctcccgggagctgctgtcaaatccggctggcgggcaagggcgtggctcccggaacggntgggcgggaggcgaccccacgcgctcctgctttcttcgctgtgggacgattcacagggncnactgcacatncgctgtcgcatgcggagtcagggtcccgacaatggaggcaagggcttccaatggccggcgtcatcactctccgttcacttgtgcggggtctagacgctttgtccgtaagacgg

SEQ ID NO: 131046 - DNA, 1256 bp, Homo Sapiens
tagtatatgcaaaattattttatgtcaggagaaaatttatcatgttggcaacagaacatgtcctgcagacctccaagtggctggcatagtacatccaccccgtgacaggcccactgggactgtggtgaacatgcctgtaccccagtacaaagtcccctttccctaagaaatgtacagaaggagagataaagagcgtgtacccaaaaggaagaaggagaggctgggtaccctgtgccctgagctcagaacttcagggggatgaccggccagtacttgggctgctttcggtcacagtgcttgtcaaagctcagctgcaccgcggcctccatggcttggatcttggcagcactgtccccgtacaaacgcttcatctcggcctggcgccgctcaccaggcctctcagttggggcttctaccgaccggcgggtgttgcagtacaggtcgtggtcagcgttcacatagctgtccaggcgctctgcatccagctgctgctgccgccgtcgttcttctctatgcctctcggtctctgcaaagtacttggcggagctcttcagtgatttccatattgctcaggtcacattcgtacctctgcatctgactcagtctccatctcttcctctttggacaaagcttggtcttcttttgtggatgcctggatcctactgctgtaacgtggatgctgcccagatcttctgaaatgtgaagaactgcaggggtagtcctgccaggccacatgatggtcatagaaggactgaggatacgcagcctcattatcgtaagagctttggggaagaagcgcagaaggtaagtaccatggaagattgaaacaggattccacggccttcctgtaggcattgtgatggctttgcatccaagccattgcttgatgataatgttgccagtatcttgcatataccggatgagaataccaaggcctggtagctttcgatgttgatgcctttaccgctgccatctctgattgtgaaagtccaaatgggtgctgaaactccctgggaatgtctcccactcttttatggcacaagccttcagggactgaacagtaacttttctccaatgggctggtggagctcgtgggcgcgcagcttgcggatcctgggcgttggccgcgcaggggcctagttttccttggagagacagagggggagtgggggacgcgagggaggcggctgttgccgcctcgtgccgaattcgccacccaggcctcgctaccttaggaccgttatagttactggccc

SEQ ID NO: 131047 - DNA, 1934 bp, Homo Sapiens
  misc_feature (49)..(73): n is a, c, g, or t
  misc_feature (98)..(225): n is a, c, g, or t
gggaaaaaacttttgccccgtttcctttctttttgggggccggggcccnnnnnnnnnnnnnnnnnnnnnnnnngggggccgaggggggccccacaagnnnnnnnnnnnnnnnnnnnnnnnnnnnnnnnnnnnnnnnnnnnnnnnnnnnnnnnnnnnnnnnnnnnnnnnnnnnnnnnnnnnnnnnnnnnnnnnnnnnnnnnnnnnnnnnnnnnnnnnnnnnnnnnncaatctgcaaaagactttattacaaaatacagcacggggctcacagacgcttttccaatattctctaacacgtacactgaagcgctgcaaaatccctggcggtgcccgcaatctaacgtctacaataacctcaacccccttagttacagaaaaactctgcaacaggcagtggaatggagagacggcaagtcgccgcggacgcctgggctctcagctgctgaacaatgacatcgttttctccaggggttgaaatccatgtccatggctgacaacccaacaaggctgggacccaaattcgtacagagatgaggcagagtggagagaaacaactctggctgagccagagtctccagccactacttcttattcctgggctttagctcttcggctgcattacgcaggaaaatgtaattttttttctggggattataaaattcatgtccctttgaccagtcgtagctggaagcgtatgcaaatatgtttccattgtgattgaaacagcaagctgagatgggctgatctaactgttccgaagtttttagttttgttctggcatctttgtcccagaagctgaatctaccatcagatcccacagttgcaagggtgccatgaacaggatggaacgcgattccatttaccgcataaatgtcctgaggagctgaagtgttggttccattagatcgatgacatttaaaggtgaagttatctttggcgggggttcggggggttgatatagtgaatagcaactctcccctcgatacttcccagggcaaaaccagtaggccttgttctgtttgtctttaaaaatagccacacaccgatgctgatgtttcagtggagattctatcctcctgaattcagaaggttgattctctagctgatagacaatcaggcccctctctgcagttgccaccacagccatggggtatatcacgtcagcacagtaacacctttcagggagttgcaaaaccatcataggatttgacgatcgagtatcccaaaactttaaagtcttatcccagctcccagtcatcacacagctgtagtttggagctttgatccaatggatggttttaacaggagcatcatgctgtgcgatctgtatcgcttggttactgctgaggtcccacattttggcagttttatcacacgatgccgtaaacactttgctcccatcgtcactccagcagacatcaagcacaggcccagtgtgcatctgctgggcttttggaatggtctgtccactgtcttgaacttcccagcagcgaacatcattagcccatgatcctgcaataagaaagttccccggcaaggttggtgggctaaaagacagacaaccaatgctatcatcaggagatgatgttacttcaatatccttcatgggattgtgattgtctgtagttgcactgccaaacatgctggtcccactggttccaaaacctgaggttgttccaaacaggctcattttgaacctgggggtctcgccccggcggaaagcggcggccgggagcagaagggtctgaggagtttgcgaacctgctctggcgcgaaggacgagggccaggagcgcggacagaaatcccaggagcccgaagcctccttaagcctgcggtagaaactgccctgactaccgcggaaacaacgcgcgtgcctcgtgccgaattcgccacccaggcctcgctaccttaggaccgttatagttactgccg

SEQ ID NO: 131048 - DNA, 758 bp, Homo Sapiens
  misc_feature (76)..(86): n is a, c, g, or t
  misc_feature (111)..(124): n is a, c, g, or t
  misc_feature (133)..(259): n is a, c, g, or t
ggggggaatccaaccctttttcctgcccgggttttcttgggaaacagtttttcccctgttcccttccttttggggnnnnnnnnnnnaaaaaaaggtttaaaaaattttttnnnnnnnnnnnnnncggccaagnnnnnnnnnnnnnnnnnnnnnnnnnnnnnnnnnnnnnnnnnnnnnnnnnnnnnnnnnnnnnnnnnnnnnnnnnnnnnnnnnnnnnnnnnnnnnnnnnnnnnnnnnnnnnnnnnnnnnnnnnnnnnnngctatgaacacattgaatttatattttagatccacaatcaacttgacttctgaaacagttgacttttaaaagtcagggtaaaaataatcactttgatataattatcataataaatccagtgtgaataaaaatagaatacatagggcaaaatataatttcaagaaaaaccattgccttaatattttaaagaatacagaaataaaaatgtttaaaaattgtaagtagttacatttgaatcagggtaaataatagcattataacaagtggtacaattaaaagaggtcttctttaatccctgttgctacatataaattagtcatatgtaatatgtgtcacatgtaactgtacaatataaatattaaagaatacagtataaaaacatgcatgtttttaagagaaaaatctcactgtggtagctttaaagtatacaaatctggctaattgattttatttcttattttttgaatcaataattgaatatagattttgaaaatttgat

SEQ ID NO: 131049 - DNA, 657 bp, Homo Sapiens
aatataatttcatgaatgttttattatagtattcagtaattcaatattacatataattaataatttgaatacatctgttatttaatacaattcaaaacgtttttggaataaaataatataatgtgattttttaagaattaactggtttcttctgaacaaattgaaatccaaaggtcacatttctgcatggattatattcttgatgtttttgaagaaacaaactgttaatgagacttggaaaacctctgaagttaaaagtccaaagttaattccgattaaggttaacacattaacattataccatgcactgattttattttcacaaccctaagaaaaagaagttattcagatggacatggagatggaaatgatcttatacataaatctttacaaaaaataaaaggtaaacagagattagtaatttaccaaagtctaaatagtaagtcaatatctaattggcgaactggacttttagtccagaaagctttctacggcagcaggacacctcagttgctaattttaaaattgctaagatgttatcatgtaattaaaatcagaaatttgttacactttagaaagagattttctcttctgcagactattgtaattcatcaggatacagtagtttccctacttacccaccagcaatacccccag

SEQ ID NO: 131050 - DNA, 1000 bp, Homo Sapiens
ataatttcatgaatgttttattatagtattcagtaattcaatattacatataattaataatttgaatacatctgttatttaatacaattcaaaacgtttttggaataaaataatataatgtgattttttaagaattaactggtttcttctgaacaaattgaaatccaaaggtcacatttctgcatggattatattcttgatgtttttgaagaaacaaactgttaatgagacttggaaaacctctgaagttaaaagtccaaagttaattccgattaaggttaacacattaacattataccatgcactgattttattttcacaaccctcaaggtaagttgcattcagtggctcatcacaaaaccattttcttaaagttgactttgtgcaagaacatggcacctgtcctgaattttctttgttcttattctttatccagtctgtgtaattatgttggccacaacactgtaatgttttctgtaaggcattcagaatagtccacttggttatatcttcaggcttatctttagatccatactcagaaatgacaaaatcaattttgtcatgccatagttgctgaacctcctctttctttgtgatgatgaatgctgaaagtacaacctgaacagcaaaggtccatgttatcaatactgcatacacaattaggagccatctgatttcgttgtgaattcctatataacccaatagacaaaaaagaacagtagaagatcccattccaatcaaaatttgagaaataggtactatgaagtgattattttcatcaaaagctgttaaaaaaattatttctatctaataagagccatgcaccaaatcccatgaataaaagtccaagaaccaagaaagctccattaatgagattaagaaagtacttaataattattgttttgttatttcttaacattctttttcttccaagatactgatgattctgtaaaaaaccgtaagctcctcatccagtccctgaaatgctgcgttcgtttca

SEQ ID NO: 131051 - DNA, 1340 bp, Homo Sapiens
  misc_feature (670)..(670): n is a, c, g, or t
atatatgtctatgtatataatatatattttcaatagataactacattcaagtaatgaaacacaggatttacaatttccctccgaaggcagaggaaaagcagattcacacacagttcacagaggaagtaccatgagagcccggccagacggcagccaaggacgctctgggggcaggggcggggccagcagcagaagtcaccacagtcccactggtgcttatcgtggggagcgggcaggtgtgggtggagggcagggctagcctgatctgtccaggaacctcaatcttccaggaggtgctcgaatttggggttcacaaaggagaagccagcgaatgcagactggtccatggagtcgatgaggttcttgtcgctgtaggagaggcgcgccttctcgttcaggaactcctggtcaaagttactgtagtctctgggtgacttcactttgggcctgaagggtggctccaacctccgcttttccagcagagtccagtttatggtcttgaagaaggggtggattttgatgtttcccgtcactcccagcctcttggttggttccctttcaaagagcttctccaggatgtccttggactccttggtgatccagcggggataatgtggcgtgtccacacggatggactcgaagagttcatcctcatcatcaccatggaagnggggactggccaatgagcatctcgtacagaaggaccccgaaagaccaccagtccacagagaatgtgtacttcaggccctgtaggatctcaggggcgatatagtcaggggtgccgcagaaggtgctggcccggctctccccgaatatgttctctttgcacatcccaaagtcggcaatcttgatgtggccatcccggtccaacagcacattgtccagtttgaggtccctgtaaatgatgcccttgctgtgtagaaactgcagtccacacattatctcagcggcataaaacgtggcacggtagagttcaaagcggcctttgtcctggatgtggtacatcaggtcccccccgttgaggaactccatcacaaagaacaggtggtccttggtctggaaggtgcagatgaggcgggtgagaaagggattctctgtggcaagtgtcagcacccgcttctcaaccatggtgcactccacgttgtcgtcgatcaggaccacatccttcttgagggccttgatggcaaagtactctcctctgcccttcagctctccaagcagcaccttcccgaagctgcctttgctcaggaccttgtggaagatgaagatgttgatgttgcacttgctgctgccctcccagatcttgccgtagggcccactgttgtcttggactagagtag

SEQ ID NO: 131052 - DNA, 1070 bp, Homo Sapiens
  misc_feature (119)..(166): n is a, c, g, or t
ccaaaacctgagatcagttctgtgttctggaacagctctccttttcccaggaggagtccctcatggatcgcggtattggttggttgtggtgatttggggagcacgagggaaagcaatgnnnnnnnnnnnnnnnnnnnnnnnnnnnnnnnnnnnnnnnnnnnnnnnngtcactgctcgtctgacacactttgctgcgaggccgtgtcgtccaggcccatgtcctcctggcttgctctcctgcagacaaccccgagagtgtccgccacagcctcagccagacatcggtcatgaagctgcccctgctcggtggcatcagggggctcacatggctcggagaggtgccgagtggcctggctggcagccctggctgaggggcccatcacgatgttgacgctgctggatgactgggtgtcactggtattgcccccctccgcagcagagagtccggaaatgacgagcgcgctggaaaagctcctcttgccgaagaggaagctcagggtggagctggtggaggagcccaggcgtggacctgatgagcgcctcggcccgctcacggacactcaggtggccggtggtggtgacgggcgggggctgagagtgcagggacgtggccgaggcgtgcaaggagagccggctgcccgagagcctctgggccagctcgtgcacttgaggtggacgtcctgggaggaatgttttggcggcttctctaagatggggccagatgagctcagcatgggcggcctttggcttagcgctgagtgtgcctgcacggactggctcctgcctttcctcctgcctgttctctgtgtcccttcacaggatgacaccccgtgctgagcaccgccttttctgggctgttctgcgctgctctcctggctgccaccactcggggcattgttgccacctgtcgtcggggcccctcctccgtccacgtcttcaatgttgccgccactgtgctggcgggcattgcaatccttccgcatccttacccacttggtccagaaccaggtcctaattctgtccaaagtgatgggtccaccccagatgttcttcaactgcctggtgtcccc

SEQ ID NO: 131053 - DNA, 581 bp, Homo Sapiens
  misc_feature (413)..(460): n is a, c, g, or t
gccacccacggccacctgagtgtccgtgaacgtgcggaggtgctcatcaggtccagcgtgggctcatctaccagctccaccatgagcttcctcatcggcaagaggagcttttccagagagctagtcatttccggactatctgctgcggaggggggcaataccagtgacacccagtcatccagcagcgtcaacatggtgatgggcccctcagccagggctgccagtcaggccactcggcacctctcagagccatgtgagccccctgatgccaccgagcaggggcagcttcatgaccgatgtctggctgaggttgtggcggacactatcggggttgtatgcaggagagcaaggcaggaggacatgggcttggacgacacggccttgcagcaaagtgtgtcagacgagcagtgacnnnnnnnnnnnnnnnnnnnnnnnnnnnnnnnnnnnnnnnnnnnnnnnncattgctctccctcgtgctccccaaatcaccacaaccaaccaataccgcaatccatgagggactcctcctgtggaaaaggagagctgttccagaacacagaactgatctcaggtttttgaa

SEQ ID NO: 131054 - DNA, 783 bp, Homo Sapiens
gggtcccgtgaccatgtaccagctgcgtcctctgggccacgctccacttgcccgcttccacccggaaagccccccaggctgagtgcggcatgatctccatcaccgaatggcagaagattggtgtggggatcaccggtttcggcatcttcttcatcctctttggaacactcctgtactttgattccgtgctcctggcctttggaaacctgctgttcctgacgggcctgtccctcatcattggcctgaggaagaccttttggttcttcttccaacggcacaaactcaagggaaccagcttcctcctggggggtgtggttatcgtgctcctacgctggcccctcctcggcatgttcctggaaacctacggattcttcagcctctttaagggctttttccctgtcgccttcggcttcctgggcaatgtctgcaacatccccttcctgggtgcgctgttccggagacttcaaggcactagctcgatggtctgaaaaacagagatgagctccttgaacttggatcattggttgagggggctagagggagaatgggaaccaccccctcagtcccctgcactgactcactccccgacatatccggacctccccaagtccagaaggaaggaatggagctgagcaactgacgtcaaatccccaagtcgactcaagaggctgccaggaagcagagatgcagaccccaaggagactgggctggggctggtatcacaccctcactctatatttatgggaggaaaagtgaagattaaattcccaagttgtgcgtgtg

SEQ ID NO: 131055 - DNA, 1045 bp, Homo Sapiens
  misc_feature (907)..(907): n is a, c, g, or t
tctgttttttgttgtttttgcatgcagctctttttactgttctgggcagtgttttgcaatgtgtgacccctccgcactgttggtgaacatacagacctcctatatgggcacccaagcccaggccagtgtgagaaccttggcgggggggtggggaggatgagaaggggaggcccctagcctgactcagaggtgaagactgctaggccctgctgtccttggggtacgactgtcagggcctctacctccccgcccccgcgggtgggcttctggaagtggatctccaggacgtcatgcagctccgggccatccaagatatcaggaatgttgagcaccagtaccgagcggggaactggctgcgacctgatctcagccttctggatctccccattcacatacggagagactctcagagggacttgctgcccacccagtggcactgtgaactggccgatttggcacagacgctgagccactccatccctagcaaaccccagcatgacactccctggcagtagctcccgaacgtccacatcgccacctccgttcctagtcttgccaaagaagatctctagcttgtccagcagctcctcctcactcagcctgaggctggcaggaaatccagtgaccaacaccctccggccactcaactggctggacaccatcacctggatggtggtgaccatgggcagctccaagggctggacctgcacccgcagccggcactcctccatgttgatcgtgtgctccttttgttgcagcacctgctcagccactttggggtcatcaaaggtgatcagagcagagcccgcaagcagagggcagtggatccgcaaatggaaactaaagacttaggcacttccgggtcctgctgggtgtgtcctcggatacagggggatctgggcatganatggacctgtctttgggggatcccgactctttctcactgtgaagtccaagctcatctgagtctgctgtctctgagggttgaggggcatcatgggctaatggtccggtcgttgcaaactaggtcaaactgcacatgaaa

SEQ ID NO: 131056 - DNA, 107 bp, Homo Sapiens
caccgctgggtacaggtttattgtggcactggaggtgaaagggggctggtgtggccagcaccggtgtgctgtggtggtggagggagtggggtgggaggataaggtgg

SEQ ID NO: 131057 - DNA, 513 bp, Homo Sapiens
cacatttaatttttggaagatttattgcagaattaaaaaaatcacactctttttgtcttcatttcttttcctctgtatgtcttgaaggtgatctctctccatcacttccttgtacatgttcactcctttggagaattattttaatatcaggaaacttatagtctgaataatttgaaatcaggtcttgaataaaaggatgcttcaagagaacagcgacttcaattggctccaggttcttggcacctaggtcttgaaatgtttttatgaagccctctgcataaatgttctctatctttaggtggctggcaaatctattggagtcctgtgcttcacttccccctttgaacactttgagtagtgtttccatggacatcttttcattgtttgcattttcagggatttcttcatccttctgttcccttttctccgtgtcgtcttttaatttcctttcttctcttgcagcattttcctcaggttcaggaaattcctcagctgaggaaaatgctgcaagag

SEQ ID NO: 131058 - DNA, 1555 bp, Homo Sapiens
  misc_feature (56)..(174): n is a, c, g, or t
  misc_feature (229)..(299): n is a, c, g, or t
  misc_feature (348)..(386): n is a, c, g, or t
  misc_feature (395)..(428): n is a, c, g, or t
aggaaacagtattttggtattttgcggctttggtggaagcccagttacctttggannnnnnnnnnnnnnnnnnnnnnnnnnnnnnnnnnnnnnnnnnnnnnnnnnnnnnnnnnnnnnnnnnnnnnnnnnnnnnnnnnnnnnnnnnnnnnnnnnnnnnnnnnnnnnnnnnnnnnnggatcacaaaaaaaagcccgctcattaggcgggttaaatttcccgggtactgcannnnnnnnnnnnnnnnnnnnnnnnnnnnnnnnnnnnnnnnnnnnnnnnnnnnnnnnnnnnnnnnnnnnnnnttaccactttgtacaagaaagctgggtcaggaaacagctatgaccatgnnnnnnnnnnnnnnnnnnnnnnnnnnnnnnnnnnnnnnngcctcgagnnnnnnnnnnnnnnnnnnnnnnnnnnnnnnnnnncagaaaaggcaaagtttattccagtgttgacagagagagggtgagccttgcacagcaattctaaaaacatgtcatctccttcacctaagaggtaagaaccggctgtaagtcatggggtcactaaaccggccgcagttacagtaagcagaagaggtcacggctcaggccttctcagactttccctgggacacacggctctctgggggggcccggcgaaaccactcggaccaggagccatcgtacacggccacatcaggcttgccgcagaggtaggcagccaaggccacgtggcaggcggtgactcccttgcggcacgtggcaatgagaggctgcgagagatccaccttcttggtctggaacagagcacggagctcttctgggcccttctcgaagccatcctcagtcaggaagtccatgaaaggcatgttgacggcaccacggatatggcccgagtccagtcctactgcatccggctccggctcggtgcccaggaaccgcccttgagaccttgaatccaccagctggaacctcttagattcaaggttctccagcacctgctcgtaggtcttgagcagggagcggtccagtgtggctttgaagacggccggttctgggcgtgagggctcggatgtcaccgggtggccctccttcagccagttccggaagccaccattgagcactgatacggtgcggtggccaaacacacggaacatccaccagacccggggagcatagaagctgcccaggtgttcaccatcatacaccaccacgtgcgtgtggttgctgatgcccaggcggcccacatactcggcgaagccagcctcgctgggcagcatcatctcgtagggcgacgccgtgtcccggcactcttctatgtcaaagaaagaggcgccgggtacgtggcgctcgaggtactccttgcgggcctctcgggtgcctggtgagtaccaggacgcgtccagcacccgcaggccgggccccagcttgccagtcctgatggactccgccagccacttggtggagaccagcgcccggtagagcacctgatgaaccatggcttcagctctgcgtgtcactcgccccggacgccgcgctggcgctcgccccggccggctggagaagttggc

SEQ ID NO: 131059 - DNA, 788 bp, Homo Sapiens
  misc_feature (727)..(727): n is a, c, g, or t
gaaggcacagatacagatgatttattatgttttcaaaaagtgacaaaagggaatattaattctggaagatttttaatcaatttaacactattatacattagaggaaaaaattttgcacaaacattccctcacaaagccagtagtcttatatttacatagcatgattatggtaatttaaaatgttaatctatgatacaatgttacttcagaaaacatataataaaatatagttgtcttatagccatgctcccatttttgatgaaagctagttagcaaatcctaatgttagtttaatactttaaaaatgcataacagatattcagtcagcattataaaacctttaagacagaaggctgtcaagcagaatagacagagggctcatcatcacttatgtctgaatcttcatctactccttcaataaccgatttcttccctttacaacaggatacaattaatccaatcaaaaataccccaagaaaggcccagttaccaaaatagtaagcagcactgaagaaccagaacttgtgaaggaataggtatgtccgggtaacagtacactgatcttcaggagcttctgcatcacatctctttggcacagaaagggttgaattgcctttatgattatcagaagttatattaagtctctattcacgtaattttggcttccatacataacgatattggggagcaagactataaatcatgtagctagtgtgaaggacaatangcagaagtatcatgcagagaaaaaggagtgcttgggggctggttctacctcttctgatttt

SEQ ID NO: 131060 - DNA, 800 bp, Homo Sapiens
  misc_feature (82)..(83): n is a, c, g, or t
  misc_feature (92)..(92): n is a, c, g, or t
  misc_feature (94)..(95): n is a, c, g, or t
ccccccgcccaaagggaaatggtctagaaaaattttctcgaagtgcccaaggcggcccgacaaggccctcccttggttccannacgtttttncnnggggctttttctttttatttcagccaaggaatgatgcatgctacagattaatctttactttttcccacttggtttttcaaagaacaccaccacttcaacccccaatgaacatggcacttgtttgtttcttccccttctaatttattccagattttcaagtgttttcttcagtaacgctgctttctcctgcagttcaggtctgctgtctggctccatagtagctaaagactcaattaggagcactctgcattcagatgtcaaacattcccactgtttagattcttcaagttttttaagcagcaattctatcacagataaagcttctgttctcacagatgagtaggtcttattttctaaagaatatgtgattgatttacaagtttcaagcagaatttcagccaaagcctcaggatcggcatgttcttcttccaaaagcattaacccctgaaaaaaggcattcattgattgcaggactcctagctgcactttccacgtgctgagttttagccgttcacacatcagtttgcacagctcctgacgataacaacgttgggtctccgcgtttcgcggccaggctttgcccaggctttcaaaggcacccagcagatattccagctggagctccttttccttttcattctcctcttcatttttggttgtccggaccccactgctttcaagtgagttcttcttgatgagaggtcc

SEQ ID NO: 131061 - DNA, 1096 bp, Homo Sapiens
  misc_feature (452)..(460): n is a, c, g, or t
  misc_feature (838)..(838): n is a, c, g, or t
  misc_feature (925)..(925): n is a, c, g, or t
  misc_feature (1046)..(1046): n is a, c, g, or t
  misc_feature (1052)..(1053): n is a, c, g, or t
  misc_feature (1059)..(1059): n is a, c, g, or t
acttgcaagaatgtttattaaagttaattagtctttgagattttgaacacagaaaagttaaagtatattttaatcattaggaagtttctaaaaggaaagaatacttaaaaccaaagttacaaatttcaatctatatagactttaatttgtgcatttgtgataatttatgactgcaaaaaacacttgttttcttagaatgacatagtgaaaggcacatttcatttgaatgcatagtgtaccattctaaaatatcctaatttctttacaaagtgcttgagcagtcacatacacatacagtaatagcaaaatatatttacactctataaagcttaaaattttaaatctgactaaaatatatatatattttaaactacaaaaaattagtgctttcttcagcttaattgtgtaaatagaccctgccttctaatttttttagtgattgacttcaattnnnnnnnnnttctgtacactgtgtagttacgaaatgctgtcagtttttaatgctaagagcctattttagacattactttctttgctatttgagaaccaaaaaagtgagcagactgtacctcaaaagtatttagtgttttattttaatgttgtattaacacagtttaaattaaagccagacaattaagctaagttcctctattgtcctttgccgaggaaattaactggcattttaataactttaaaccacatattgttcccccattctataagattttctcccaaaggatcttgggtaataaacaatttggaaggtaatataaatgatctctggacaattttaattgttctcagagtacaatgaaaagatgctaaaacatcccagcanatatttataaatgtttttagctcaactctccataaatcagtgtgctttttcatgtttctcaatagatttacacctgaacatttttangagatgagtcactggtattaatagttattcagtatgggtacttacagcttgctatccctgaggtatatgaccctacatgctagcaaggatcaagatgctatactaaactagaaaacaatangtcaannataggngaaaaatataatcaaccaaccaaacaacaaaactaaa

SEQ ID NO: 131062 - DNA, 878 bp, Homo Sapiens
ttttgatagaatcaaacaaccatacagaaactttattgcatttagctcttcacaacagaacatatgctcatttttattatagaactaccagttatattgttgtatagccatttaagtggaaattccaataactgatttttccaatagcaatgaagctgctacatattattttgttctgtacaaaccaaaactatctccaaacaactaaaactgtgtaacttctaatggtattaatctcttagatccgatatgtaatgtgccacttttattctaaattcaaagatgaggtaacttcaaagttgcttctttttcctctgaaatgaaggactaaaataaatgtctgaaagaatataatgttgctagatattagaaacaggatgtgcagactgattaaagttcaggtctggcatgctgatttttacaatgccaaacatccctctcgggaattaaaaatatttcaatctagtttagtcctttcgtactcttcttttgcgtactgactttatcggcccatctccagatcctgtgctctcatctgcttctttcatctcatcctctgacccagacttatttgattgattactttcttcttgcccttctatgatttcaatttcttcttcactcttttcctcaggttcactttcctcttctttttcaagcatttcaccatcattttgctttttttcctcttccaggtccattggtttttccagggctgctttctcttccttttcttcttgctctagtactccttttgtttgtggtatacatatgtcgggtatgatatactctagatcgctatgtgctgtctttaactttcgttggccaacaaaatgaagtatttagtgtatgggcgcttctgctgtcgcaggatatat

SEQ ID NO: 131063 - DNA, 838 bp, Homo Sapiens
  misc_feature (745)..(745): n is a, c, g, or t
gaggacacagtaaaggacatcttggtgaaacacacacacattataacccgagctgctgaggagtttcacatctagggcatgcacatatttcatactgatacagtttacaacaactcaagggaaaaagatcataataggtacatgggaaatgtcaccaaatctatatacaaacgcattaacagggaaaacacatgaagtcaaagggagacccaaatacaagtttaaaaatacatttgaaaatcattccaaagccaaggaacttatttactgaaaactctgacattctacagaataccttgaaaaccttaagaatgcagttttaaataattcacagtctcaaaagaaaataaatttctggtttatcatcactgcttggctcagtctgcaaaacagaattatctgaacaaaactggtcaacgtggccatagtgaagagccgtgcatgccccctctgggatgccccggccttcaaggccaccccctttcgtgttcttcaggtagcctgcgatgtaggagccggtggagtggcgattcactgcaggggtgggtgctgagggtttgtttctaagaaccactcctgccccattgctggggtttggaactttctgcttgttggcttcctgtttctccttggcacgactagcaatattgcgcactctgctctgacttctggatgacaacttcctgaccagtgcccgggggagctgattggcatcctgctttgaatatagcacttggcagttggntcttcctggtcaaaggacacaagcttccgaagctgctcggtcagggcatctataggctctaacgactttgtcttcacagtcacgcccttcttg

SEQ ID NO: 131064 - DNA, 2696 bp, Homo Sapiens
  misc_feature (41)..(125): n is a, c, g, or t
  misc_feature (149)..(158): n is a, c, g, or t
  misc_feature (194)..(205): n is a, c, g, or t
  misc_feature (234)..(287): n is a, c, g, or t
  misc_feature (385)..(447): n is a, c, g, or t
  misc_feature (489)..(489): n is a, c, g, or t
  misc_feature (492)..(492): n is a, c, g, or t
  misc_feature (1556)..(1556): n is a, c, g, or t
tttttttgggtagaggagagtgttttttaaaaaaagatttnnnnnnnnnnnnnnnnnnnnnnnnnnnnnnnnnnnnnnnnnnnnnnnnnnnnnnnnnnnnnnnnnnnnnnnnnnnnnnnnnnnnngttttattttttaaggaggggttnnnnnnnnnnagcccccggtggggggcccctctcgcaaaatggttnnnnnnnnnnnnagacccccgccctttattaggacaatttnnnnnnnnnnnnnnnnnnnnnnnnnnnnnnnnnnnnnnnnnnnnnnnnnnnnnnccaaaaggcccgggctttttaaagggggtgggttttccagggttccccggtttgggaaaggcccaaggcaaggttcaaaagggggcgggaaagccctnnnnnnnnnnnnnnnnnnnnnnnnnnnnnnnnnnnnnnnnnnnnnnnnnnnnnnnnnnnnnnngttggctggccgccaacagggctggttgcgcaccacaagaanagncaggtcacacaggaacagctgcacggccttgtcaatggagctgctggctggtgtggtagccaggctgtcctgcaggtacccactggccttctcacagatggtcaggctggctggaccagactctgccttggcacagcccagcagggcccgggcagccttgaaggagtgcagagctgccctgggcaggggtctctcagactcctgcagcacccggggcaggtgctccaccagcgggcacagccgctcagccgcctcctcatcccgccgcagccagtggatcaccacagcttgtcagagaggcccaccacttggccaaccgggtctacgccggtggtggtggccatgctggaactgatggagaagctgtaggcaggagcccccgcagcatcagaacagctgttcagcagctgcaggtacccgagggcatccgagaattccttgtccccatcagctgacccagggctggggttgggctgggtcacacagttcagtgctcgctctaagagatgttcccggaatagctgagtcacctgggccagggggtccactgggttcccaggccaagctgtacaggctctcccatggggtactgagcacggaccagtccccatccacgaagaaacggtggcccacggggtggcagagccactgcatggcaggaggcactgagccactctgtgccaggcaggcctggcagggcactgctcaggaagaagcgtgtcagaaaatgcaaggcccagtgggagactggtcattcactctcaatgcagccgccacatagatctcggccagcgtcgccacagacacggcatcccctgcacactctgccaggttcagggcactcagcgccaggttggtggcagtgaggtgcccgcctgtgtgcttccccatggtgtgcagctggtgcagcttatggtagaccagggctgcgtctcgggcgctggcgctagcatccactcgcagagcacagtcctgctgcaggccccctgcccggcctgccagccagcggcctacccagagacgctgcagcaggtgacggatgaggttccagaggaggctacaanggtccaggtgggaagggggcaggggccgggcccagtgcccgcaagggccagcccacagctgctgggcagcctgggcaaagtctccccgggccaggtccaggtcagcctgcttgcgatgcctccagaagtacacggcggggcctgagtggggccgtgtgactggctcaccgtagacaaagagaagcaccaaggagacgagcaccaacagcccattgagcagccagaccactgggggcagcagccactgggcccagccagggccatctctgctctcggtgcccagcacgttgcgcccagggctatggtagacgctggtggtatctgaggggctgggaagcccccgggcccccagcaaggaggccaaggggttgcaggacaggcagaggaagacgagcgtgcacagggccaggcgggagcggtccagcatgccccggctgtgcagagacggccgctgctctggctttgccttgctgtcctcaaagactgggctgtcaggctccgagtcactgccactgccaccgctgccactgcccctgctgccaagggacaaggggctgctctggaaaggtgagccagcatccgaggggggtggggtcagtgtgtcctccacctcagtcttcacgccctccatgagcacgtctgtgttccctccactgccacaggccgacaccagatccttcagagatttgcttttgtggacagcagtgcgcagacttaggttctcctgcttgagtttctggttgctgtgttgcagaaagcgaatgtagtcgatggccttgcgcaagacagcagatttattcagctttgcctcagtgcccaccaccagatccttgagctcaatgattttgtcattgatggaggagcggtagcgcttctcaatggcgttgtgggctgtgcgcttctctccacggctctgggcagaggccggggccttgctgccagctgcgagccggttgataggcagcttctccgcatctacgaccagtgggactgttgccaagatggttccgccactcaccagggtcggcaaaggccctgtctgcacagtggtgccagagaccaggggactgagacctgccgccatcacagtggctccgtctgcctcgtgccgaattcggcgcgccgtcgacttcataccct

SEQ ID NO: 131065 - DNA, 1051 bp, Homo Sapiens
  misc_feature (60)..(78): n is a, c, g, or t
  misc_feature (860)..(860): n is a, c, g, or t
  misc_feature (928)..(928): n is a, c, g, or t
  misc_feature (935)..(935): n is a, c, g, or t
  misc_feature (998)..(998): n is a, c, g, or t
gtggcaagctaaaattaaccctcaactaaagggaataagcttgcggccgcctgctcaggnnnnnnnnnnnnnnnnnnnattgctgtataatacttttattaaagttttatggaaaaaacccacaacatttctgtatgtatcatatcatataatttccaggtgtgtcagagtccagtgacaaattacgtttgaagaacagctttaaaatccactcttgtctgccactcctttatgaaatattgaaaagcagctctgtacctcagcattaaaggttacaaaaagcaccattaaaaagaggactcacatatttaattcccttcaaagtagtcttatctctcctttctgacagacacagagctgcactcattcgaaatgctgccgtgtaataccaaccaacatgctccaatgtaccaaaattcaaacaagtctcatttatgagacccgtgtagtgattaggactaaccaacaacagtgagctttggctgtcctaaaaccacaagctgggttaggtaagtgttttgtacaggggaacagaaaagaagtaagatcatcaatacctaatatatgacttaatgtaggtatcccttgaccatttaacctgacacctacaaaatccatagtgtttagtatttcacaccaatcttactgcaaaagtgctgtgctacatacaatcaattcaagttaactccaactaatattggaactaataaaaaattaatttgtaacaaagcttattcacttcaaagcacaactgagaaaagaaatccagacaaagcccaaactagatcctagagggatccattgctaagaattggactctacaagtatagattgagttttctctttttccttctttctanatttaatttggtttttactctaagtttggtcatgcagaatcaatcttcatatcattgtgatggactanggaaacntgctaatcaagagttgaagactatgtacctccagtctgatcatggtatgggcacagcctgtanaaacagatggctagggacaatatgagatatgtattgatagcagccatacaacg

SEQ ID NO: 131066 - DNA, 685 bp, Homo Sapiens
  misc_feature (606)..(606): n is a, c, g, or t
  misc_feature (637)..(637): n is a, c, g, or t
aacaaaataatttttttaatcgactgtagtgtttcttcttcccgttagaagtagtttctttttcccctcatggtacataaatatcagagaaaagtagtctttgaaatatttacgtccaggagttctttgtttctgattatttggtgtgtgttttggtttgtgtccaaagtattggcagcttcagttttcattttctctccatcctcgggcattcttcccaaatttatataccagtcttcgtccatccacacgctccagaatttctcttttgtagtaatatctcatagctcggctgagcttttcataggtcatgctgctgttgttcttctttttaccccatagctgagccactgcctctgatttcaagaacctgaagacgccctcagatcggtcttcccattttattaatcctgggttcttgtctgggttcaagaggatgtcgcggatgaattcccataagtgagtccctctcgggttgtgctttttggtgtggcacttggcaggggggtcttgctcctttttcatatcaggtgactctgcaacaggaaggtgactggtggttgtcatggagatctgagcccggcagaaagttttgctgtccaacanatctactgtgctaccatagttggtgtcatantaatagttctcgtctttccaggtgttcatgatggaaggctcagtttgt

SEQ ID NO: 131067 - DNA, 1174 bp, Homo Sapiens
gaggatggacacgaaggaaaattttttttaacaaattaatattttttgctgcctaggcaaatggcttttgtgaaaacacttgtatgaaaagcaatacaccatttgtttttacttaccaatcactatcattaggttttgatgcaaatgggaatttacaataaaatgaaacaaataggatcagggattatatacaatactgtgatcaagtgatttgtgattcaggcaatgtactacttgaaacacatatctggatttctcattccaattgctgcagatgctatttgaggaagcaaagaatacagaaagaaaaataattaggttcattaggctaagactaataccagtaatataaacaacaaatttataacatattgcattgcaaataagcaatgtttttagtataaaaattgcatttccacaaagaagctaataacaaatacgattaaaccacttcagaaacacgtcaaagttgtacgagtcacacatatacagtgtcacagtctacataaagctttactgagaataagccatctgaagggcatgtcccgggctgaagcgatcaaagggcttttcaactgaagttcttacttccagaaagctgttcaaaaagctgccccatcaggttcagcaggcttgatgactccaaatttggctttttaagacaagctaaaatctcctccagagaatcaaaatgtaggactgaggtaaagagatattaaacaagaaggaacttttctgttggcataagagatttgaatgaattctttcgaaaatgttggtacatttgacaggatgggtcaaccacatattcataatactgacagaaataacactgtaacaccaagatgagggacacagataacctattgatacgagcaacagaaccagcctccctcttctttctctcacttcatactaaagattttatgctgaaatctcaggtttgccgtaacttttccacctttttttaaaatttatttttctctggacttctaatgtttccatcctatgaaacaacataccagctccactactgatgcatttggtaataaaaagtcacatggtaagtatttgccttaaaaatgacttttatcgtctaccccaaaggtgtttttacagcgacgcgtgggtcgacgatatcccgggaattccggaccggtaccagcctgctttt

SEQ ID NO: 131068 - DNA, 1146 bp, Homo Sapiens
  misc_feature (49)..(49): n is a, c, g, or t
  misc_feature (170)..(170): n is a, c, g, or t
ttaaaagcatgaactgtgtataaaatggggaaatggaggcaggagactntgaggtaacatggtctggtggtggcatgagtcctcaggaaggtatttgtaataaggttccacacccagctctctcagctgtttttaaatgaatgtgtgtgaggaacagatgggaaagttgngagatctgtctacagagaagcaaagttgtggttctcttgctaacttcaaggtgagggacattgggcaccctaagtttgggaacttggttgataaatacgtatatggtccattccataaatcagtggtgagtgactggcctgggttctagacctctgggaaccagcacctgagtcacagctgtctaggcctcggtgctggcctgggttctagatctctgggaaccagtgcctgagtcacagctgtcagtgcagccatttgcccagggctgctcccgagggggatgatgggaaattcagcagtgtagactcactttaaacaagctccggtgatcctgaaatgctgaagatcgtgtaggtgggttgtggggtcagcagagctgccatctgcccacgtctggaaaacaacacacggtgagtcaccggttggccatgagatctccccacttaaaggtgctgtgagcttgtctctaagatatatacctcttccttttgtcttttgctgtaagctttgaccttttgcagatctgatgaaaatacaacctcttattgtatagtttgccttgattataagccatagtaaatcgagctgttcgcatttttgcaggccttgcattttctactgggaggttcatcaaaccttccacttagcaatagccctgactcaggcagaatgcctcataaattagccttcgaaagaaaagtgcacgctcagacagtgtgtggaggggcaggagcgtgatgcagacaaggacttagtcatgactgattttccttagccagtttgtaatggcttatggggaacattgtgagcttcctacctgacatgttggcagaagtagaatattaggatcctcaagcatctctaccgtaagtccaaagaatttaggtccctattgtcactttgttttgcaatgttttttataaaaatgcaattaaatacctcactattaaactgccatgatgcctcagttaaaaa

SEQ ID NO: 131069 - DNA, 889 bp, Homo Sapiens
ttttttcagacaagactcagaaaccgttttattaaactggaacacaaaatgcgtgttataataatgtcaagcctttatcagaaatcagtacataagtgaggatacacagccaaaatgagccatcaacaaaagcagtataaattttaaataagtttcagatttctatactcaatatgctaaagaaaataaaaccgaaagagtagtttcaatttcacaattcacagttgattggttttaatcccatgacacgtttgtcattctgcagccccagaacacagacttccaaagcagtgactggcactccgacccaacagcatacacagatcttaagcctctgtatgacatttagagaaaattttaataaacaaccctaattacacacagtttgggctgacattttttagctatatcctttatcaaagatagttctagtgaaatagcaaaagcagttttaaaagtttgccatgccattcaataaagggttctaaagcctcccttggttttacattttattctctaatttaaaacaataactgcattaaaatgcaaccttaatggtgaaagcaaaatcggttttgcttctgaatctagagcatatttcccaaggagaagcaacttattgtcccagcagatatatggaatgctttaaagcaggatctgacatactccagttaggcatttcaaagcagacacatcatacccaaactaaatcattatggtcagtcaaggataccacaggtgaacaccaagtaacgcagagttaacgtgaaattcttacaaatgacacacgatttacaaaaccccagaaaggtactcaggtaccaaaagagggcaaaacaatgaccagccactccaaaagagttttgttcctatacatgccatatttgca

SEQ ID NO: 131070 - DNA, 700 bp, Homo Sapiens
  misc_feature (597)..(597): n is a, c, g, or t
  misc_feature (632)..(632): n is a, c, g, or t
  misc_feature (655)..(655): n is a, c, g, or t
gaggaaataagagctgctattattactactcttcatagcataatgtaagggtttccttcctctcatcccagctcggaagcaccttatcaaggtgaactgagccccttctgtttcttctcttccctctagccaccacgccccttcctttccgccatcctgcccccagtcttagctgcgcccctctcccaagccccgtcttggccctgccctttccctggccccgcccaccagacctgcaccggcacagccctcgctcagcggggcaggaagctcatggtgtagtttcgtgggatcgtggcaaagcccacgtgtttgggggacacgtcaatgtccttaggtgactgggaggacttgaggcggaagttctgcatgacggtggtgaagaagagaaagagctccattctggccaggccttctccgaaacagttccgctttccgatggaaaagggcacaaaagcatcactcttcttaaactgccccttctcattcaggaagtgctggggattgaagtcctgggggttggagaagaaactggggtctctcagcacagagcccagcatagggtacacttcggtgcccttagggaggaagaaatcncgaaacttggtgtcctttttgactctgcgggccanactcatggggatcacgtctccanatctttggatctcgtggatcactgcctccatgtagggcatcttgg

SEQ ID NO: 131071 - DNA, 657 bp, Homo Sapiens
  misc_feature (88)..(102): n is a, c, g, or t
  misc_feature (582)..(594): n is a, c, g, or t
tttcagagattattgcactcttttatttacagaaaacacagataaagcatttcaatttcaatgttcatttagcaaactgatccactcnnnnnnnnnnnnnnnggcacaaagaaatatcacagatggaccccgagatcaatcagaagctcataagattcatcagtcatcactggtccaggggcggccacgagactcagacagacagacagcatcaccacagactggaaacagaaacaggtccacgttcacctcacagtaaaaacctgcctcaccgacaggcaagggcgggcaggagggggcagtttcgctgctctaaggggggaaatgggcgtcaggggcaggaggcagggatggggaaaggatggacaccattcataaattagagacaagtggtcctcttgtttgtatcctcttaccttgaatagtaagacagtgcaaaaactagatacccgaccactcacccattcaaaagcttgagaagtcgcctcgcgagtgcccgtgtgcgtgtgtggatgtgtaaatgtggtgcttgtaaacattgtcaccgtccgcacagagacccaacatccatgtgtctgaatnnnnnnnnnnnnncgggaccctacttcaggcgccctctgccccagtgattcccgtccaagacgtagtgcaatttca

SEQ ID NO: 131072 - DNA, 303 bp, Homo Sapiens
  misc_feature (81)..(95): n is a, c, g, or t
ttttattgcactcttttatttacagaaaactcagataaagcatttcaatttcaatgttcatttagcaaactgatccactcnnnnnnnnnnnnnnnggcacaaagaaatatcacagatggaccccgagatcaatcagaagctcataagattcatcagtcatcactggtccaggggcggccacgagactcatacagacagacagcatcaccacagaccattcaaaagcttgagaagtcgcctcgcgagtgcccgtgtgcgtgtgtggatgtgtaaatgtggtgcttgtaaacattgtcaccgtcc

SEQ ID NO: 131073 - DNA, 1017 bp, Homo Sapiens
tttcatttatgctatggagaaaccagcatggagatgtcatgggagagcatgcacaggccccgccctagggagtggtgatgtgtttggggaggtgcttgtttccaggtccatcccacacgttgtccagttggatcctatggcaggctggctgtggctttctctctcctgcttctcttcctcctccagataagggtctgcaggatcttctgcttagcaagtggtggccaaggactggtggatgggtggctggaagcagcgcacatgctccacagtggaactgtctgtctccacggacttcatgtatttgttcaggatggcaaaaacctcattgttcaagatctgatacttcctgatccggtcggccatcttcttcaggggcacattcttaatgatttcatccttcccgtcctgcctctgcacttttagcaggtggtaacagaagtcgaacaggtcaaagcgacgctgctggcccagcaggacaatgatggagcaaccagcccagttcaagccatcgccgaaacactgctcagctgtgaactcgttggttcccacagggatgcagtacacgaactgcatggcgctccacagccggtggaactccacacactcatcgacgtgcatgacgccattggtgggcggtgggccccgccagatggggtcctgcaggtagctccgaatgcgggtcaggatgacctcgaacatggacaggccacagcacagccgctccttggtcaggaggtcaccctcgcgagcaatggcgatttgctgaggggtccccagccgctcgatcagagggaccaggtggagcggggcatacttggcttccagacgtttcatccggacctccaggcgctccccctctttgatgtagactctaggcaagatgttttggaagggtgcggcatggagcaaatcgcagacctcctcctgagacagagcttgctctatgaggaggcagaagaggatggcattgcccacttccctcaggctctggaacacgtctgttttgagctctgc

SEQ ID NO: 131074 - DNA, 925 bp, Homo Sapiens
tgaggttttctgattatattttattttaatcctgggcgtttgaattttatttttacatagctgcatttagtatattccctcaaaacacaataaatttctattctgtagcttaagggatccatcagttaaaatgttggtctttcatctttattaccctcccattaaaatgaaacaaaccgggactcacttcagtttcgaagaagcaatttagttggtaatgtccttactccccaagtctttacaaagggagaaagtacattactgcttagatttcacacatctatctgcataagaagcaactaagccttttggacatagactatgttaaatttaataatattctttgattagattattttattacaacattttttccattaccagtcatttcctgtgcacagttacattcataaaacctgctcccccctcctttgtttgtttgtgaatgtaaaagtgaggcaaagtctctttccgtgtggctgtggctgttaggtctgaaagggatggatgaataactaagcaccacactggacgggtttttcctagtcccctgcaccagtaaccctttgctataatgaggacacaaagagcctcgcatcaggccgctacccttcttcataactcaaaagcgtcacagtggcaatagcctctagtgctatttgtctttagtgcagttgtgacacttcggcatgatccataatttggcagctatttaccgtgacatttcccttcagtgcagccataacattcagtgaagccattatttggttccatttaccatataaattgtattgttgtgcatgcatgctagcagctacattaggtacctgaaaatgagtaaatctttgtaaaatagatactaacagctattcagcagtaggatttccttgctcctcagatggaaggaaagaaaaattaaatacag

SEQ ID NO: 131075 - DNA, 817 bp, Homo Sapiens
  misc_feature (419)..(446): n is a, c, g, or t
gatctgcaaaattttattaagcaatagctggacaactgttacaacttcaaatcatcaagaaaaaaataaggagattaatccgtctcagtaataaagacagaaaataacttggacaaaccacatcgttttgaatgcaaaccattaatgccttctagaatatctcctgcacaatctaatacacaaaatacgtaagaagaaaggcaaataaggatgagctcattaaaacgcatttgggagtcgcaacagatcttgcttggaaagtaaaaccagcaggatgctgaattaaaaaacaaacaaaccaacactggaggaactgaggtgcacaagcagtgcacgccactgccgaggtctggacatgaacatgctggtggtctagtttggtctggggcctatgcacctgcatcgtgcacttacggttnnnnnnnnnnnnnnnnnnnnnnnnnnnntgccagtagtaataaactcagaaattatgtccaaatttacagtaccaaaataatgcatttataaacaaatgcaaaaacaatacccctttggtaaataatacagtgtctttttcagtcaaacgcataacccatgcttttctacaacacgaaaaaatttttatctacaataaacaacaagatcttagaaccctacccctccccttaaaaagaactgtaaacagaaaatataggtacaagtaaagttacacaaaaattgcacaaagccaaagaaaatggaaacaaagtaagccacaacccattagagttttatcagccagaggtaagggatcacacaaatgctcctcgtgccgaattcttgggctcgaggggca

SEQ ID NO: 131076 - DNA, 1005 bp, Homo Sapiens
  misc_feature (929)..(929): n is a, c, g, or t
atatctctatatacaacctgatgttttgatatacatgtacacagtgaaatggttgctctagtgaagtaaattaacatatatccgtcatctcacatagttatcctttttgtatgtgtggcaagagcaccttaaatctactattttcacaaaaatcttatatataatacattattattaaccatcatccttgtcttgtacgttagagctctagactcgttcatcctacatatcttcaactttggatcctttgacctatatctctctatttttttctccctctccctgcatctccccaatccctgatagttaccattttattctctttctctatgtatttgacttttttatattacacatttaagtgagatcattcagtacttttctttttgtgtattacttttcacttagcataatgtcctccagcttcatccatagcagcttcatccataacttctgggtgtagccatggcaagggtaaactgatatggcacactggtgggcatgtcttctggagaggtgcttccaactcttccctgttttagctagtcctcaatttgtctgatgtctgaaccccactgccagagttgagtcttgcctgctgagtcatgtccagactcctacctcagaagtatgaagcataactggtgttacaaacaccatcttcagaacagtgattaaccttctccaggccatcgatgtcgttgggcagaagcacaaacatgcttaggtcgttgtttttatatggaatccctagaattttggcctgcaagtcctccaggaaagtgaagctaaaggaatggctctgtgtcatcatctgtacagatttacttgtgctcacctctttttcttcagcctttattcttgagctcttcgtctctttttcagagtgaaacacctcctccaactgggaagcggtggctcctcgggtncccaggaggaccatgccaattgcagtcaagatgcccacaggggaaaagaagatgttgccatcatttgtcctcgtgc

SEQ ID NO: 131077 - DNA, 2245 bp, Homo Sapiens
tcagtcgaaggctttgccatttctttaaaaaacaaaggctttaattcactccagccaccctctgtcccgcagtgtcccaggcagaggccctctcccttcccagaaggcactgggaggaggaaatctaccacccagcacatggcaagacccagggcctggccaggcagcgcacacaataagctgggcctgagccaggaggcaggcggggtgttgggggagacaggctgaacggccaggccactgcaacagtgagagacccggggagcccctctgctatctcagccaggaggaaggagagaccaaggcacagagccttaaaaaagacatcctctcccggcctcccatcccaaagccctggcccctaggccagtctagacagaaccaggaaagccaaaaacaaaaggcacctagtatgtaagttcatggggagaacgcaggcaggtgtgggaagctcccacctccaaccccgggccttggctactgggacagtgcgggctccagcagcttcaggacaccacccaccaggtgcaggctgccagtgactagcacatggatggcagcagcctcacggagtatgctggccccactgtgagccacagggtgggtgaggaggccctttgggggactaggtggctggaagatggggtctcggccttggctgatccattgcaaggcatgtgaaatgcagctgaagacgagggagctggcactgcaggtgtggggtgggtggggcgccagaagcagggatgcggacccaccgggctctgggctgggggcactccagaggtccgggctggcctgctcttcgtccaggtggttccagtgctgctggtgttccaggcagcggagcaggacctggtccagtgtcactgtgaagttctgttggtctgcgttgcctgtggatgacacctctgtcaggttagggcagaagacggcatagtcaaactggcagggctgcagcagcttcagcagggccgccgggtcccggtccccggtagcattgaagagcaagactcgaacctcggggccaccgctcggcctctcgcggccctgcagcgcctggcggaaccagcgcacgcaggcctgcgcgctgctggcggtgtgcgcaccgtccaggtaccaggtgaggggcccgcgccgcagcacctgcgtccggcccggccactccgtgttccgaagcccgagccgcatgtgggatgtgggctggaacacaggtgccaggggcagctgccacaggagccctggcctggatgcctttggctccccagcaccatggcggtcctgccgctgcagccagcagtgggccagctgcaaggccaaggcggcgttggaccgctggtgctccccctccaggcccagggtcagcggcggccccccttcctcgagggcctccagcatcggacacaggtatagaggacatgagatctgctgggctcggtccctcagcactgccaggggaccttcaggttggagcacagtgaaggcagggacaccttgcttaaagatgccccctttctgccatgcgatcttctccaccgtatcccccaggaggctggtgtggtcgatgccaagagaggagactccgcacaccacaggcttcctgatgatgttggtgcagtcataagccccgccaatgcccacctccaccactgccaggtccaccttctcttggaggaagacgtggaaggccatgagtgtcaggaagcggaagtaggggggcatggagacacagctgccatccttggtctcctccagccggtggtagaggcgccagaagtacttggtgaagagctcaggactgatgggctgcccattgatgcggatccgctcccgaacctgcaccaggtggggagagctaaagaatcccgtcttcaggccatagcttcggaggatacattccgtgaaggcacaggtggagcccttccccttcgtcccagtgacgtggatgatgttcagccggtccaagtcctccacctgcagcccactccgtgccaggtacagttccatggcttccaactgtgtctgagggtcaccccgctggcgcttcacctgctccaggtagccggcattggtctgcagggtattgagcatgcgcacggcatccctctttccccactctcactgccggttcagactccgggatcactggaactccagaagcaccgctgagcctctgggcttctggatcctagctcctgtgccactggaacagccaccccaggcctcgctacctaggacctgatgg

SEQ ID NO: 131078 - DNA, 1252 bp, Homo Sapiens
  misc_feature (434)..(434): n is a, c, g, or t
  misc_feature (1143)..(1177): n is a, c, g, or t
tcccaggggcaactgcccaccggagccccctgcccgggaaccccttgggttcccccagccccccattgggtgtttttccgttcacgacccagcgtgggcccagttggcaaaggccaaaggcggcgttggacccgtggtggtccccccctccagggccccggggtcagcggcggccccccctttctttgaagggccttcagcatcggacacaggtttagagggccatgagatttgctgggctcggtccttcagcacttccaggggactttcaggttgggagcccagtgaagccagggaccctttgcttaaagatgccccctttctgccatgcgatcttctcccccgttccccccaggaggctggtgtggtcgatgccaagagaggagactccgcacaccacaggcttcctgatgatgttggtgcagtcataagcnccgccaatgcccacctccaccactgccaggtccaccttctcttggaggaagacgtggaaggccatgagtgtcaggaagcggaagtaggggggcatggagacacagctgccatccttggtctcctccagccggtggtagaggcgccagaagtacttggtgaagagctcaggactgatgggctgcccattgatgcggatccgctcccgaacctgcaccaggtggggagagctaaagaatcccgtcttcaggccatagcttcggaggatacattccgtgaaggcacaggtggagcccttccccttcgtcccagtgacgtggatgatgttcagccggtccaagtcctccacctgcagcccactccgtgccaggtacagttccatggcttccaactgtgtctgagggtcaccccgctggcgcttcacctgctccaggtagccggcattggtctgcagggtattgagcatgcgcacggcatcctggtactccatgctcggctcctgcggcaccggccacgcgctcaagccccgccgcgccgcgacctgggtcgttacgccgcgcgcagacgccgctgccaggaatagagcggcgcgcaggtggctccgcgcccgcgacatagtcccggcgcccccggcagcgctctaggcccgggcgggagacccccggccgtaatggccgaattcccgggcatatgtccggtaccgtcgactgnnnnnnnnnnnnnnnnnnnnnnnnnnnnnnnnnnncgccgcttcctcgacatcactgactcgctgcgctcgtcgttcagaataccgcgagctagcgccctatatgtgtac

SEQ ID NO: 131079 - DNA, 711 bp, Homo Sapiens
  misc_feature (562)..(562): n is a, c, g, or t
  misc_feature (565)..(565): n is a, c, g, or t
  misc_feature (573)..(573): n is a, c, g, or t
  misc_feature (575)..(584): n is a, c, g, or t
tttggcccattcattctttattcagggggcataaaaatcactacaaaaaccttacaaaagagccttaaggagctcatgggatccttccctgcctcggttcctgagctcccgggcagaggagggagacaggagaggaaggaagggaaatgctggcagtgttgggatctcgaggagccgtgggaagtctggcgtgacaaggcacagggggtaggatggaggctgatggactctcggcaggttaggccacagccaggctgtgccagacacgagttccacgcggggctgaggacaacgcttcgcctcccgagccaccaccagggcccgtctctccccaccctagcctaggtgtcccgggacaagtccaaaggcagccctctccccctccctttttctctggtaaacaaaagtcggggtgtcccagctgacgtggggagcagctaacctgtctcctggcagaactagaagcacctccctcctgcccaggccccggtgcaggacaccctctgagcctgtttggaagaaagatgagggtcaggctcccggctccccgatgcctggcttnctnccagccgngnnnnnnnnnnacctaaaatccccagaagtgttgggaaaaaaagggctctttataacgtccccggccccttccccaggccccaaacaggttggaaagatcacatgagtggaaagcttgtcaggcagggactttgatgc

SEQ ID NO: 131080 - DNA, 927 bp, Homo Sapiens
aatattttattgcggaaactggggagaagcatgcctcctgtccccagggagaaggcaggagcgaatgggcaagggcaagggaagggctttaagggagaggagaggtgggcctggggctcgctgagtggtcggctggagcagtgggaagtgccccggtggggccggtggctggtgtgggggtagaaccgcggtcagtagggtgaaggtgctgagggctggaggctcaggaggtggtggcaggggcctgactcttggagccgggcagcaggctgggtgtgctcagaggctcatggcccacctggcgaagctccttccaggtgcaggcaagcctgaggcgtcagggcagcaggcggccgccaggaaggattcagacaactctgcctgggagtgagggctctgctcagcggcctagacctgggcacaacggaacaggccactccgtttctcatcacagacctgaaggcagatggcctgggcgtcgggcttcctctgctctctggcggggcgattttcacggtcaccaggctgcggacaggctgtgggggtggcgggcggtccaaagccaccgcttcacgtaggccaggggagccttggagaaatcaggcctgatgttgctcagcagcggcagcctgttgggaaagcacctccaggcctcggggaccatctctctcaggacgcggatgcgggcggggaccatctctctctggatgcagatgcgggtgtagtcccagctgggaggagtggtgcggaggggccggatgcggacccagtgcttcctgtggaagtaggtgaccttgcagttctcctggacctgggagctgaggaagggcctggactgcagaacccagtgcttttgggcggggcgcagctttccccacgcgtccgcggacgcgtgggtcgacgatatcccggagaattccggaccgg

SEQ ID NO: 131081 - DNA, 685 bp, Homo Sapiens
  misc_feature (42)..(64): n is a, c, g, or t
agaaatagaagccactgttgtctttataaaacacggaattgnnnnnnnnnnnnnnnnnnnnnnnatgttgcttgcttcagaaggaactgtacattacagctgctgggataatttcacaatggactggacaaggtacagctcaaagcaggacacaaacacaaatctcaaagggaaacaaatgcaaacaagtacacagctgtggggatccagagacatttccccatccatgctggacttgagagggataaaaagtttagaaactaaagtgaaaaccagagtagtcacacatgcccaccacatggctgctaagtgcaacatcacataccaattaggctggactgtgtgcacaggaaagtaatttcatttttccttattgctactacaccaagggactcagtgcattcaacaaatgtctttacttgcacaattcttggagggtttcctattttcctctgtaaagaagaaaatctccctttcccacctcattctgttttgtttttagctcattccttcccctccctttcttggatgcccaaacagcagccagaggctctaagtcagtatgagtagagtaagggagagcaccaacccagcctctctccctgcccagggagaaggcaagtcctattaagtcggaggaaagcgaaaaccagaaaatacctccttcccaatctgcttagaaggc

SEQ ID NO: 131082 - DNA, 999 bp, Homo Sapiens
  misc_feature (65)..(116): n is a, c, g, or t
  misc_feature (340)..(348): n is a, c, g, or t
  misc_feature (362)..(376): n is a, c, g, or t
  misc_feature (408)..(439): n is a, c, g, or t
  misc_feature (479)..(487): n is a, c, g, or t
  misc_feature (506)..(514): n is a, c, g, or t
  misc_feature (782)..(805): n is a, c, g, or t
  misc_feature (850)..(850): n is a, c, g, or t
  misc_feature (855)..(855): n is a, c, g, or t
gagacaaaacgccaccgcccgcgcgagtgggcagtatatgggaggagaggcgacgcgcgtcacannnnnnnnnnnnnnnnnnnnnnnnnnnnnnnnnnnnnnnnnnnnnnnnnnnnacgcacagccaacagaaaggagttgacaccaagtgatattttataagtcgtgagtgggcagacacacaccaccaccaacaaagcagcaggtggggagaagagaaaaagacgccccacacttagggaaaaatgcgcccaccaggaccaaaaaaggggagaggggggcgtgtacacaaacaaaaggcccgtcgtaaataaacggagaaagggtggtaccaccgcgnnnnnnnnncaaaccagggtaannnnnnnnnnnnnnnactggttaaaaaagaggttttagtgcgcgacnnnnnnnnnnnnnnnnnnnnnnnnnnnnnnnnagaccagaaatttttatcccaacaaacccacgagtagccnnnnnnnnnagaaaacgagacaacaaannnnnnnnntggtgggtttgtagaggttaagagggtttttttgcaaaggggagtaacccccttcgccccttttatggggggggaagtggccctgggtgaacattgttatttgtttaccttgcaaaaccggggtggaaaaatttggggggatgcaaagaaccgttggttccaattaaccatttattgttgctgggtttttggagggtaaaaattggttgcaaatgcgtagaccttgtatgtaatggacatttttccccagggagtgaaatcctctgtnnnnnnnnnnnnnnnnnnnnnnnngaatcccccactgtctattttattgaaggatgataaaagcagctntctanttaaaattattacagttatgtttcaaatggtgttatctgccacattgtttccttttatctggtggttctctgtttccccctttaaatgtgttttctctgcttcaaaaaaattgtaatgcattttagtattaaaggctattatgg

SEQ ID NO: 131083 - DNA, 988 bp, Homo Sapiens
  misc_feature (665)..(665): n is a, c, g, or t
  misc_feature (743)..(743): n is a, c, g, or t
  misc_feature (879)..(879): n is a, c, g, or t
  misc_feature (928)..(928): n is a, c, g, or t
ttgttctttttcctgtattttaaaaaagtttaattttaatccttcctagaggaatacagatttgaatgaaatacattcattccataaatacattagcagcaaaaccttcccaccagagtcctctactccagcccagaggttgtgccttgagcaggagagcatgttccatcaatcctgtcaacttaagggtgggtctgcttctgagaaacgctggatgtgcacgggagacacaatgaccaggtgcatgggtgacttaactaagctgggaccctgaaaacaggcccatgtggtcactattcagccttctttaccttccaaaaatcctttggcatcttccatgcttctctgatgaggttcctcagcactgagacaactgggaagacctaactttgcacatgcattaaataatgttattttgagttggcaatgttttaacacttttcataaggtaaatgaaacataaaagattattcccttccttcccttcctcaggtgagtccacatgtactcatcaggagacaatccagcaggcatttgggctctctgtatctccaggccccctttgtctgaatggctggatgtttactggggacagggagccatgtctaaacctacaaagatctccacgttacaataaccaggtgacttgctcaggcttccatcanagctaatttcttgggcagaggccaggcatctctcctcttgttctctccatcactgactactgactgactgctgctttnttatttgccctccaggcaccctgcgaactttgggaacaagatctacctaactccaagtggcaggagcattagggaggtctgctttaactactagctgcagtacaactatgctgcgtgtccatcatctgggtgaganatccagagtcgcaaacatacacatcggatgtatggcaggcgttaatgtncagtcaagcacagaatgaatggaatggatatctatgttggcaagactgtcagaatgactg

SEQ ID NO: 131084 - DNA, 1366 bp, Homo Sapiens
  misc_feature (439)..(464): n is a, c, g, or t
  misc_feature (472)..(563): n is a, c, g, or t
  misc_feature (1312)..(1321): n is a, c, g, or t
aaagagacagtctcactatgttgcccaagctggtcacgaatagagtagttttactttttatggaacagacagacaatacattgtataaaagactttaacaacatcattcccactgtctccttattttaagacagctgcttactgccacttttggaaaaggacattgaaaaaaattcaccaggaacataaatgcagttttctggctaaatgacctcaaatgactcattaaacttttatatttggccatatttaatattaatttatgcattaacttttagacaaaatcaagtatggccaagtagtctacattatacaatagtacacaaggactacatcagaactaagtcaataaacgttgaggactaacttaattattaaggattaaactcccttctattaaactaatcacaacatacagtaagtaaatataagttaagannnnnnnnnnnnnnnnnnnnnnnnnnaaaaggcnnnnnnnnnnnnnnnnnnnnnnnnnnnnnnnnnnnnnnnnnnnnnnnnnnnnnnnnnnnnnnnnnnnnnnnnnnnnnnnnnnnnnnnnnnnnagattttcaaatattggtggatgtctcctctagaagcataatgcaataccaacatgtttatgatggtggtgacatgctattatgcagaggaactcaagtaaacacagagtcggttcaaggttaataatgtggtttatgacctccaacaaagctaattagaattaactaaactctgtaaatatgagattaaactagacttgataaaattagccacaaatgacgagcatttttagaatatgtgaatccaatactcttgcattgcctcagacataaatgagcatattctgatgtactctttggatctgaactcatcttcacaggtaggactcactgtggggaaaatttctatcttatttagtagcgttgtttgttttggactgaccttcctcaggttcgcatgtagttaattgtggcagttaactgttcagatggagtccagtattcagtgggagacgaaaggcaggcagaaagcaaatacaaatatgtatgttttattaaatttataccaatagtgagttcagtagggcaggccttaaaagcttctgttcctagtagttatactttgaaaaaattttaatagaaatactcggagactaacttgtgaataactgcttacaacagtgctttacagggttatgtattgtaggttcttagaactttgtggtcaataagttagagccttctgatggactgtagttgatgaaatgtcatgtagaactctctctcttaaattttatatttaatgtccnnnnnnnnnnagatgccttcaattaagttgcagagttctgatggagagatatttg

SEQ ID NO: 131085 - DNA, 1054 bp, Homo Sapiens
  misc_feature (700)..(700): n is a, c, g, or t
  misc_feature (830)..(830): n is a, c, g, or t
  misc_feature (842)..(842): n is a, c, g, or t
  misc_feature (857)..(858): n is a, c, g, or t
  misc_feature (871)..(871): n is a, c, g, or t
  misc_feature (899)..(900): n is a, c, g, or t
  misc_feature (911)..(911): n is a, c, g, or t
cagagcttaaaaaccaaaaggcagaaaatagactttattccaagacagatttgtaaaagatgtttttaaagggaaaggcaagtcacgctactaaatcaaacattgttcacaatttctggatcttcctcctccgcctggcactgcagctgagccttggcggatatgctcggggccctcggcgcagaggaacttggcctcgattctcttcctgaggggcttcttaacttttccaagccaggcagtgagcgtggtgggaggctggggctggtgcctgcggacagctccagatggaatcccaggccacggtgcttctagtgtccccccagcgagcttgcggtgtggcaggcggccaggaagggccatgagcagggtggcctgaatgaaaaccgagggccgaagccagcctgactccctcgcctaagctggggctcggtccgaggcacacgcatggccttggccagacacaaaccaagagactgccatgacagacagagcagaaacctcccgagcactgtgttcaagctaagctttcctaagacgggcttctcaggcgagacgtgacaccagacaccgtcgcatgttacttggagagaacagagacgtgcgggccacagcggcccaccaaaggctgccatccaagctgagttccgcaggcctcacctgcagctggagagggaccttgccctgatcctcctggtangtacccgctaagggattcaagacagagcgtcacactgcacgcaaggtcctccgccaccaccatccaagaacccggggggctggccacgcgctggcctctgccaagggagtgcagtggttcccgggacggngccgccaagcangtgagggacggttannatgatgacttggncaaggtcaccatgtggtccacgcacatnngcacgtcacangctccccaagcatcgtcaccctccatgggaaatactggtcctccaagcgaccgatcccaggcacctcggatgtcttggcccatacaacactctcctttgtgggcaatgcagcaagtggctgatccacatcggtgcggaaactt

SEQ ID NO: 131086 - DNA, 1795 bp, Homo Sapiens
  misc_feature (58)..(58): n is a, c, g, or t
  misc_feature (96)..(96): n is a, c, g, or t
  misc_feature (128)..(128): n is a, c, g, or t
ttggaggagggggggaccttaaattccccacggggttaggggcctggtatttaccccncccccggggagggaaacatccacaattccccaaaatancagtacccggcagccaagccatacaatgtccnctgtttggagtcatccaggcaaaggattctgacatgaatgacttagttgtttttaagacattcctttgggctgtaaatcatctgagatgtcaattttggagtaggacagttcgacattcaacttgagtgctggagagcaaaaataaaccgtgtttcactgtggatcttttgaatcccaatccaaaccttttccttttgccttgcagccaattccttaatgttcatgatcacttcttaccaatagcttcttcaaatgcaaataaaacagttttcccctggtctattagctgtttggctctgtttcccatccacttaaagccagttaatgtttcctaaagggataatccaaaagagaaagacatgccttagatcttctacagagcagatgaaaggaaaatgagtgagtcccagaaacaccctacctcaaaatgaaaaccttcctttaaggcaatggcccgcaagattttggaggagacggtgctggacaacatgtacgtgtctttgagagcactgcgatcctggttcttctctttccaagatgtaaaaagccaccagcccaggagggcccccaactcattgcctgaaaacaccctccattcaccactgtcttgcttttctgccacagcaattctatcagcatccggttcgttagctaaacaattctggccttgtttttgtcagccaaagcaaaagacaaagtcaagacacctttcccctcttcgggattcgggtatttcactgttggaaactcaggatccggatctttctgttcaggaacagcctcaggaggaacaaggtcaaaagccttgaaagctgactgcacaaagctatgacccaccccatggacagaggtgtgcacaaacttcacctttgtctccctgttcacgctcctgtggaaacagtactttttaaggtcttcaaagtagtcattattgatggaagcactcggattgtggagaagtggactgctatcaattaaagaatcgtcccaagcttgaggccacggttctagattttcttcaatagcttgagaaatccctttatcgtgaggagaaatgatctgagctccattatcccaatagaccttataaccattatcctgctttggattgtgagatgcagttatcatgattccagcacaaagtttcaaatgtgatactgtgaagggcacaaagggggttggcgttatatcagaaaagaggtacacaggaatcccctgactgataaatgtggttgcagcaagtcgggcaaaccttctgctgctacccccactggatggatgagctcgggcgtcaaaactgatcacgatgcctttctgctttaagtcactgaattgtttttccaggtatctgcaaaatccctgtgtagtctggatgatggtcaagtcattcatacgagaaattccaggtcccatagcagctcggaggccagctgtcccaaactccattcgggccccaaaacattttcgtagttcttctttattaccttctgctattagtcgtttcactgcctccaaagttaaggaattcttgtcccagcgcagccactgggcggtctcctggtccagccgggcgtcctcgcctagaccgctgccttctggagccgccactcgctgagcttgtgctaccgctgcagagggaagcaggcggtgagatctgccttccggc

SEQ ID NO: 131087 - DNA, 722 bp, Homo Sapiens
aattttttaagttctgttttattgagaaccacaaaaggtaagaactaagagagtcctcccaggtcatcaggtcccatccctttggtctaaggatggtgaaaccattgtcacagccagcagctgccgtgttctgggactgtctcatggggcaatgtgtcctcacccccagcagtgccagcccaggtcagaaggcttcattcagaaggggggtgtcacagcacctggctgagcccccatggaggatggagacccaaagatacacacaaacacacagagacatctccaaatctatgactcagactcgcacacaggcacacacagacgcacgctcaacacagacacacgcaggcctttattctattacacagagtagggctggggccagggcaggtcattctcaggctgcgtcagaaggtgcagagcgttcgggggacacaggccgaaccccaaagtgataataagttacggggggatttctcaggctgttgtcaggctggagcaagggcaggacgccatgtgaggaccccagagccacttccagctgcccagctcagccgtcccaggcaagcctggttccaggacagactcggcctccacaggccctcagttcagctcctgcagattctcgtaatctggagcccctcttcctccacttcctctgcctcctgggaactcagggcggcaggctcagtcttagccgctccaggatgcagttcctggga

SEQ ID NO: 131088 - DNA, 714 bp, Homo Sapiens
  misc_feature (648)..(648): n is a, c, g, or t
  misc_feature (690)..(690): n is a, c, g, or t
gagaatacaagaaccttttattttccatccagttgggcagcagggaaaggctaggtgggcccagcctgcccttccttcctccagctggctggatatttattattagccaggagaaagcagccctggaacccagactctgtctccctcttgaggtcacagatgttgaagttggaatctcgctccttcccctgactaccatcctaggctgggcctcaagactagtgaggcctgtccccaccatccctggccttgttgtggggctcaggaactcagagtcccagtgttgagtctgggagcactaggtcttcatagttccaggcccagagctacagctgggctgggagcatgtgtgtgcactgtaagaaggagctgatgatactggccacgtgctggggttcgctcatgtggacacagtgattgcctgggacttccacaaactggaactgctctttgagggtggatttcatcgtgtctatcatgaacgacagggactccttctcagagtaattctgtcttgaatcaaaatatccgtggactgctttgatcaacaggacatgggcctgcagcttcctgatggaatgcgcacacagctccctgctgatgaagtcaatgctgttctctgctcaggcgagcctctggtctctgttncagaaccagacctgtggccaccttcgtggttcctctttgcangagaagctcccgcactcctcactc

SEQ ID NO: 131089 - DNA, 520 bp, Homo Sapiens
tcccagcctgtgaccacagatgtccacacacccccaaccacttgtccacacagctacccacgtacgacatcgtcctggctccccagagtatcttcccactgagacacgccgcccccacagaggcacagtccccagccacctctgcaactgcagccctcagtcacccctttttaagcaccctgattctaccaaatgcaaacacatctgggtctgcgattatgcacagagactttggacatacgaggaccctcagaccggaggaacacctgcccaaccccaacacgtgcttatgtaaccacgtggaaagcggcccctgctgcccctccacacacacatacacactcactgatctacagcccctgttcggcgtcagagtccccactagacccagtggaaggggttagagaccaagtaggggccagtttccaattcaccctgtcagggagtgagccggatctgacgttccttgtgacttaagggtccggcttgggaattaaagtttgtttctggcctttagcct

SEQ ID NO: 131090 - DNA, 844 bp, Homo Sapiens
  misc_feature (566)..(583): n is a, c, g, or t
ttatttttggtaagagtatgtagccttatgatctggatatattttgcattcattttccaacgcctacatttaattcctggtaagagcagtgctcgtcaagtttctggtttttctctgctctcatttaacccgtcaaacacaatctttgtaaagctagattggtggtgttttatacaacttatttactcagcttacctttttgagaaacgattgttagaaattgacgatgtgtttgttccagtgatactgaaagtagtgggggcaagaattgagtttcacagtggaattggctttggatctggcctatagattagtgacataaaatattttctctattttcccctgttctttttgtgttatgcacttaattttatgactgccgggggggtcagctggagtgctgcttaacaagtatctctcctactctcagtggtcagaggctgtgttggacccatagtagaattttccaggtcacagacccaagcttccatgggttgttactgtgctgtaccacttggtgggtctgattctgaacctgatgtgtgtgttaattatattttaagcannnnnnnnnnnnnnnnnngcctcatgtaatggacttttataacaaaagaaaaaatttggatttctaatttacaaatggcaaattatttatccctctctggatgcaccaaagaccagtaaagtttatagcttttccatctatatttataaagcaatactgtattataaaaatcaatatttttatcacatgcttgaaatttttattttgttgttttaaaatgtgcactctaaacatatcagaaccttatttcttcctatgaacttaagctgcctgcgcaca

SEQ ID NO: 131091 - DNA, 1728 bp, Homo Sapiens
  misc_feature (1636)..(1667): n is a, c, g, or t
ggtcaaggagcgaggctgggtggcgaattccgcacgagggattttgggagaacttagagaaaaggtgggtgagtgtgaagcgtctgccatgctgccactggagtgccagtacttgaacaaaaacgccctgacgaccctcgcgggacccctcactcccccggtgaagcattttcagttaaagcggaaacccaagagcgccacgctgcgggcggagctgctgcagaagtccacggagaccgcccagcagttgaagcggagcgccggggtgcccttccacgccaagggccgggggctgctgcggaagatggagaagccggccaaggaggaaacggtggtggagaacgccaccccggactacgcagccggcctggtgtccacgcagaaacttgggtccctgaacaatgagcctgcgctgccctccacgagctaccttccctccacgcccagcgtggttcccgcctcctcctacatccccagctccgagacacccccagccccatcttcccgggaagccagccgcccaccagaggagcccagcgccccgagccccacgttgccagcgcagttcaagcagcgggcgcccatgtacaacagcggcctgagccctgccacacccacgcctgcggcgcccacctcgcctctgacacccaccacacctccggctgtcgcccctaccactcagacacccccggttgccatggtggccccgcagacccaggcccctgctcagcagcagcctaagaagaccctgtccctcacgagagagcagatgttcgctgcccaggagatgttcaagacggccaacaaagtcacgcggccctgagaaggccctcatcctgggcttcatggccggctcccgagagaacccgtgccaggagcagggggacgtgatccagatcaagctgagcgagcacacggaggacctgcccaaggcggacggccagggtagcacaaccatgctggtggacacagtgtttgagatgaactatgccacgggccagtggacgcgcttcaagaagtacaagcccatgaccaatgtgtcctagaaccacctgcctcacagctggccgtcacttgtgggggtccacgggacgatggctttgccagcttaaagtaaccggatggcggacacctggcccccgaggtcccccggccgccgccctgctgctgacccagcctgttttaagttctggatgcatttctctggggtatttggggcttatttttaaaattttaatatgggttcttttttgtgtgatttaagacactttttggactcaacgttacatttttgaatgtagtaagtaaattaaccaaaaaagttacaacttcctaattttagtgacagctctgcctgttagactcttactttttaaaatcttttctattttccctcgctggggcagtgccctcctacccccagggttgaggggaccaaggtggcacggtggtactgggggtgcggcagggacacccgaccacaccagagcgtgggagacggtgggccttgtcccctgcctgtgcctgcctgggagttttgtattcatcttttgtatagttgtggacatttaagacagtctttgggtacctattttcattgtaaaactatctgaaccattaaagtcgagcttttctnnnnnnnnnnnnnnnnnnnnnnnnnnnnnnnnctcgcggcacgagattcacctttacatctgaaggaaaaaatactaagtgtgataagatgaa

SEQ ID NO: 131092 - DNA, 883 bp, Homo Sapiens
tccgcattggagagtcttcctttttccgtttcggcttctcggccaggcgccaaaccatatcccagctcagagatgtccagcagcttcacaacctcgttccttccgcagcagcgtcctggaaggcgggatgggggtccggttccctgtggggctgaagacgctgggcgccgtggggcttctgaagggcgcctgcttcgggatgcctttgagtggggtggtggtgtccatcttccgcagcagcccccggcccttggcgtggaagggcaccccggcgctccgcttcaactgctgggcggtctccgtggacttctgcagcagctccgcccgcagcgtggcgctcttgggtttccgctttaactgaaaatgcttcaccgggggagtgaggggtcccgcgagggtcgtcagggcgtttttgttcaagtactggcactccagtggcagcatggcagacgcttcacactcacccaccttttctctaagttctcccaaaatatcctgaacgttgggattctgctcctccagctccaggttaagcgagcctgtgtccggaaaggacttcaagatgtcggcgaccatgagcacccaggggtccgagtcgaggctggcgagctggatgatctccattagggcgcccttcatctgcaaaataggatgctcgtccaccgtgcggcgcgggaggtgcagcgtcccgagtagcaacttgagcttcactgccgacgagaggccatggaagcagagacggatgttgtcgatgaccgcggccgtgagcagggacgcgatgctgggcggcgcccacagctcgtccgtggcccccagcttgtgtgcagccacaggcccgtgtcgccctcgtgccgaattcgccacccaggctcgctcctagacc

SEQ ID NO: 131093 - DNA, 980 bp, Homo Sapiens
gtggggaccacccaggtccgggtgttgcgaaattccggggtgaggggtttttcacacccccggtatccctccctgggccggggtttttcccccaccccgtggggaataaaggagtttttcccttctccggtttcgcctttttgggcccagcggccaaacattttcccagcttcagagatgtcccagcaggtttcaccccttggtttctttccgcaagcagcgttcctggaaggcgggatgggggtccggtttccctgtggggctgaagacgctgggcgccgtggggcttctgaagggcgcctgcttcgggatgcctttgagtggggtggtggtgtccatcttccgcagcagcccccggcccttggcgtggaagggcaccccggcgctccgcttcaactgctgggcggtctccgtggacttctgcagcagctccgcccgcagcgtggcgctcttgggtttccgctttaactgaaaatgcttcaccgggggagtgaggggtcccgcgagggtcgtcagggcgtttttgttcaagtactggcactccagtggcagcatggcagacgcttcacactcacccaccttttctctaagttctcccaaaatatcctgaacgttgggattctgctcctccagctccaggttaagcgagcctgtgtccggaaaggacttcaagatgtcggcgaccatgagcacccaggggtccgagtcgaggctggcgagctggatgatctccattagggcgcccttcatctcgtccaccgtgcggcgcgggaggtgcagcgtcccgagtagcaacttgagcttcactgccgacgagaggccatggaagcagagacggatgttgtcgatgaccgcggccgtgagcagggacgcgatgctgggcggcgcccacagctcgtccgtggcccccagcttgttgtgcagccacaggcccgtgtcgctctcccgcatggaatcccgggaattccggaccggtccac

SEQ ID NO: 131094 - DNA, 693 bp, Homo Sapiens
attttcccttttattcaacaccctccccacccagtctccccgcccccaagggtccgacacgaaaggtccaggccctcctcgggcgcgacagggagccgatccttaaaagcaaaccctacaaataaataagcggggtcgggggcgggggtctctgcagtccagggcctacggtccaacggcagtcaggtcgaatcaattcaccagcagcgaatgctcctccgaggggtcccttccgcagcagcagagaaggctgcaggccgagccgctcccgcggcggaacttgccggaggtggggctgtcctggcactgtgcgatgtaggcctgcagctcgctctcctctgcgcctgcgccgccgggatgcttgatggtgtcgtaggcgccggtgatgagcgcgatgaagaggctgagcaccatgtagatgaagaggctgatgaaggagtaaaggtagagctgggagaagagcacaccaggctgctgcggccctgctgcgcctgcatggcggcgaacgtcacaaacatgtcgtccccattgatgagcgagaacaggcactcagacaccatggagagtgagcggaacttcacatgatagggccccagcacgatccagccacagaagcagtagcccaggtagatgacagccacgcagcagcagaagcgcatgacgctgggcagggccacccgcagtgtggcgatg

SEQ ID NO: 131095 - DNA, 1113 bp, Homo Sapiens
  misc_feature (669)..(686): n is a, c, g, or t
gacgttggtaagtttgtctggtttatttgcaggctgtagagatgatatcccagtccacgcacactcccatgcacacgcacacacatacttcatccacctgaatttgcccgacaaaccctcctctgagtcatagggacaaagccatacttggcagtcctcacgttactggttacattagatttggtctttcagaaagaagatggttgaagtcccaagaagctgagcccttagccagagaagtaagagtcctagaaccaagagccacaacctgaaatagatgcagactgcccccgccctccttccagggacaactcttgagaccctctcctcccaggagttgagtctcaagaaatgaagggactgatggggtttcccaggacacacgagcccccacccccattcaatgagaaaaccctctcttctgccatttccagaagctggggccacacctgcttgctctcctcccttaaggagaattcctgcagtcttgtagaactgtggaacttactgaaataagcctgactggttctgccttcctctctgagtgaggaacagggacactgaatatgatgggtagtcaaggaaggctttatcttcctcaaaggtcccagcctgtcccagagaggagaggcagtgaggaggggtgaggacatctaatgatcttggggnnnnnnnnnnnnnnnnnncagggcagggtgggggtagaagtaggattttccatttacagggaggaatgttttgctggggtttaaacttcaactaggcctgtgtgcatttgaagcagatccttgagctcaagatcagccagtcatggccaaataacctcattcctgaactggttgaaaccagtgggttaacccaacctggccatttcctcatgccttacctgttttcctccctcaatctgctatcagaggtgactaaggagccgcagggaacccacgttggctccaaccaccaagacctcccagtcctgtccacttaaggtgttgcaaaggctctgccaagactctcacccagtcttgggcccatctaggcccccaggactgcagggaagtcaccccataccgtcgcgttcgcgctcgggtgtcgcggaggttaaaacacggcggg

SEQ ID NO: 131096 - DNA, 1184 bp, Homo Sapiens
ccccttattattttataacactccacaattctcctgggatgcggaggaacaattattgttgtttccccatggccccccgctttaccttccccccgctgttgttgtggattgcgggtacacattcaccgggaaccgtttacagtttctattaaccgccctattggggaatcgccccgggccaaaatcgccaggggcagaactcccggcggcccgggcagaagcggtatttacggcccccggtggaatccccgccaaatgaacccagccgccattgccaaattgttcccatttaaaatgaccattttgggtggacacttgagcggtgaatggagatgaagatagtaattaccgttcagaacaaggagcccggaaagaagcatatcttccctgcgatacctgtttagatgaccagcggacaccgcgttcatccatggtcaattccatgtgcggactagtcaattttttctgaacaaaagcaggtttttatatgtaaacagtgagaaaagaaaggctaaacactatgtaaatgtgaatggaaacttggaaatactcgtttttataaactacaaaaactttttgttgtttatcaggaaatccatatttattttgtaattaactgtcaagcctgtggatgatttttttgaacttggtagttcataaaggtttacagtgaataaaaggatatcatcttgagtatagcaatatcaaaaggaattcagtagttactgctgtttaggaatataaggttaagatatcatatgggtcaggtcatttattttttctgtgctggttgccacatcttagcaagcaccaaaaaactaaagcagtttttaaaccgatatttacgtaaagaaaatcataaaatccaatgcttctgcatactgtgttatgttacagtccagttttgtgtgctttactacacagtttggttacaggacttctgtgcattgtaaacataaacagcatggaaaaggttaaatacctgtgttcagattgtaagatctagtccggacttgctgtgtatattgtaacgttaaatgaaaaaagaacccccctttgtattatagtcatgcggtcttatgtatgataaacagttgaataatttgtcctcagactctttactatgcttttttaaaaattaatttaagaaaaatgtaaacatagtaaaaatcttcctatgcaaa

SEQ ID NO: 131097 - DNA, 832 bp, Homo Sapiens
  misc_feature (713)..(761): n is a, c, g, or t
ctacttagaatatttatttattctctgacatgacaagacacaaaaagttacaacttcttaaaactcttcaaaagaaaaaaatataattctgtaagcagcagcagcagcttccaaggttctgatgtgacgggaggggcagctcccaggagcaaccgtgaactgggggggtccaggcctgagccccaggtagtgtcgctgggaaggggcctctgtggagggccccggttttggggacacagcaccagcacatcagggtctgtcaccaacacgatcacatggccagggcggggcagggagagcttcggctcacagcagggatcgcccggtggcaggggggatggggcttctgaagtgtggtcaggggccttatgcccggaggcgggaaggatggggcttctgcagtgtacccaggggccttatgcagaggctgaaaaaggagggtgggccctgagaggacttgggggtgtggcagctcctggccctccctccagagcagggcaggcaccctcaggctccacactggtcccaatgcccgccctgctccctggccaatcccaggccagggtggaggactcaggagagaccaagctgggtaagttagttcctggacggggtcaacagagcctggggcacacacagcacacagagcgcctgccacgcgggaagggggcagtccccagcagccccatccccaagggccaggccagatcccnnnnnnnnnnnnnnnnnnnnnnnnnnnnnnnnnnnnnnnnnnnnnnnnngacctcacaatctgggccccagcctggggtgggagctgaggagcccaccagaaagtcccacagtgggtggc

SEQ ID NO: 131098 - DNA, 1028 bp, Homo Sapiens
  misc_feature (849)..(849): n is a, c, g, or t
  misc_feature (853)..(854): n is a, c, g, or t
  misc_feature (869)..(870): n is a, c, g, or t
ttttataattagaaacactttaattcctagccacttggcagcacttaaatatcagagccatccaagcatgccagcctttgaacttgctcagcaagagtagatgatcacacaactcttaaggtaaatcaaaattagatgaaggttatttattggtgtgacttttttcctttagtgagcttcctttacacagcatggtgtaaatagcatcagattgaatgaaaagtttgttaaatgcaaccataaataattataataaatatacatcaagtaactttacagcacacattttttagggccaaggtttggatctgtctggacctcaatgtgctctcggagaagcagccacgttagcagcagataccttacagcttgtcatctactcaagtgatggccaacagaagcttctgaactcctcctggggaggtagctgacaagtccattcaagggatgaggactaaagagaaccaagaatttaaagatgtagggaggaaaaaccacttctaataaatcgaaaggctctttcattatgcagaaatgaaaataaaaggatccttattgtcaggaatacatcctggctgtgaccccccacactcaaaggagctgtggccgctggggaggcagcgggctgaccatcttctttcaaagcaggggaactgcttgcgggcactcacctccagagttgacttgcatccaatacaactgatgcagctgtcatgattaaccctaggtcgatttcatccttaggtcagggggatcctttctattatggtccttgatgcatttcctaagagttacagggaggagatggatgctaacggctctatctctagaatcacatctttcctcgtngcgnnatctggctcgagggnncaatcctataggagtcgtataattcgtatcatgcaagctgttcctgtgtgaaatgtatcgtcacatccacacacaacgagcgggagataagtgtaagctgggtgctatggatgagtactcacatatgcgtgcgccatgcgcttcatcgggactgctgc

SEQ ID NO: 131099 - DNA, 543 bp, Homo Sapiens
  misc_feature (12)..(12): n is a, c, g, or t
agcctttgaacntgctcagcaagagtagatgatcacacaactcttaaggtaaatcaaaattagatgaaggttatttattggtgtgacttttttcctttagtgagcttcctttacacagcatggtgtaaatagcatcagattgaatgaaaagtttgttaaatgcaaccataaataattataataaatatacatcaagtaactttacagcacacattttttagggccaaggtttggatctgtctggacctcaatgtgctctcggagaagcagccacgttagcagcagataccttacagcttgtcatctactcaagtgatggccaacagaagcttctgaactcctcctggggaggtagctgacaagtccattcaagggatgaggactccagagttgacttgcatccaatacaactgatgcagctgtcatgattaaccctaggtcgatttcatccttaggtcaggggatcctttctataatggtccttgatgcatttcaaagacaaaaggttaagtcttccaggaggccctggaatgtggacgaaag

SEQ ID NO: 131100 - DNA, 1313 bp, Homo Sapiens
ttttacagaggtttttcaatagatcatgtttattcccaagccccaaccagacatgttctacccctcaagatccctgagacccaggctgtgggctggaaaatgaaggcacagtgtcaagagcgcccctgttggcatatgaagacccaggagtgctgaccttcagggatctgcctgcactgcccatgggcctggcacagcaggaggcactcctgtttctgtcccttctgtctctggtcttcagagcaaggtttctgctgagatgctaaggaagctgagtcctttgtcagccctgactctgactgagaggcagacaggagccaaggccccattgaagctccaggatgacgatggccctcaggggaacagacgcaaaaccaggcacgggcctgccttccagctggaatctacctgtcaggcccagaacttctgtgcagttggagtgggctccccagaaggaaaaacaatacagctgagtctagtgctaggggacagagaactgggggctcaagaaagcaccccaaaacgggctgccaggttaaggatccatggggctgaagagaagtttgccccagagcccaaagcccagtctgcagtcagtgggtggagatgagaggcagcctgggcccctgcaggggctgggccctgaatcctgagggccaccgtcacctcaacatcacttcctacagcagaaaaaaggtcactcttctttccaaaggtggtaacacagcctcagagcttgctccgcggggcctctgccaggggccgctgcaaccgccacaccaccctgactggctcagcagcgcggtccagctcacggaggccaccctaggtcttgggtcttgctgtactgctgcagggccggctggagcacccgtgatgggaatgctgaatttcaggtgggggtaggtggcccccgtattattgtcccgggtgttgctggtgattatgccaaggaggtttcctgagtggttggagaagaggggtcccccactggagccgctgtgcacagcacacgtggtctgcagcattacgggcgtgccattcacctgcaccacagccgaaaggatgcctgaggtcaccgagggcccgcaagactggccaaagacgccaaagcccaccacactcacagcctcgccttcatggaagtgctcagcgggcacagggatggggacatcatccaggtcctcctccaggctcaccactgctatgtcatagggacatgtctcctgagtggcaaataccacacggccccagatggcccctcgtgccgaattcgccacccaggcctcgctaccttaggaccgtatagtact

SEQ ID NO: 131101 - DNA, 251 bp, Homo Sapiens
ctatagatcatgtttattcccaagccccaaccagacatgttctacccctcaagatccctgagacccaggctgtgggctggaaaatgaaggcacagtgtcaagagcgcccctgttggcatatgaagacccaggagtgctgaccttcagggatctgcctgcactgcccatgggcctggcacagcaggaggcactcctgtttctgtcccttctgtcgtcttctcgcagccgtatagtagtagtaggcggccgct

SEQ ID NO: 131102 - DNA, 1114 bp, Homo Sapiens
  misc_feature (132)..(132): n is a, c, g, or t
  misc_feature (241)..(241): n is a, c, g, or t
  misc_feature (997)..(1032): n is a, c, g, or t
  misc_feature (1034)..(1072): n is a, c, g, or t
gtttcaaggtttttgttccaaaattcttgagctgataaaccatggaccaaatttttcgggatttccctgatttggttctgggccccaaaattctccaatccattacaggtttccggaggtccctggctcccngccattgcttttccgtaagctccagggcatcgtaatacttaggagggcatgaggagggcccaggatcagttcttcccatatttccacttaaactctgatttgagatctntgattaaatccttgccataggaggtcttaaatgctgcttaattttttgccttctgatcattggaacggtttggccaccacatccacaattgcctgctcatctgtcccaaaacccttcattgccttacgaagaatttctgcatctcttatagcatcgaagttggcagctggtcggatagttccttgagtgacctgagtcactgtggcaggctgactagggtaagtaggttgtcctccaggatactgagaaggcatctgtcctccaggaaagccaccaggtagtggaacctgtgctggaccacctccataagactgtgaaggtggctgtggatacccagaaaagcctgctccacctggtgggactccaaatccttggcctggaggaactccgggataggatggagctccccctggctgtggggcaccaggatagcctccaggggctggataacctccaggcgcagggtagcctccagctcctgggtagccactacttggcacttgtgggtaggcacctcctcccattggaggaaagccactaggataaggatactgaccagaagggggaaaagatgactcctgacctgcaggaggatatccagggaaaggtgggtagcctgttgggggatagcctgggtatgacattctgaccccagcagcagcgtcacagcccaacccggtctcccgcaagatggagccgggggcccccgaccgtaatggccgaattcccgggcatatgtccggtaccgtcgactgnnnnnnnnnnnnnnnnnnnnnnnnnnnnnnnnnnnngnnnnnnnnnnnnnnnnnnnnnnnnnnnnnnnnnnnnnnncatcaacgcgctagcgccctatagtgatctatcaagtttttg

SEQ ID NO: 131103 - DNA, 713 bp, Homo Sapiens
ctgagccatttggtggtttatactctggttctcatcacgatttcccttgccataggaggtcttaaatgctgctttaattttttgcctctgatcattggaacggttggccaccacatccacaattgcctgctcatctgtcccaaaacccttcattgccttacgaagaatttctgcatctcttatagcgtcgaagttggcagctggtcggatagttccttgagtgacctgagtccctgtggcaggctgactagggtaagtaggttgtcctccaggatactgagaaggcatctgtcctccaggaaagccaccaggtagtggaacctgtgctggaccacctccataagactgtgaaggtggctgtggatacccagaaaagcctgctccacctggtgggactccaaatccttggcctggaggaactccgggataggatggagctccccctggctgtggggcaccaggatagcctccaggggctggataacctccaggcgcagggtagcctccagctcctgggtagccactacttggcacttgtgggtaggcacctcctcccattggaggaaagccactaggataaggatactgaccagaagggggaaaagatgactcctgacctgcaggaggatatccagggaaaggtgggtagcctgttgggggatagcctgggtatgacattctgaccccagcagcagcgtcacagcccaacccgg

SEQ ID NO: 131104 - DNA, 2002 bp, Homo Sapiens
  misc_feature (154)..(162): n is a, c, g, or t
  misc_feature (570)..(583): n is a, c, g, or t
gtaggctatgtatcttaagcatataaacatttgaccctttcttaaaaggtgccacaggtaatactaatctattttctatgtggaaagtgtttatgaatacagaaccaatttaggcaaaatgagatgcaaattattctagatgtaaaggttgaannnnnnnnnaaagtacacagttttaacatactatccactctatcaagcagacttagagggattccggaaggcagagctttcagtaaccttctaaaaaattattcaatattattacacagaatcagagattgctgtgatttttattcaatttgacatcttgattagaatgaaactagtaagaatgaaggtttacaaacattgcaatattactgtatcattgtgatatggctttacattgattgtatgtagagaacaaaataaaattagaattaaggcaataacaacatgtgcaaaccaagcacattaccctgatacggtccttgacagaaagctctttcggttagctgatgtttgatattgctgcatgcaggtcattgctctgaaggataagctatgaatagaaattttttttcattnnnnnnnnnnnnnntccctcctactggcccacaatagccagaagaagtcttcggtaatctccactcgtgtcacctgcaatcattgtgcccagagtcttctgatacatctgagcgaacatctgttttatttgtacaaggtcaatctcacttcgagtgaccacaatccggaccagggtggagtcatctgtgccagcacctttcatagcatagtagagcctctcagcaaagaaggcagggcggttcagggcacactgcaagatggtcttcaaaccactttctacatatccggaaaactcacggctcacactgcttaacaagtctcgattagccatcctagaataagcctccatggtagctctcagctgaggaaagcttcttgtggcaaggatcatgttaaagcaagattcatcggtccctagtctcccctcaccagcttgatagagacgctgagcatcttcctgagccatttggtggtttatactctggttctcatcacgatttccctggcacatggacacaagtaaacgttcaaaatgtcctgatgtatctgacctaatgtccttttcaaggtctcgtccaaattctgactgataacatctgacaatttctcggatttcctgatttgttcttgtgcacaaaatctcaatcaatacacgttcctgagttcctgctccctgcattgctttccgtaagctccaggcatcgtaatacgtaggaggcatgaagagggccaggatcagttcttccatatttccacttaactctgatttgagatctttgattaaatccttgccataggaggtcttaaatgctgctttaattttttgcctctgatcattggaacggttggccaccacatccacaattgcctgctcatctgtcccaaaacccttcattgccttacgaagaatttctgcatctcttatagcatcgaagttggcagctggtcggatagttccttgagtgacctgagtcactgtggcaggctgactagggtaagtaggttgtcctccaggatactgagaaggcatctgtcctccaggaaagccaccaggtagtggaacctgtgctggaccacctccataagactgtgaaggtggctgtggatacccagaaaagcctgctccacctggtgggactccaaatccttggcctggaggaactccgggataggatggagctccccctggctgtggggcaccaggatagcctccaggggctggataacctccaggcgcagggtagcctccagctcctgggtagccactacttggcacttgtgggtaggcacctcctcccattggaggaaagccactaggataaggatactgaccagaagggggaaaagatgactcctgacctgcaggaggatatccagggaaaggtgggtagcctgttgggggatagcctgggtatgacattctgaccccagc

SEQ ID NO: 131105 - DNA, 1021 bp, Homo Sapiens
  misc_feature (543)..(543): n is a, c, g, or t
attagccaaaagacattttaattttgtaaagaaaaatcatgccagagacagccgggtctgtttcaaccattattgtttctgcagcatgcatactttgggtttcatggtaagatgtgggtttgtcaagaaagaaaattacagcaagaagctatgctgaaaacatatacacttctgtttaagaaatgagaaaaacacagaaaaattccacacagtaattgcttttacgtgagttttaaatgtcattgtttgacttatgtcaaaaagcccccttagccagttctctcatactccggttagccaaatatctcaccttaaaaacagcaaatgttggacttcattttgaatgatctttgaggctttcagagatatccttagtcctagtggaaacaattccaaattttgtagattgtgcaggccatttttttaaggttacttagatatcgattttattttctttgacccacaaatgagaaaacacggggaattctcaaaagctttttacaggctgctattacgagaagagaagccaaaccaacatgtatntaggtcatgcgcttgaagtgcataaataagccctatgaaggtcaccaaacagggtgaaaaccactagttctcgttaccttggccacctctaaattcctgcctgttagacgtgtttggttgaagtggacacagaaagcgggtttccgagcccgtggttgaaagatctcaatttgacttgggtcctcaaggcgtccttgtggtaaagggagataggaaggctgaaattctggtctcctccccatggctccctctcacggttccggagaaaaagcaggtactggggccttctcttactccaaagcagatgtttcctacctggtattcggatatgcggaagtcagaagctttaaatctctattgattggcagcttcctgaaatacagagtcagagagcgtgtccaccacgtcctgagtttggtaccaacccccccggccgtaatggccgaattcccgggcatatgtccggtaccgtcgactg

SEQ ID NO: 131106 - DNA, 792 bp, Homo Sapiens
  misc_feature (229)..(240): n is a, c, g, or t
  misc_feature (243)..(251): n is a, c, g, or t
  misc_feature (683)..(683): n is a, c, g, or t
ttttttgtggcagagagcgcatggcttgatttttatttgttttattttcaatttaaatgcagtgcataaaaaaatcaaggagcaatgtacaaggaagaaagtcaaaataattgttattttcatcccccagagataaaatattagcagtttactctgtaacaccagcatttgtttttgctttcaagtggcatttaaatgtttaagacaaagaaactgctttaacaaaccnnnnnnnnnnnncannnnnnnnnaaatactgccaccctgttgggggaagaggcggcatttgctgaggttattcttctgagaggtcagtgaatagtaggaggtctccatttccttatcaccaacttgggtggtctctggagaatagggaactgttgtgttctagaaccaaaaagaatgaatcaaataaaggaaaacaaaagtaagaatgcatgcaccaaaggccagagactcctaggctgcaatccagtcttacaaggaacccccccacaggaaggattcagtaattctggataggaacaacatattttcaatggtttttgcaagcattcctgaagatgacagttctttcttaactttaacagtaagaaatatttgcagtggagctggtacaagctacagagagaagaaagatcatctctctggggatgctaggggatggtacagaacatctccanaaaagaaagggatcaactcctggaggaagcaggcctgtggcatacgtgggaatagaaatagagtggaaaaactcagcttaaaaatccaatgtaataactaaaggtgatc

SEQ ID NO: 131107 - DNA, 1060 bp, Homo Sapiens
  misc_feature (194)..(194): n is a, c, g, or t
gctaaattttaaggcctcctattttttagaagccgtttaatatggtagagtaagaagttcctttagcgagaaaattgccagtcataccagcttttgccaacggaccccttcacagggttgtgtgaggagcatatgaaccaaatcaggaaacagcccatcacagcactgcagcacagaataaaatccatgctggntgagatgtcccattatatttgcacaaatgtgtttcatcgctgtcgaaagactttccccttttccccgaagaatttttccacgttgaagtgtctgtgaaggtgacaagcatcgtgaggtacagggtgatgagtcgggagtcctgcaggatttcaggcttgagctgcttgagaaaatcacagcagtcccacaaaatgttcttgatctgttgaatccaaaggagggtgaggtccttagaacaagccagggacacataccacaccttaggctcattctcagcatccatgctgctcaggatgctgcgacacaacttctcaaatctctcattatcctctttgattctgaataggaacagcagtttcctggcaatcttgaaaatacaaagtgcacttcttttagtggactcagggtcatctgctttaaaaaagtcatcaatctctctcctgatatctctctgcagtcgactccgacagagaaaactccggacatgggcctggatcacaacagctgcccgctcccgttccttctgcacaagcctttcttctcgtgcctgacgggctctatcgatgaaccatgctctcgaggtctgagacagggtgaacatgtttgcaaacttgcacaaaccctgaggacctgcctgtgtcgcagaaatgccaggtaatcattagtgatcttgcacaggactcgtggctgagaacagcttctcacttcagaaaagcttgttattttttctttattcgccggaggtccccgcacttggggtcggggccgcagctgccactgtctcagcccaaaacacccgagttctgccagacccggggcagcagccgacgcacttccgccatcttgccccgcgatcccggaaatt

SEQ ID NO: 131108 - DNA, 678 bp, Homo Sapiens
  misc_feature (560)..(560): n is a, c, g, or t
ccgtttaattatggtatgaagtagaaggttcctctagcgagacaactgccagtcataccagcttctgccaacggaccacctcacagggttgttgtgaggagcatatgaaaccaaatcaggaaacagcccatcacagcactgcagcacagaataaaatccatgctggttgagatgtcccattatatttgcacaaatgtggttcatcgctggtcgaagactttcaccttttccccgaagaattttccacgttgaagtgtctgtgaaggtgacaagcatcgtgaggtacagggtgatgagtcgggagtcctgcaggatttcaggcttgagctgcttgagaaaatcacagcagtaccacaaaatgttcttgatctgttgaatccaaaggagggtgaggtccttagaacaagccagggacacataccacaccttaggctcattctcagcatccatgctgctcaggatgctgcgacacaacttctcaaatctctcattatcctctttgattctgaataggaacagcagtttcctggcaatcttgaaaatacaaagtgcacttcttnttagtggactcagggtcatctgctttaaaaaagtcatcaatctctctcctgatatctctctgcagtcgactccgaccctcgtgccgaattaacaccccagccctcgtactagccatat

SEQ ID NO: 131109 - DNA, 1063 bp, Homo Sapiens
  misc_feature (817)..(830): n is a, c, g, or t
  misc_feature (902)..(957): n is a, c, g, or t
ccttgaaataatgtttattccacgctgtcccgacagccccctctgcaggtcccctcggtgtactctgaggtgggaaaccctccctggtgggcggtgaaggggaactcgggccaccccaccagccagcagatgctccagcagccagagccccagcctggagctgaggctcttcctggggctcgccgggcccctgcaggcttttcggaccctcagccagcccggcttcctctgctttgggcagcagcaagctggcccttgggcacctggactgctcaccagccgcccagccatgggtcctgctctccaggttccttctagcagatccatctctgtcagagcaagggactcaggcctggaccatcttctgggctgtcactggggctctcagtggccatcccagctctgcgctggcccttctggagcgtgtaggcagacggccccagccgcaggatcttcccgctgcccaggcactcgtcccccttgtagaacacagcaaactgtcctgtggcaagggcacgcacagcctgcacagctgtcacccacacggtgccatcttgattgagggtcagcacacagggcactagtgccatctggtggcggaatcggaagtggcactccatcatcttgtcccggaccagtgctgcgggaggctcctccgcaatccagtgcacgcggctggtcctcagcaggtccctgtacagggctgggtggtctgtccggggggcctgcagaatggaatgtgaaggtggggacgccgaggggcacctggccccaaggccggcctcagtgtggtcctgggaacaactgtcctaccagnnnnnnnnnnnnnnggtaacggtgctggcaccgctcgaagtgttctacccacagaaattcatctcatcacccgccgggcctttgannnnnnnnnnnnnnnnnnnnnnnnnnnnnnnnnnnnnnnnnnnnnnnnnnnnnnnntgggcaagaggcaggggtgagatccgagcccatgacagtgaatgctgcaggttcaagtctgactcaggccctctacctgcaaccacctgtggggcagcagcacggc

SEQ ID NO: 131110 - DNA, 1495 bp, Homo Sapiens
  misc_feature (60)..(78): n is a, c, g, or t
  misc_feature (130)..(190): n is a, c, g, or t
  misc_feature (1383)..(1417): n is a, c, g, or t
gtgccaagctaaaattaaccctcaactaaagggaataagcttgcggccgcctgctcaggnnnnnnnnnnnnnnnnnnnatcagagacaggggcctctttgttgcccaggttagtactgaactcctggttnnnnnnnnnnnnnnnnnnnnnnnnnnnnnnnnnnnnnnnnnnnnnnnnnnnnnnnnnnnnncagcctgttcatttttgtatccctaatgtgacagtttgaaatgtctaccaattctgatattcttcccttcaaaacacagaacctcattctcctccctctgcacgtgggctgggcctggggggcttgcttttgataaacaggctgtggcggaagtgatcacgtgagacttctcagggtggctcatagaagcactgtggcttgctccttcctctcccttggttcacctgctctggggaaggcagaggccatgccgtgaggatgctcaagcagcttcgtgtaggggcccccatgggaaggaactgtggctgtcaccgacaccacgtgaggcactggcttggaagtggctccagccccagttgaccttcctcagacgaagtggccttgctgatgtcttaactgcaacctcatgagagactctgggccacaaccacccagatacatcactcccaatccccgactgacacagactgtgagagagtgaatgttcgttgctttaagccactacgtgtgggtgacttgttaaggcagcaacggatgaacacactgcagatactacttatgagccatttcaaataggcagtttctgtcagccattggaacactctcctagacttgcaacattctggagctgaaaggacgcctgggtcacctgtgccactccagctacagtcacagtaaccaagccaccagcatgatcaacatccgggcacggagcaggtttcagtgaggtttaatgcaacgtgcattaaaatatccaagctgttttcagaaacataagaagcctgaagctgagctgtgggtttcctcttgtccatcctgaggcttgggctgctccagatgcagcaggtgctgaggtgggaggagctagcaccaccaggcaccagagcagtctgtgaagggtttgtgtaattaattatccttcttaaacttgccattgatgtaaggtacccagtccaggatcagccgccaatcggtggcccacaccagccccacggcgcccacagcgccccatgtgtaggccgtcgggacccagttcttgaccagctcccggtagcgtgggcccaggaaccgggtcaccatcgcggcggagtcgcaccctcaggatgaccctgtccagctgacccggctacactgcgcaggcccccggccgtaatggccgaattcccgggcatatgtccggtaccgtcgactgnnnnnnnnnnnnnnnnnnnnnnnnnnnnnnnnnnncggccgcttcctcgctcactgacttcgctgcgctcgtcgttcgctacaccgactagcccctatagtgatctatacagc

SEQ ID NO: 131111 - DNA, 550 bp, Homo Sapiens
tttcagtttgacattagtcttttattataaccatattgaatggggtcgctttgccaaaaggagaaatcatttcttaaatcagtatgagttatagcataaagatggatgagaaaaaagcgatagggcatacatggcgtcactgaatattccatcaatcaaatgaattgtgccactgtgagaaaaactactatgacagcttttacatcaaagtggtctcaagcctgtttatacgaactttatatatctttttaacagtataaaaagagagctttagtaagtaacactgagaaagcagtctggcctttgagaaggaagcctggcttgccaggtgccatcctcaatgtatccggcctcttctctctgctccacagcctccccagtgcccctcctccagacacacagggcaggggccaggggccaggtgtgtgtccgcaggaaaggagggatggaattggttggagccgccacagaacggccactctatgtggggacctaagtcctccgtacacactcctgttctataatgaacccttggagcagttccttaaaa

SEQ ID NO: 131112 - DNA, 1247 bp, Homo Sapiens
  misc_feature (903)..(928): n is a, c, g, or t
  misc_feature (1037)..(1037): n is a, c, g, or t
gcatagaaaataaaagtgtttgctttgtaagaaaagtctggaaagtagcagaatcatctcaaggtgtcaaaggagccttcagtcatcgtctggggggcaggacaggcagaggggttggtccacttaggtgttgcctgaaagaaagaattgtctgtgggacccgggccttcctaggagggggccagggactgcggcaaggtaggggacagcgcgatgtttgagggcagagatgtgatttggggtggaggagccacgttctccggaggcagcgactggaagaagtacaacttacagcccatggccaggagggcgtggagcagcacgaccacggacagcagcactgtggccaccagcctggtgtcctcacggaccacgggccagagggtgaataccagcccggcggctgacaggcccagggccagcgccccaaagagccactgcagccaaggcacagggatgagccacaggaccaccatggggatgaagacaaagagggagtagccgtagatgcacacagtctccaggaaggtgtagggccccatgcgctcctggacacccttgcgccaccgcaggaagcccacagggccaggggcaccagccacgcatagcagtagatgctgatgcctgccacggtcaccttgtggaactgggggctgtagtggatggaggggtccctcctctgggccagcaccagcgtcaggttgccagtgacggccaggacaaaggccaacagtggcacagatccagaagtgggccatacagatccggccgattccgcagatggtgccgcacaaagttgtggccaggccggggcagcagtgagcctttgatccaggtccaggaccatgtgaggtgtccacgtcaaagaagcatctgatagtagctgaaggtccagaatcccgnnnnnnnnnnnnnnnnnnnnnnnnnnaggagcgcggccattgtcactctccatcctccacactcatcactcaggcatccatagctatgcacacactgagccacacaggcacacagcacacagtgcaccattgtgngggtcaagcatgatcagcattctgcatggtggtggcatgcatctggggtgtcagccagaagattagtggcctcctcgaattcatggaaggtcagctcgtcggccagatgccatggtcgttcaggggcgtctccgcatccctcgctggcgaccaactgcacccacggaggccctcgtgccgaattaaccacccagcctcgtacctagccta

SEQ ID NO: 131113 - DNA, 1257 bp, Homo Sapiens
  misc_feature (888)..(913): n is a, c, g, or t
tttttgcatagaaaataaaagtgtttgctttgtaagaaaagtctggaaagtagcagaatcatctcaaggtgtcaaaggagccttcagtcatcgtctggggggcaggacaggcagaggggttggtccacttaggtgttgcctgtgggacccgggccttcctaggagggggccagggactgcggcaaggtaggggacagcgcgatgtttgagggcagagatgtgatttggggtggaggagccacgttctccggaggcagcgactggaagaagtacaacttacagcccatggccaggagggcgtggagcagcacgaccacggacagcagcactggtggccaccagcctggtgtcctcacggaccacgggccagagggtgaataccagcccggcggctgacaggcccagggccagcgccccaaagagccactgcagccaaggcacagggatgagccacaggaccaccatggggatgaagacaaagagggagtagccgtagatgcacacagtctccaggaaggtgtagggccccatgcgctcctggacacccttgcgccaccgcaggaagccccacagggccaggggcaccagccacgcatagcagtagatgctgatgcctgccacggtcaccttgtggaactgggggctgtagtggatggaggggtccctcctctgggccagcaccagcgtcaggttgccagtgacggccaggacaaaggccaacgtggcacagatccagaaggggccatacagatccggccgattccgcagatggtgccgcacaaagttgtggccaggccggggcagcagtgagcctttgatccggtccaggacctgtgaggtgtccacgtcaaagaagctctgatagtagctgaaggtccagaatcccgnnnnnnnnnnnnnnnnnnnnnnnnnnaggagcgcggccttgtcactctcctcctccacctcatcctcggctccatagctgccacctgagcccacggccacagccacgtgcccttgtggggtcagctgatcgcttctgctggtggtggctgcatctggggtgtcagccagaagattagtggcctcctcgaattcatggaaggtcagctcgtcggccgatgccatggtcgttcaggggcgtctccgcatccctcgctggcgaccaactgcacccacggaggcttgaactcgtcgtcccgtccccacaggtgcgctccgccccccctcacctgaggccacctgggccctcgtgccgaattcgccacccaggcc

SEQ ID NO: 131114 - DNA, 1002 bp, Homo Sapiens
  misc_feature (319)..(344): n is a, c, g, or t
ggctggaccggtccggaattccgggatgtgacgggtaggcgagacgctcccgcgcagagagccccagccacgccggcccaggtggcctcagcgagggatgcggagacgcccctgaacgaccatggcatcggccgacgagctgaccttccatgaattcgaggaggccactaatcttctggctgacaccccagatgcagccaccaccagcagaagcgatcagctgaccccacaagggcacgtggctgtggccgtgggctcaggtggcagctatggagccgaggatgaggtggaggaggagagtgacaaggccgcgctcctnnnnnnnnnnnnnnnnnnnnnnnnnncgggattctggaccttcagctactatcagagcttctttgacgtggacacctcacaggtcctggaccggatcaaaggctcactgctgccccggcctggccacaactttgtgcggcaccatctgcggaatcggccggatctgtatggccccttctggatctgtgccacgttggcctttgtcctggccgtcactggcaacctgacgctggtgctggcccataggagggacccctccatccactacagcccccagttccacaaggtgaccgtggcaggcatcagcatctactgctatgcgtggctggtgcccctgggcctgtggggcttcctgcggtggcgcaagggtgtccaggagcgcatggggccctacaccttcctggagactgtgtgcatctacggctactccctctttgtcttcatccccatggtggtcctgtggctcatccctgtgccttggctgcagtggctcttttggggcgctgggccctgggcctgtcagccgcccgggctggtattcaccttctggcccggggggtcgtggaggacacccaggctggtggccacaaggcttgtctttccccggggtccgggctgcttccacgccctcctgggccagtgggctttgaaaattggaaatttcttcaagtcgctgcgctccgg

SEQ ID NO: 131115 - DNA, 755 bp, Homo Sapiens
ttttttcacagcatgggtgcatgtgcacacatgtatacatttattgcataaaattcatcatagcactttcccccatatttttataatccaaaaggaaaatgattcaagaaaggatttcattgtgctcagtttcaaaaaatataaaaatggacatcagattagagatacaagttcatacgctgaactgaattgtacataccaactgcctggctatggaaacccgtgacttgacttaggggtgctgatgacatgatctcgacaagaaccccctagcaactctcaggtggaggcagcacagggatgcggttcctggtgaggagggtcctcactcggtgaccacactgcctgggctcacagctggagggctcacccatgagggacacgggtggacacccactgcttcacatgcctaattcacattagaaacatgtaaagccattcagtctgtgcaataaagagatcctgtatgaaatccactcattccttggagggaagctggcccggaggcacgctctggttgacgggtgacgcacagtcctccagggcctgcattgcatccatgacacagacacacgtgaacacccagcccgccggtcctagcagccagctgtgaaagctgtgtcaagtcacgggggttcctttctaacagctaaagctcaaaggcatactggaccctgagggaaaacaggagagcctgagatgggaagggaagaaagggatttgcaccttcacagagcaaaatgggacaacgggac

SEQ ID NO: 131116 - DNA, 1789 bp, Homo Sapiens
  misc_feature (812)..(812): n is a, c, g, or t
ttttcccattcagtggccattggagatgtttattacactgcttcggctggacacgcaaccatgtgacactaatgtgtcatagaaggtctctgagcactttggctcattttgaatataatttttaaaaatatacacaaggctggctttccaatgtttaaaatcattgtagaaaccaacaggttgaacagaaatataaaagtacagaaaatggttttcctgctttggtgttggttgtggcggccgaggaacgtgactgctgctgtttacacaagtccagacgctgccagggcctgttgggatcagctcagtctgcgactaaaacagctggatcatcgactctcttgacttgccaacaccaacccatttgactgcgactcccacgtgattctccacaaagcggatgtagttctgggcctgtgggggcaggtcctcccacctcctggcgcctgtggtgtctgctttccacccaggcagcgtttcatactcaacttcgaccttctgaagcatctcctggttagctgggaaatagggaatccttttcccgttcagcttgtatgagacaccgactttaacctcacccagtacgtccaggatgtccagcttcgtcagggccagcgcagtgaatccgttgaccatgtgagcatatcttagaatcatcaggtcgagccagccgcagcgcctcttcctgcctgtggtcactccccactcgtggccgcgggtctcagcaggcctccaatctcgttgatctgctcggtggggaaggccccgatgcccacacgtgtggtataggctttcaccacgccatacacgtnacctatgttctgcggggggatgcccaggcccgtgcacacaccgcccacggtgcagttggatgaagtcacaaaggggtaggtcccgaagtcaaatttcgaggagggcggcgttggcacccttccaccaggatcttcttgggggggccgtggagtgcctcatacataaagtaaacaccatctcggaccatgggtctgatccgctcagcaaagcccttgagccttttgagttggccttcaatgtctatttccagggtggggaacatcgactggtgctggtgggccaggttcttgaatctggaggaaaactcatcaaaatctgacaggaggtcgcagatgcggaggcctgtccgggcagctttggaagagtaggttggtccgattcccttcttggtggtgcctatattcttcccctcttgtgcctggcgctgcacttcctgaagtccgtcgacagcctggtgaaaatcaaacacaaggtgggctctgtcagagatgatgagcctcttctcccagtccttcaggcctttcttttcattcttctctgcttcctcaaacaagcctggcaagtggatgaccaccccgttgccaatgaaggacacggccttggtgttgatgatgccgctgggcagcaggtggaagtcgtactctttcccatccaccaccaccgtgtggccggcgttgttgcccccctggcagcggctgatgatgtcggcgtccgtggccagcaggtccaccaccttgcctttgccctcgtccccccactgcgcgcccagcaccaccgtcacgcgggagccggtcgccgccgcctcctgctgcagccgcccccgcttgacgccgcctgcgccggggggccggtcgttggaggctcgggtccccgacatgctggcttggctcttccgctgcgctggcccggccaggagcccgccgccgccggcgtccgcgccattaaatggagatcccgggaattccggaccggtacc

SEQ ID NO: 131117 - DNA, 1274 bp, Homo Sapiens
ttttacgctgcaaacattttaatgattattgttgagcatacattttggaaattttttacttcaaacggcaacaagttaaataaatgtttataatatacaaagaaaatacaaccgaaagtaaaactcgctgtaagtgtgccttgcacttagaccaggttttccccccttaatacatctttatttttgagctgcaaacacacttaagactttgatcttcatagtatggcatttaggaaataaaaatatactcccaccttaaagaaataaaaagtttggtgcatgattatatgccaaacaaagagagaacactagaatactcttgatagtgcaggcatcattaaaaaggaaaagaaaaagcttgagatgctcattaattctctatgttttaaggaagcaggatttttgaccaagtagcttaaaagccagcaaaacagggatcagtgacagcaactgtagtgtatggagtatgaaatgacaaactttacacaaatacactgttagaaatttaccagtgaacactgaagatctgagaagctgctctttggaacagtcaagtgggaccaccttattccagtcacataagcccttgtaaagtaacacagtgttctgtgctatatacttgctggctgggtagttacaggatttgttttgtcattagcagctaaaaaacttattccacatgttcttaaagccttaatggtggaaaaaaaggcaagtgtcattagcatggtggatcatatacttctctgcacacaaacacaagaggcttcactagtatttttaaagtctctgatgtctcccattgcacttcaaagctcaattgagatgaaagcctttctccattgtagcagctagcaggcgctctctcatgatctcctcggaagaatattcaggcaacttaaggtaatgcacacatgtattgactgatggatagcttgcatcagtagcatcaaccttgcgtacaaccgtgagcctgggatgcaggttagccagtccacctgggggtagagttgaacaaccagtggtaaactgcaagaatgctttcctttcatcagaagacatgccacataaaaccctcacaaacctcaggaaaccagggctgtcacgtgtataacccagcttaggttcagtgtaattgataatatcctctgctgcccaggatggtgactggtttccacaaagaatcatttggacttcttcatggctgaaggaacttaatttctccattggaaaaactttattaaacccatctctaaaggcttccatttgtttct

SEQ ID NO: 131118 - DNA, 685 bp, Homo Sapiens
  misc_feature (654)..(654): n is a, c, g, or t
aagaaaaaactcttaaatttatttttcaaaaatgtgattatggcaacaaataaactaatatgcagtccagttcaccctactcacagtgaaatcatagggtcagtgaaaaagacgcagtcctcatgtataaagaatatttaaaatgtcggttgtatcaagaccttctattattgaacactgtatggcatcttgccttgtaaagagcaaacacagcccttataaatcctttaaaccaatccagcattaacaggagtaaaatttacagtaactacttttgaaagctgtaaaattaaagcacctatttaaattaagatcaggaatctatgaggttattattcataagagctggatgaaactaaatattgcatttctaaggaaaaaattataatcatgcactttatataacttacaaggcaaatgggatactatgaaaaatgcccttcatagcacatttaagcctgaatttaagtaatactcaacgggaaagaaacaggctctgttacggcgctggcggagacataaaaacacaaaggtgtcactgctcagggcagcccttcctgtctatttttagaggtctaagactccagccttaaatagttttgatgataacgcttgtggcataactcagcgtgtaagacatagtctgggaggaanacggttcttttcctgctgtgtacctcgttca

SEQ ID NO: 131119 - DNA, 682 bp, Homo Sapiens
attacatcaatggcttgaaaatttttatttaacctcagcaaatattggaaatagaaaaatgaattctgcagaatttcacaaataaattttccaatttccactaacaaatgttatcattcaatggctaagcagttataatgctatgaacattcaccacaatgaatgtgctgaaatagaaaacaggcaaagagacattaaaatattacttacaacagcattattacaacatattttctttaaaattccaacgtggatttcatcacttcaaaagatatacagcatttccattatatttgcaaacttaaccttatacatcttttaaaatcttgaaaattttttaagctgtctaaaaagcacttagcaaagtcgataagtctacctaatggaatactatccaccccggtataaatttcgttttaggagaaggtggctgtaaacactcatcatcacacaacatgcatagcctctgctgaccttcccttcttctgaatgcgacgccactgcaattgtgctttactacaggtaagacaggtaagagaagctgcagagattcagggactggcagaaagagcatcgcacaggaccactaggtttaggtgacctggctacctggagtccatctgaggaaagtttcactacaatagaagcttgaatcctggatcattcggtttagaaacaggct

SEQ ID NO: 131120 - DNA, 1006 bp, Homo Sapiens
  misc_feature (526)..(526): n is a, c, g, or t
  misc_feature (743)..(743): n is a, c, g, or t
  misc_feature (832)..(832): n is a, c, g, or t
  misc_feature (871)..(871): n is a, c, g, or t
  misc_feature (876)..(876): n is a, c, g, or t
  misc_feature (918)..(918): n is a, c, g, or t
  misc_feature (969)..(969): n is a, c, g, or t
gactgttctaaatttattaggtatgaattttacaaacgttacttatatctgtgataacattagagctggagaatattgcaccttctccaagttgcatggtgagaaccaccaatagcgtggtagaacttacggccctttccaaggccatggctcttgcagcctgaggatgtcagcccacacatctccccatgcttgtggacagatttggtgatctgctgggtgtcaagatttcctctgatagttttatggaatggatcaatgaggataacctcaaaaaatttataagtggaacacgttcctcttccttgtgtggcctgcctgttccttggcacacctagaggtgaactgggatgactggtcactcatgctctgtgtgaggttgtgaaaaatgaaacccactcaattgcagagaacagcaagaggaaggaaactgaggcagaaaaggaggtgtctgagaggaggaggtattctttggtcagccctgaaaggtgtggttactcttcacagcaatgatgttcgcgctganaagggaaggtgggagattttgacagatagcacagaacctggcgcaaatgtaagctccctaacatcgggagcttccctgagaagtcaacttcttttattctatcaggccactgtaaatagatgggaattcgttcttgcactcccacccctgatgcttgtaggaatgtctgtgtgcctatgaatggggagataccatgttcagtcttttcacgtagtanaaggaatactgagatgcagttcattgtaagctctctacggttgcaagcattttatgtatgtgttggtattcacatatcctgcagcgatnctggctccctattatggtgtagaatgaggtcagagttantaganagtgggatcgggaactggtgctgcttgtatcagctgtacacnaggatgctcctaatggtgatatctcggcgatctggctcaggcaatcctaangatcgataatcgacagcaactgtctgggatgtacgtc

SEQ ID NO: 131121 - DNA, 671 bp, Homo Sapiens
ttttgcacagcagtgagctctttattttaggctgggtgggggcagcatgtgacagtcaagagggctgacccttgggctgcacggacctagataagatgcccagggtcccggaatgttcacagcccacagccaaggtgagcaaggggcagggaatgtcctgggctcagagcccgagaccctgcaggggtgtccctgcccatcagcaaacagcataccctgacaccagctgcaccccaggccccagccggcccttgttcctgacccagacaagaaactagttcatggggctacaactccccttctaggggtcagaggggagagaaactggactgccgtctccactgctggccggctcatggccccctcttccctgatgctccccaggagctgccccagccagatgttcatcgctgagcctgcacccaccgaagcccaaagcttcccttcttggcctctctgaggcctacacaggagagcagggcctggttcctcctggagctgattcagccccattctgtcggggcagaggtgccaaccccaagctccagggtcagatgtgaggtgaggaaggtgaagagctggagagcacaccacagtggacaagccccaccatgtgcagagcagcgtgaggctccaggatggtcctcagtagatcccatggctccaggtgt

SEQ ID NO: 131122 - DNA, 1072 bp, Homo Sapiens
caccactcacattttattgaaaacagtgggcaggggggctgggagaggagtgctgaccgttgtgaaggagtaaaaacccaatgggtaaggggccagacaggtttcacctggctccatggtccaggaaagggcctgtggggtgggcacctgccctctctgggatccctcagcaggaaaatgcagcaggctcctccaggaaagggaggcattgggagtgatgggttgtaattcccatacgcatccaacccaaaagtgagaggggtggtgctaatctgggggtaggaggggacaagacagggctactctcgaagtatctagcccagctcctcgaggtttctggaagacttcaatgttagtctgtggagaccctaaagatggagattgaggccaggagagcccctcactgacccattttaactggccccaggaataccagagcatcctaatctaaggagcgcaggcctgtcaagccccaggtctcagccatgctgctgagtgctcattgggaagcaggtgtgagaaagggtgatgacccactatgtgtccctcctgaggaaggcagaggccttttccatactccataaggccaagccactgtgccaggtcctgagaggcaaggcacgagtctgggggaggggttaatctccacttccccagatgtccaaatgggggtgtgggtgggggaagtaatctccctggtccagcattctcaggagacagcctcagggagggggctcaggatgcccagatcctcctgcccgcctctgctttgctgggccagtggtcaagcagttgccgttaccagccacagctgtggtggggggaggtgaggacgcctcaccacctcccatctctgcttcaatgaactcggtctttcttttacccctcaaaagaaatcaacagcaagttgagaggggagaagcctcaggtgaaggggtgagtatgggccgtgggccgaggggaagaaacactgttaggccctggccctgattccagcccccgacgcgtggtcgacgatatcccgggattccggaccgtaccagcctgctttttgcaccacttttcatttcac

SEQ ID NO: 131123 - DNA, 825 bp, Homo Sapiens
aactccaagccatctcctctttccactgcaggaaactgcctcttttgtcagtgaaataatagaaagattgtgttagttaagtgataactgtcatttgtttgaaaatgttcgagactgaacaaatagcatttaaactgctggcatatagatgagatattgtacttttgtgcaatgtttattacctttgatttaattgtaatgtgaagcttttactaggtgaatagttcattatgtagtggaggcttcgtggttgtccattgaattgtcacagcaaaatctataagtttcttcaattctacaagatagatccatatacctttgatcacttggagactctttttttgctggtttctagataactcaggtaaatcagacctttacagagtacagggctaggtgaaagaattactgaaaaatcaccttgaaaatccgaagggctgatataccctttatgttcctgactgatgcgcagaacctgggggaaatctacagcaatatacaggttgcaatgctgataacacaacagcaatcctctcctctacgtggacttactgttgtttttttaattattattggaatgggattttagaaaatagaagttacctttgtgtgtgttttagggaaggtagagaagaatctgctctttctctgaatactgttttgaccccaggcaggaccttggaaaggccaaaacattaacagtagtacttctgttcactgaagagttatgttacatgaagataaaatggttttgtcgtgtttattattgtattttgtgttgatataaataaacatggtaatttaaacaatgaaccttaaaaaaaa

SEQ ID NO: 131124 - DNA, 832 bp, Homo Sapiens
  misc_feature (512)..(512): n is a, c, g, or t
ttttgtggagcaggaggttttattgtaaagaggccgattgtacagagcaaagattgttctgacacggggggctgggtggtgggacccagaggccagagctgggtgaaggatgaggggtggcatcgccccatccaggcagtgggcagggcagggaggactaaacggctgcctcccagttcccttccctgcccctcattactgggtaagagggagccaggctatttccacggatccaggagaatatagcaggagaccctcaccaccccacaccatgccccaaggatacgggaggtgccccagtctggcttttgcagtcggccagctcccagcctcctcgaggagcagcctggccacacctttttcccctggagcctggaacagctggctttgggttaggaggctggaagcacccccttaccctgtccaggcacctcaagggacagcccgtggttccctggtcaaaccccttagggcacagtgacccattggcttctgcctctggggctgggtancacaggagtgggtgggcactgaggggccagcactgagccaggtcttaaagagggagtccgagtgttgggggcagtggtctctggtgggggcatagccccagagatggggctcctgtgagtccagcctaggggttgagggggatctgagccagttcacattgtcctggccacaggggtctctagggcatgacactcagggccactctgcctgttccaggccctgatcgtggtaatttaaagctcagaatggtggatgggggaagcactcagggaccaaggccctgccttccccttttccagacttgggatcctcaagagtc

SEQ ID NO: 131125 - DNA, 600 bp, Homo Sapiens
  misc_feature (67)..(80): n is a, c, g, or t
aatgtaacctaagtttctgtttgacatatgacactgcaacttaaaaatgttaggaaattatttgccnnnnnnnnnnnnnnagagttaagctttataaataatctgtagaatcaattgaagtttaaagcttaaggatcactcttaagacgtctacaaaatcttgtatatttttaagtgtgccaatttgtaacatattttgtaagtgtatatttttcttagaaaagtgctgtgaagtgtctgtatgtgagagttttcctttttctgcaccactaggtgctaataaaaggatatttacttcaaagtttctggttttagaaaccacaatacaaagaagaaaaatacacttttgttggaaattttgtaacacaaaacatgttgtgaaagagtgtagtgatcttgtgcaaaaaaaatgaacatttgtgagcttcttgctgttttatagattttcttgtaaattattcttgtaacacttctggttttgttgttcttgttgcgaaggtttcaaatatttgtgactgaatgtacggtgaaactgtcataatgttacctagctgagttttgttattgtttatgaaataaataaaaagaaaagtttaaaat

SEQ ID NO: 131126 - DNA, 857 bp, Homo Sapiens
  misc_feature (600)..(725): n is a, c, g, or t
tgaagaccaaagcaggtctttgccctttctccaaaccaagcagagacctctgcctcacacacaatcagactgatgatttggtgctcctttagctatgcttacagtcagttgtctaccaaaagaaaagtaccatgtatttggaagccaaataacagaatgtcaggctcgaagatctgttgtgatgactaggctaaatgcctcaccacacctgtgttggtcaactttgtgccctatggttagttaagagcccctgtctacagtggtttcccacattaggcaaagctatagatcccacatttataagtctcaatgagttctgaaggtgtttgaggagttgcaagttccaggatcattccagattgaaatgatatgagaaagtcacaggtatgtgtcttctttttcccatgtggaatggccataacttgcctctgaacacacacaactttttgaatctgtgtggccctctctcagccactttacaacaccttgacacagatcatctctctttttcatctcacgttgatgcaaaccatctttaagttgacagatttaaagtgattcatagaacagggtaaaatcggccaggctcagtgacacatnnnnnnnnnnnnnnnnnnnnnnnnnnnnnnnnnnnnnnnnnnnnnnnnnnnnnnnnnnnnnnnnnnnnnnnnnnnnnnnnnnnnnnnnnnnnnnnnnnnnnnnnnnnnnnnnnnnnnnnnnnnnnngttgtgcatgcctgcagtcatagctaatggggaggtggaggtgggaggatcgcttgagacagggaggcagagattgcagtgagccaagatcaccactgtactccaacctgggcaacagagcgtgactgtctc

SEQ ID NO: 131127 - DNA, 675 bp, Homo Sapiens
  misc_feature (209)..(228): n is a, c, g, or t
  misc_feature (644)..(644): n is a, c, g, or t
aaggaaaaatagctttatttttaaaagaaataaattctctatttaaagcatacatgagatagtatctttcatttagtcctaagcttgattatttatgctcattgtaatattccagtgacattctggacataaatttcaagtatatcaccatatacttattgttaaatatcaaacaaagctactgactgtgagggaaaaatttcagtgannnnnnnnnnnnnnnnnnnngttacttaccctgagatactcatcccacagtatatctgagatttagctgaacatttacaaattttaacaaattttttttctttccattgcatgcatcgatatgccaaattctgcacttcaatccagggtaaaataatgatagtgtttgtaaaccagatagtgaaaaccagtgtgttttctaatactgcccatgatagacagagtgaaatcacagcataaacagtagccaggaacctatactgcaaacatttggcttcaagtatcttgcaacaaatagctactaatatgaccatacacggcacatagaacaccacagtcctggattgtagcatgcctgtaaaacccattaaagcatttttttctcaaactttttgttcattattaccctccttcccaattacagaaattaaattcanattacattaaatagttttaactacaaatttc

SEQ ID NO: 131128 - DNA, 876 bp, Homo Sapiens
aaggtaaaccatccaagcagtttttattcattaatattcataaatacacacagcagcttcattagagatttcaattttcctcttcagtttgaatgtggagtattaggagagccttttgcatgtcaaggtacaggaagcagagatcacccctgcactgctacctacatttacctgctagaagtaaaaattagttaagtggaaatgattatcatatatattttctctcttccttttgaatgtacacaatgtaacaagagtgacagacctgaaattacaatcaccaaacaaacccaagatagttgttgtccactttcattggcaaatacagcacagaggacattgtctgcgaattgggatgtcatcaaagaggaggtggtggaggctcatttcctttattactctcttttaaatttaggttttctaaagcaacatctaaaggcataatatctacacagcccatagcaccaaaatctgccatctccccccgatcatcctcatctgaggatgagctctcttcacgcactaaagtggacagaaggagctcttggacaaacaggctgcggtctgcacgctcgctttccatggactggcgctccgtttcagacattttaggatcattcaaccttgttaaaagaaactgggaattctgtagagtctgctgactgctttctgtattagctatgttggttgttgctgtggattgtgtgattgtagtggtgacactgcttgtgttagtacgccgggttgcgttgcgtgcggtctccagttgttgccgtgctgcctgggcatgctgccgttctagctgcagctgcacccacgcgtccgcgacgcgtgggtcgacgatatcccgggaaatccggaccggtaccagcctgc

SEQ ID NO: 131129 - DNA, 1050 bp, Homo Sapiens
  misc_feature (701)..(701): n is a, c, g, or t
  misc_feature (786)..(786): n is a, c, g, or t
  misc_feature (816)..(816): n is a, c, g, or t
  misc_feature (881)..(882): n is a, c, g, or t
  misc_feature (923)..(923): n is a, c, g, or t
ttttatttttttagcatcatatgtttattgcagaaactttaggaaacacaaacttaacaaaaagaaaagaggaaaaaatccctgtaatcccaatccccagagagacaacagtatttcctacatatccttctgaactttcttttatgcctaggaaccttcacacattgattttttattgaaggatcaaatcattcctaatgttggataacctcctcattaaacagttgtgaacaggttgtctcatatattctgtccatattcccatttgacatattataatggtatgtttgaatatagtgtcatattttaaaatacattataataatcattaccattgtttgagtgcttactgtgtgtccggcactgtactgagtactgtggacacattatctcatttaaatctcacagcagcataagtgctattatgatcatttccttttaaagataaggaaactgaagctgaaagagtgaaggaatgttccctgaattacacatctagtcactagcagagtttcagtttccacccaagtctggccaccttcaaagcatgtgctcttcaggaaagcattttccataggaacctttttccacaggaacctttttccacaggaacctttttccttaggaaactttttccataggaagcaccatcccttgggtaagatgtgcagtagtttatttaaccagaccctacttctganacgttactattatccaccacgctgatctgaacgtccaggggcatatgtatctgtgcacttctctaattatttattacttaattanttactactttatattaaaggaggagagcanaagagtaccccaagatggagtgccaaatctctccaagactctcctgctgctgtcatcagttacannagtcgtaaggctcgtgcgatcttggctcgaggcaatcctanaggagtcgataatcgtacatgcaactgttctggtgaatgtatcgccacatcaaaacaacagcggagataatgtagctgggggcagatgacatcaatatggttgtacgccgtccatcgaacgtggaag

SEQ ID NO: 131130 - DNA, 1117 bp, Homo Sapiens
gaagcatcttttttttattcagatttttccagtcaagtaaattgtctcaaggcccctggcccaggtctgagtgtcactaccagaaggatccaccagatggcactccttcgctacttcctgtactcccaacttgccagagatgtcgcctctttccgctaaggcacaaaacttgcagagccaggtgttccccaggcgcttccccgcacgccaccgcccgcgccatccccccagcccccaccagcgtggtgagggtgtcctcggtccccaaggtctgcagtcttggccctctctgagtcggtttcatctctcgggcttccaggcttctttttgaggggcgctctccaagcttcgggctccagtttctgcgcagtccgcacatcgacccccccggtcaccagggcgccaggggctgggcttcgccaaggacaccctcagttataccagcacggctgcgcaacacttctttggagccttcgcggtgacgagcagccgggcgaagcggccctcctcctcacgacagcccgaggagggggtcagggtcattttcagacagccccctctggcttcctcttcacaccctgctctagatggaggagagaggtacgcccagcccggctcagctaaaagcagggagaagagcccggccgagacctggaagcctcggcttgggaggagctggtccgacggacccttcctgccccggtttgtccggactccggatctccgggtaggagccagaagaaagcgcattccagggatttcaagcgaactatacttaaaatcttggaggtgggaaatgtagggtgcgactgagcctctcccgccttcaggcctggcaactctgggtcggcgctcctgaaacctcacatctcgggtgtgagcaacccctctgattctgcttctgtgggcgcctggaatcggctcccggtatccagcccgcttgcgctgttgtgcgcggctcctagggccgcccgcttccagcctgggttcggcaataaaaactgtcgctggcttaaggacccggggcaagccagcgacgcgtgggtcgacgatatcccgggaattccggaccggtacagcctgctttttgtaccacttgttcatagtacaatgtttt

SEQ ID NO: 131131 - DNA, 1506 bp, Homo Sapiens
  misc_feature (39)..(39): n is a, c, g, or t
  misc_feature (95)..(95): n is a, c, g, or t
  misc_feature (108)..(108): n is a, c, g, or t
  misc_feature (134)..(134): n is a, c, g, or t
  misc_feature (275)..(275): n is a, c, g, or t
atgcctccctccagggacaagcccgaaaggaggggggtncaggggtcatttttcagacaagcccccctttgggtttcctttttcacaccttgctntagatggaggagnagaggtacgcccagcccgggctcagntaaaagcagggagaagagcccggccgagacctggaagcctcggcttgggaggagctggtccgacggacccttcctgccccggtttgtccggactccggatctccgggtaggagccagaagaaagcgcattccagggattcnaagcgaactatacttaaaatcttggaggtgggaaatgtagggtgcgactgagcctctcccgccttcaggcctggcaactctgggtcggcgctcctggaacctcacatctcgggtgtgagcaacccccatgggccagagctctggacctagtagtaatcgtcattctcttcactctcagcctcctcctcaggaaccaggtttagtgatcgcagctgggggatgcctgtagagttcagctggtcaggtgtgagcactgtcaagctagcaggggcctccacttgacccagggcattgcgggcaaggcagcggtaagtgccctcatcactgggacgcacagcctggatctgcagccagccagtcacctcaaacctctggggtccacccctaaactgcacagagatgtgggggtcatcccctggcagctggatgtccaagccatccttcctccactcgatggaggccatggggtaggcaaacacttcacagccaaagatcacatcctgccctgtcacattccaagtgtcatatggatgtgacacgatctggggcccccgattcgcagggccccgggtgtgccacagtgaggttggcatcgggccgagcgcgggccgcctcctgcaggcggcagatctgggagtaggtgtgaccgtcggacccgcagagcggactctgcgaacgacaggcacacagaggttccggcacctctccgcggctcagttctccgcctggtgtccagccggcactcaagctgctcgcccgcagtgcccgtagaagtgagcactggggtccaggtcgcagagctggccctcgaggttggcgcattcccagcaagcaggccgcacgcgtcgcgcaccctgcccgccaggcagccccgcggcgcggcgcacatcttctggccggcagggagcgcagccctcgccctccgctagcagccgcatccagccgcgccgcaggtaatctggggcctggggatggccttgcgccggtcgggggcggcgtcagcaccaccagcagtagcaggagcacaggcagcgccaaggcagctgcgggccgcggcggcggcagcatggttagcgggaagccctgcgagcactcggggcatcagcgcgttcgggcaccctagtgtccggaactagacccttcgcagcagccgtgattcgagtccgaaagaaaaggttatggaaagaaagcagaggcgcagtcagccgggcccgccggccacctctgctcc

SEQ ID NO: 131132 - DNA, 1206 bp, Homo Sapiens
gtggggaaaagtgagtgattcgtgttgtttccagtcagccccgctccgagtctcagggggactgccccgcacacagactgttcaccagggcctgcagcctctcggacagcaccacctggtagtgtgcaggggtccggagccgcctgtggtcagggctgagtcggctcggggacagctgggccagggctctagactctgccagggatgggcctcggctcaaactgtgtgactggtggagggttccgtcagccccgctctgtgtctcagggggactgcgtcgcgctcagactgttcagctgggcctgcaggctctcggagagctctgcctggtactgtggagtggctcacgcagctgcactgaggtggtcagggctgagtcggcttggggccagctgggccaaggctctagacttttgccagggatgggagcggctcacaccagctgtccctgctggaggcagagccgcagtagtggctccacctgggctggcctcacggtgcagggctcctgggcccctggaggccacaccctcagctcctgcccagcctgtggcactggctcttctgctaactgcagcatgtccatgagtggagacccgtcagagcccaggagccggaaagcagccttgctcccaggcaacgtctgcttctcggggtcctcggtcagcttcattcgtggctggccccccacggccaccagcttatagacgccacccagggaaggctgttgggggcaggtgaccacactggtgccaatgccaatgacattcacctcactgccctcctggggcagtcggggcagcgcctcctcgtcaatgttgttgctgactacgatgaggactgactccagccagggcacctggaactgggctgcagcagctcggaagaccttgcggatctcctgagcctgctgtagcaggtcaccactgtccagcctcacgcccactgcccggtagcccagctctcccagggccaaggcgactgctaggaagttggggagaccactcctccacacgctgtaggtgtccaggaggccctggaaggcccggggaaaagccaaggcataggccacaaaggctgcccgctcgcctggatgtggctcctgcacccccagccccaggtgggcacacacctgctccagccacacctgggctttgccgccaggtccaccccagggccctcaccagctgctggcgccaacatcgg

SEQ ID NO: 131133 - DNA, 455 bp, Homo Sapiens
ttgtggggaaaagtgagtgattcgtgttgtttccagtcagccccgctccgagtctcagggggactgccccgcacacagactgttcaccagggcctgcagcctctcggacagcaccacctggtactgtgcagggctccgcagccgcctgtgctcagggctgagtcggctcagggacagctgggccaaggctctagactctgccagggatgggagcggctcacacagctgcacggaggaggtaaggaaagagaagcttggggctagctcccagtcagggctctaccggggctgggggtcaggatgagggcggtggggcagccacctgtccctgctggaggcagagccgcagtagtggctccacctgggctggcctcacggtgcagggctcctgggcccctggaggccacaccctcagctcctgcccagcctgtggcactggctcttctgctaactgc

SEQ ID NO: 131134 - DNA, 1758 bp, Homo Sapiens
aattgtttaagccaaacatttaacaacatacaagagaccttacaaaaagaaggaggtaagtcctaatgctggagaattggttaatcaggtgactggcaaagaggaggatgaggcctaggcaggaagtctccagaaagagagggaaggctgcatagttatacaaagaaaatgagagagcggcgagagagaggcatttgtgatgctctgtaaacatcccgaattttcaccgtgacgcagaccttcagctccagaagccagtggacaggcctccagcccaacctctatgccaggcgtgacaaggcactgacagacgccagctccccgtgagcccgcagtgggaggggcgaggcgacactgctacctcgcgctaacggatggaacagatcagtctccacgcggcaagccctgtgggcatttccagaggaaaaacgctggggagtctatccacacagagaaggggtacaaagttctcttgcctggaaaatacaaattgagaagccttgactgtcccgggcttggtcaggtggggttggagcccgtgtcagaagaaggcccggcctcggaatggcgccgggaagcagtgacgacgcagaagccgcctttgtcaggagctctgcgaggtcgagagaaaccagcgatcccgcctgggaggcagagcagactccctgaccgagactagggcctggtggtcggaccagaggccacgacgtgctggacactgacgcggctgcggccgcttacctgccagtgaagcccaggttgcttttccagactgtgtgtagcaccaagaacgcttccttcacacgatcttcaggatcgagcgggctgactgggagtgtctgcctcagtcccacgtggcacttggaaaaaacagagcgaggcccccccaagaggcagcgcccacccggccgccgtgctcccccaacttggggacgtctggccttggacagctgggcccgtctctcaccacccacctcagaggcaaaaaaggattcacacccagatctctagaaaaatgatcaaaagcaggtttcttctcacagccaagcttcctggacatggcagttcattacatctcgggaaaacgtaaatcatttcttcagctgtcaatactgtgtccctcacatccttgagcctcgttcttgcaaaatcttggccttctcggctgggctcgctggccgtaccgtacggggtgttgtgcagctccttggacaccacacagaggaactcggcttggtcttcgttcccatagttgtaagaggagccgatgctgaccaactgctcgaacttccagccgtcggacatggtggacaccatctgcgtgagctcctcctcctggcactgcagcacacggtacacatgcttcacaggcacctgcgatgttttgctgtctcgttctctaattttgtcctttacaagttttattaatgaggtgatattgtaaaattctgcttcctccaacactccttcctccgcgaggtctttgttaatcaccagcttgccgtgtctcaggtagttcagcacaggcccaaagtaggtggggtctctgtcgattaaataggcgcctgtttcatccttgtctgagtccaggtcgggatcggcctggcataagcggtacaggaaggatttcgggtcccggcacagggtctgccgagtggtgaggaagtaggtgccgccgacgttgagtcggacccacttggacacgctgccagggcgctgggccagggcgccgagcccagcgctgcagcggcggcacag

SEQ ID NO: 131135 - DNA, 1325 bp, Homo Sapiens
  misc_feature (890)..(890): n is a, c, g, or t
  misc_feature (898)..(898): n is a, c, g, or t
  misc_feature (900)..(901): n is a, c, g, or t
  misc_feature (930)..(940): n is a, c, g, or t
  misc_feature (1036)..(1036): n is a, c, g, or t
  misc_feature (1056)..(1069): n is a, c, g, or t
  misc_feature (1084)..(1085): n is a, c, g, or t
  misc_feature (1093)..(1101): n is a, c, g, or t
  misc_feature (1111)..(1111): n is a, c, g, or t
  misc_feature (1118)..(1121): n is a, c, g, or t
  misc_feature (1129)..(1130): n is a, c, g, or t
tttttcataaatacacagttttgtttgctattttcaggggaaacttaggcattaaactgtaagctgataaaatacgatacctaaaaaagtataaaagtataaatatccccttagaataaattttagtgaattaagtcttaatatctttaaattaaaaaaaccacaagcctatctactatgtcaaggtcaaaaatcaaacaacgctaagcggccagcagctccccagagaggatgcccaggagccccagcggccgccttcctcccaggctctgctggggctaagtctgccttctagaaaggcttttataaattgtttaagccaaacatttaacaacatacaagagaccttacaaaaagaaggaggtaagtcctaatgctggagaattggttaatcaggtgactggcaaagaggaggatgaggcctaggcaggaagtctccagaagcattggaaaccagacagtgtcagagcctctgacctgcaggcgggaggccggtggtcagtctgcacagtaccccttgggaagccggagttccggaagcaaagcgcttggagcccgccctgcacgccgagtccccagactctgacaggtccccacagccagctgagaaaggtctgttttcaaagcatgcgggcagcggtttctaaaggaatcccagcagctcccacggcatgtcgggcagagcccgtgcaggtcgagtgaagtcccaaacatcccagaaagagagggaaggctgcatagttatacaaagaaaatgagagagcggcgagagagaggcatttgtgatgctctgtaaacatcccgaattttcaccgtgacgcagaccttcagctccagaagccagtggacaggcctccagcccaacctctatgccaggcgtgacaaggcantgacagangnnagctccccctatcttaccccccggagggnnnnnnnnnnngtggtccctcgcgcccccgcctcgcccagcccagtgtccactcggcaagcccttgagccatttcaaacgaaaacccctgcgcgcgtttaccgatanagagaaggggcccaccgctnnnnnnnnnnnnnntacccattgagaagnntttcccgnnnnnnnnntcctcacctnccccaannnnccctgtgnnggccaggcccggcgtcggaatggcccccgcacacgccctgacgacgcagaagccgcctttgtcaggagctctgcgaggtcgagagaaaccagcgatcccgcctgggaggcagagcagactccctgaccgagactagggcctggtggtcggaccagaggccacgacgtgctggacactgacgcggctgcggccgca

SEQ ID NO: 131136 - DNA, 364 bp, Homo Sapiens
agtaaatcattttttcagctgtcaatactgtgtccctcacatccttgaaccttgttcttgcaaaatcttggccttctttctgggttcactggccatactgtatggggtgttgtgaagtttcttggacaccacatagaggaacttggcctgatcttcattcccatagttgtaagaagagccattgctgaccagttgttcaaacttccagctgtcggacatggtggacaccacctgtgtgagttcctcctcctgacactgaagcacgtggtacacatgcttcatgggcacctgtgatgttttgctctcttgttctctaattttgtcctttacaagttttattaatgaagtgatactgtaaaattcc

SEQ ID NO: 131137 - DNA, 1825 bp, Homo Sapiens
  misc_feature (52)..(52): n is a, c, g, or t
  misc_feature (266)..(395): n is a, c, g, or t
ctaggggctcacagggcccaggagtccccagctcacaggccagggcatcagnccaggcgcgctcggtgcacaccgcacctgggaggacctgggtacactcaggagaccaagagcactggcgggtcaggatggttggcgttcagctcctacggggtggggagaagtctgtagccgagagcccagccccctcctgccaggtcttcccaggttcgagagaggctggaactcaatttctgcagaaaatctcccagtttttcctgtttggnnnnnnnnnnnnnnnnnnnnnnnnnnnnnnnnnnnnnnnnnnnnnnnnnnnnnnnnnnnnnnnnnnnnnnnnnnnnnnnnnnnnnnnnnnnnnnnnnnnnnnnnnnnnnnnnnnnnnnnnnnnnnnnnnnggagctcccggtttttaagcactgcacgatactagaagagctgaccttttttctggcctcacagcttatgctgaagctgagtgtgaggaacagagagacctttctgtgacgaccgctggggcagagtggtctatgcgccgagatcctggcatcagcaagggaggcgggtcctcggggaggggcagcttccacagtgtggctgcagcgtgcacagccaggtaggccctggatgttcacccctcactgcccttggggaagcacctgaccgctggggatgtccaccagggagaggacgctgtgtcggggacaacatgcagcatcagcacccacaagggcccggcctggccccgcctctccactcgcccgaggtcttgctgtggcccaaagcaggagtccagggctggcgagacctccggctgcagaaaggcaggcccaggcctcacgatggagaaagtctggatgtcctggtctggcctgctgtttcatgcagtgtgcaagcagcagcatgagcaggcaataggccaactcggctggaggcaccaactgaagccaaggccacgggttctgtgggcggtgcacgggctcaggcacaccgggaatgtgccacgggtcctgtgggcggtgcacgggctcaggcacaccgggaatgtgccacgggtcctgtgggcggtgcacgggctcaggcacaccgggaatgtgccatgggtcctgtgggcggtgcacgggctcaggcacagtggggctgtcagctctggcttgcagggtcaccggcctcactgtcgctgctctgagacagctctgtggggctctcaaggcagtgcagctccaggaagctggtgatgagcttggcgatggcttccacatcactgcggtggcccatgactgcactctgcgtgagggggtgggagaagcccgtcgcaagccggagcaccaccatgtagcctttcccgaagtaccggaccttctcctcctccacgctcacatcacggacatcatggagcaggaccaccacctggtcgtggccagctctgaaaagagtcagcagcttcttgtagaggctgaacgtcttcaaaacaaccttccctgtgctcttgtcgaagatggcttcctcccagtcctccaagttctgcacagccacaaacaggcagcctgtgacgtagaagagcttccagcccaggctatctccgctgtagtaggcagcagccaggccaatcgacaagattccaaccagcagggaccaggaccggatgcctggagccctcttcagatggaggcgggagctggtgcgggtctccacctgcaggtacatcccgagagggcagcaccactctctacaggaggaggggtcgagagcacagcggtccccgcgccgcagcagagagacgcgaaccggcgggggcgcggacgcgtgggtcgacgatatcccggga

SEQ ID NO: 131138 - DNA, 725 bp, Homo Sapiens
  misc_feature (433)..(551): n is a, c, g, or t
  misc_feature (629)..(629): n is a, c, g, or t
ttttttttgacacgtgaagggttatttatggttatgatgaccctgtcctgcaacgagggactggcagccactactgaggaggagggtcccatctctctcctgtcggctttcaccgaggtcacagccagacgtggggcaaaggtgttccctgtcctacccagccattcctgggcctgccgcctaggggctcacagggcccaggagtccccagctcacaggccagggcatcaggccaggcgcgctcggtgcacaccgcacctgggaggacctgggtacactcaggagaccaagagcactggcgggtcaggatggttggcgttcagctcctacggggtggggagaagtctgtagccgagagcccagccccctcctgccaggtcttcccaggttcgagagaggctggaactcaatttctgcagaaaatctcccagtnnnnnnnnnnnnnnnnnnnnnnnnnnnnnnnnnnnnnnnnnnnnnnnnnnnnnnnnnnnnnnnnnnnnnnnnnnnnnnnnnnnnnnnnnnnnnnnnnnnnnnnnnnnnnnnnnnnnnnntggcatgaaccactgcgcccggctggagctcccggtttttaagcactgcacgatactagaagagctgaccttttttcntggcctcacagcttatgctgaagctgagtgtgaggaacagagagacctttctgtgacgaccgctggtgcagagtggtctatgcgccgagatcagat

SEQ ID NO: 131139 - DNA, 1350 bp, Homo Sapiens
  misc_feature (154)..(169): n is a, c, g, or t
  misc_feature (978)..(978): n is a, c, g, or t
  misc_feature (991)..(1192): n is a, c, g, or t
  misc_feature (1253)..(1253): n is a, c, g, or t
  misc_feature (1265)..(1265): n is a, c, g, or t
  misc_feature (1338)..(1338): n is a, c, g, or t
ggaagagagttagaagtatagaatagaaaagataggagagaaaataaataaaatgatcagatgtgagattaaagtagagaaagcattgagacaacaaatagattgcttaaagaatagttcacgaaagaataagaggggacaattacagaagagnnnnnnnnnnnnnnnngagaataagggcgacagggaaaagagaaagtgcaaattgtcgataatcagaattaaggtaaccttattaagaggaacctaagtaaaaacggtcctagagtaaagagcggccgagaaaaggccatttaagaaataaattagagttaatgtggagtaggaaaaatcaatgtagaatattaaattcaccaaacacagatagatcagatctacataaaaatatgtcttaatatcttagaattttcctttactccaaaaaaccccatatatatatgtttctcctttataagcttagagattgctttggtggtcaagtgcagggcggctgggggaggtaagaccttcaggaaggccatatcccggacaagacccagaagggaagcccccagagccaagggtaggagggccccacccgggtctcagccactcacttctccagggcggatccgagacactcacaggcctcagggaggggccaggtgctgctcctggtcattgcttcccccacaaggtttgcatgaggagcagagacagtccagtctcctgaacacccacagggcacagagcccagtgcagggggcagacaccaccgcagctcctgggaccaagaggaagctcccagaggggggcccaggaacgctggggtgggtggacagggctgggtaggggttccttctgggccaaacccccagagcagcagagcaccccagtccaaggaagctcttctcagggacccaaggctccagagccaggaaaaagggaggggcggggcgggagcctgcaccccagagctgatgggcactggcctcgtgncgaattcttgggnnnnnnnnnnnnnnnnnnnnnnnnnnnnnnnnnnnnnnnnnnnnnnnnnnnnnnnnnnnnnnnnnnnnnnnnnnnnnnnnnnnnnnnnnnnnnnnnnnnnnnnnnnnnnnnnnnnnnnnnnnnnnnnnnnnnnnnnnnnnnnnnnnnnnnnnnnnnnnnnnnnnnnnnnnnnnnnnnnnnnnnnnnnnnnnnnnnnnnnnnnagctgcattatgaatcggcacgcgcggggagagcggttgcctattggcgcctttcgctccncgctcacgatcnctgcccggtcgtcgggtgggggagcgtacactcctcaaagcgtataggtaccacatatcagggatagcagganaatgtgcacatg

SEQ ID NO: 131140 - DNA, 676 bp, Homo Sapiens
  misc_feature (419)..(455): n is a, c, g, or t
gggtcttgatgcttgagtagagtgaagaggggagcacgtgccccctgcatccattctctctttctcttgatgacgcagctgtcatttggctgtgcgtgctgacagttttgcaacaggcagagctgtgtcgcacagcagtgctgtgcgtcagagccagctgaggacaggcttgcctggacttctgtaagataggattttctgtgtttcctgaattttttatatggtgatttgtatttaaattttaagactttattttctcactattggtgtaccttataaatgtatttgaaagttaaatatattttaaatattgtttgggaggcatagtgctgacatatattcagagtgttgtagttttaaggttagcgtgacttcagttttgactaaggatgacactaattgttagctgttttgaaatnnnnnnnnnnnnnnnnnnnnnnnnnnnnnnnnnnnnngccagtcttggctgaaatgttttatttaccatagttttatatctgtgtggtgttttgtaccggcacgggatatggaacgaaaactgctttgtaatgcagtttgtgacattaatagtattgtaaagttacattttaaaataaacaaaaaactgttctggactgcaaatctgcacacacaacgaacagttgcatttcagagagttctctcaatttgtaagtta

SEQ ID NO: 131141 - DNA, 638 bp, Homo Sapiens
agagagggagtcaaactttttaattaaagtccgtcccttcccactcttagacgcctgggctcttctgagtccccggagctcctgaatggatgtggttgccccggaggttcagtgcgccccgctcacccagcaccagccagggctttccttaaaggcgtggaaaggagcgcgcacaaggcgcgcattgaggtctattcgagcgcagtgctggttaatatacataatctggagagattaaacaattagtttagaaaatccttggagatagtatcctttccgagggaggcaccttacaccaggacggcgaggccactctttctgaggccccgtctgcgcagcccaggcttctgctgggttaatcaacagtctctgcggggctgctctggcgcatggagggctcctccaaggactcttcttttggggattccgacaacttcccttttggtgaaagttgaagggctgcctgatcactgactacatccacatgcttaccgtctattgaagatgtacaatgacttgaagaggatatagctgtcatggtcgttctagactgcactaataagggttttactttaatataattgaaggatgtgtcagcaagcactgcaaactgacgaaacagtgtgtgccttgtaaac

SEQ ID NO: 131142 - DNA, 1584 bp, Homo Sapiens
ggaaaacagggtcccatttatttgtaagaaaaagctggatctcagcattcaccagagcaaaattcaatggcaacctgcacataagtctcaatttcacttcttgccaaaaacaaaatagagtttacataaaaatagatataacccagataaccatatacatcagtatatgaccagtgctatttacatgtaaaatgttgcattgcataattcaaggaataaaataccatcatgcatttcatttaacttttaaggtgaaaaatgcagttacagaactaagtttgcttaccatgattgtcccaatatttacttaagaaacaatacccaaaggtttcttgtttacatatctctttccacatctagctattcatctgtgtaacagattacaccactttagcaacaagaaacttttgaacaatatctattatactgacatattaaactgaagatatgaatacataatcacactgaaagttttgatgaaaatgtgatgaaagaatcgccgagaattagctttttccaatgtaaagaactatttggaatatcgtaaaggagcagtgaagtcctttcaaagtttaatgtcactcttcagacaggtacagacataacacacttctaaaaggaacattctttatcattctgcacaaattaaaatacaatgcaataatcaaaaagggaaacattatataattgttacattagatgaagtttttgccatttcttcaggagaatggctctttacgacttctttgatgaactgttcaagtgcagtgaaatagccttggcactgccatgtgtcattgtgagtcccatctggaaaaatggctaatctcttagtccgagatggggagagttcataaagttgtttcatcattactggtggaattaattgatctgagagtccagagatgaaaagtgaaggcattctacactgagagatttttctgtaggacaaaaatttatttttgtagcaccataaaggaaggtaacgcatcggaaagaatgaaaataaagtgctggccatatgtggtatgcttaaaaatgtgttctccaccataatggctgaaatcctatgtgaattttcagaagccaaatgaatagccactgctccacccaaggaacggccaaaaagaaaaatttttgttttatcaaggtcaggtctagtcatcacgtagtctaacacagcttcagaatctaagtagagtccttcttcacttgcttctccttcactttttccatatcctcgataatcaaccagcaaaaggttaactttgaggttaaccaacataagtaatgcatttggcaacctgtgacctatgttgcctgcattcccatgaaaataaattatagttggggaatagggtgaatttgtctccagtgtatcgtatcaaaataagattcagacgtattccatctttggttctgatgaaaatgttttcatgtggaatgccacgtgggcatgggaacataaagacgtgaagaggatggctgttctggaaaataagcatacatcctggaatttatacagaatacctgctattgatatgaatattaacaaagtaagatatgcctccatacagatgaaaa

SEQ ID NO: 131143 - DNA, 518 bp, Homo Sapiens
  misc_feature (493)..(493): n is a, c, g, or t
tttgaccagtttcaccatcttttttattggatacagagccataaattctctgatgcccatgtgagtccttttaaatacatacactcaggtacattcagcaaagggcatcttacgggtgacatggagcaaagtgctgggatggcgatgcctgggtggggcagagaagtgtggccagggaaggccccctgggggctggaggtacaggcaccacttcagaaacaaaaataaaaccaaaaattgctctccacccctctgcctgtgcttggggctggggaagctaccctctcactcaggcccattatagcctagctgtgtaggaaggtagggcctaagggccagttatggaggttgcccaccagtggtgcccactagaaccaagcctgctggcattagccacaaagcaagcctgggtcacctcaggcctctgccctggatacaagacccttgtcagggcagagctgaggctggcaagcccaaggccaagcctcccttngggccatgctggcagtggcagagga

SEQ ID NO: 131144 - DNA, 1050 bp, Homo Sapiens
  misc_feature (207)..(402): n is a, c, g, or t
atttacacctaaggtttatctttaatagaagtatatatttaattttatgtaaatcaattctaagagtccatatgtgcttgcaggcaaaggtcacatattcaaagaaaaatatattaaaatttttaaaaatatttattcagaactcagaaatgtatagattttacacgtttgtataaaattttttattatgaccataaaaatgacccnnnnnnnnnnnnnnnnnnnnnnnnnnnnnnnnnnnnnnnnnnnnnnnnnnnnnnnnnnnnnnnnnnnnnnnnnnnnnnnnnnnnnnnnnnnnnnnnnnnnnnnnnnnnnnnnnnnnnnnnnnnnnnnnnnnnnnnnnnnnnnnnnnnnnnnnnnnnnnnnnnnnnnnnnnnnnnnnnnnnnnnnnnnnnnnnnnnnaaaataaatttaaatgtgaaaataagaataaaaatttaacccataggaacaatattctttaacttattggcaatttaaagccactggcaaaaaagattgctagagatgtcagtacattatcttaccaaatagtgtattgttaccatcttttacctacatccttgagtaagggaataggttaaagttagtggcataagaacacttcattgaattcacaatagtatttaatatgttaaaaatgttgaactgaaaagctaagttcacacataatttataatttaaaaatagactgcatattatttcatagaagtacaattaataaaataacatatgactaacttaattttaactaaaattaagaatgcttttcattcataataatgcagaggaatattattctgaacacctacctcatgcatcactcaatattataagttaaccacaaagagcctctctacctaaattttcctcacgcatcttacattttaatgtccttatcttttcatagaaaaggtcataaataatgcctaataaaaaagaatctcatatcttttatgcagcaacaattagtcacatgctttcacatatgaatacaccagcaatgatgaaacagcatgaatttaagagttgaacacattattcactttt

SEQ ID NO: 131145 - DNA, 937 bp, Homo Sapiens
ttttttttgtgttagaacatagtttattctttaagtgtaggagtgcatgacataacacttgcctggcatgaccttagatcttacgaataatttgttattgccacaaagggtctattctgtcagccttatgatctttattttgacattaatgctggtcagttgctgtgtctaaaccataaaagagacggagatataatgaagcgtgtctgacctcccatcccgtcatggccaggaactcagttttaaggtttttctggggtcactttggtcaagaggggttccattcagtcaattagggggcttaggattttagtttacaacttacttcaccatctctagggtgttgtctttatttatgtggtccagaatgtctacatgtggccaactaaaaattgatgactataagaaagggaaagttgctttaaggacgaccccagtatctggcacactctggcaactgaagtccagagctgaagcataaaaccaaaggaaacaaaaagcagtctcagagcatatgagaaatcaaagagtttcttatatactgcagatagcaattttaaaaatcagtatttttaagctcagagcattggatgccaacaacccatagttcctgcacaaagacatggaaaaatccagccacaggatctgtcttgagcaataaggcatacatcatatataactgcagtgatactgatggaggctgatttttttcaaacaaactgggcagtgttagtatgtgtaaaggaagtgcagaagcactgactacagatgtggccacattctatagagtagatgtgttgtatactaagttcaatctctgagcatccatccatgcaaacttgacactgaatataaccaggtagcggacgcgtgggtcgacgatatcccgggaatccgacggtaccagctgctttttacccctgtcatattacatgct

SEQ ID NO: 131146 - DNA, 1000 bp, Homo Sapiens
  misc_feature (537)..(944): n is a, c, g, or t
  misc_feature (956)..(956): n is a, c, g, or t
  misc_feature (960)..(961): n is a, c, g, or t
atactactaataatatatttcaccaaaaaacaatattacaattttctttaaaattataccaattatgactcatacaatagcaacacctagaaaacattttgtctgacgtcataaaatgagtgcagatataaaagaatcaacagcagataatgcacctaattcatggattaaagacaaagattaaaaaggaaagaagagtttgtcattttacatatcagaggaaatataataagttaagtctacaataatctgggttgaatgcatcacacttacacattgaaaatttatcagactgactttctgtggctatacaccatacacagtatagtaaagtaaccctcaggaaggacattagtctttaaaatcttggctttaaggaatgacaaatgtctttgaaaatattttgttcagtcactgtgattataaaagtacttcaattaagaaatccatctataatcaatcttaaatggcagtgcatttgaaaaatggcattggtttgtaatgtttgccctcgtgccgcctcgtgccgaattcttnnnnnnnnnnnnnnnnnnnnnnnnnnnnnnnnnnnnnnnnnnnnnnnnnnnnnnnnnnnnnnnnnnnnnnnnnnnnnnnnnnnnnnnnnnnnnnnnnnnnnnnnnnnnnnnnnnnnnnnnnnnnnnnnnnnnnnnnnnnnnnnnnnnnnnnnnnnnnnnnnnnnnnnnnnnnnnnnnnnnnnnnnnnnnnnnnnnnnnnnnnnnnnnnnnnnnnnnnnnnnnnnnnnnnnnnnnnnnnnnnnnnnnnnnnnnnnnnnnnnnnnnnnnnnnnnnnnnnnnnnnnnnnnnnnnnnnnnnnnnnnnnnnnnnnnnnnnnnnnnnnnnnnnnnnnnnnnnnnnnnnnnnnnnnnnnnnnnnnnnnnnnnnnnnnnnnnnnnnnnnnnnnnnnnnnnnnnnnnnnnnnnnnnnacccaaaggcangaanncgtaaaaggcggcgtgctggcgttttcccatagctcgcc

SEQ ID NO: 131147 - DNA, 647 bp, Homo Sapiens
  misc_feature (553)..(553): n is a, c, g, or t
  misc_feature (583)..(583): n is a, c, g, or t
tacgttgcttcaaaatatttaatacgtgttagacacgtagaagttacatttttatacaaaaatcaatacaacgaaggagaaaatactgtacaaaaaccttatcagctcccccaacctttatacaacaaagactggagtcaccatatctacaaaaccataaggtctttccacttcgggcttctgtctgtaaactctcattaaacactttttaaaagcactgtgtagtacttctgacctagagcttttaaaaatatatcttttctctataaactccattatttccaagcttgaactcttctgtgaagttcgtcaagctttttctcccctgcggggaagcaaaggaccgttaatacgcccctttcctagagtaatcacaggatataaacgtttcttcattgggagagaaaggtggggagggacagaaggaatccaagtctgtgctcttggctaaatccctctcgtcttaggaaatcctgtgcggaaacgccactcctggccctgaagcgggtctagctttccggtgaggggtaggtgtaaagtccctccctccccnggagaacgaatggggaactccccggcccanaccttttagccgcttccttctccacgcagccggcagaggaaagtccctgtctgcccccaatctc

SEQ ID NO: 131148 - DNA, 321 bp, Homo Sapiens
ggccgcggctgtaggctttttttcttttctgtctgagctgccttctctatcattcagcttgagtcctcaagactactggtcacaatgagtctgatttttaggaaggaataggaggagcagggaaatcagaaaaactgttggtctcactctgtctctctacctggtcatcttcaaggctaagaaaacaaacaagctacattctgtatttgccagtttccacagcatgaagtacatagcttccttagcaaggagtggtcattccaaaatccaaatgcaaattgctttgattaaacctagattattaaatccattcagaacagc

SEQ ID NO: 131149 - DNA, 965 bp, Homo Sapiens
tttattaagaaagcatgcaaaaaaacaatgacaacaacttgtgagaccatatacccccttcccaggatgcagcaatgcaaagcattatgggtggtggcacaaaggactcaccaaaccagaaacatgaggagcagggactgaggagagaaaggttgggatgggtggatctataccaaataattactccttttgtccctctcctccactttctctcttatttcctcttataggcagtgagcttctgcagttttgcacacatcacccaatacaacaataatgactacactttgtgtccagcaatgctagaccaacaagaaaaagtagtattcttttcatttcatgaaggggaggggaaactgaggcccaaagggagtcaggtttgccctgtgccacgtagcaagactgggcttggtggaagggagctggaatctcaggaggcctaatggccaatctccagtcccagacccaaacttcagctaccctggctgcacgccagaattcttcatgagactagtttgcagaagacacagatgaacaaggggcatttgcatgtatgatcctacccttgcaaatcctgtatggatctgaacaggaaaagggtttagaaaagagaagtgatcatttacaaatggggaatattgaggagaactgatgggaagttttgtataggacacaccctgactggaaggaataaggaaggaaaagatgcctaaaatagggacactgggcaaaggcattttgccaccctttaagagaaattctcctttccccaatgggaaatattatgtcatacttcaaccccactaagtgccctccaacatcatgggagattcaagccactcgcacccccatttctttcttagaaaggcttcaaagaaataaagtgctctttagttaactgccctatcttgcccctttacttcagcctcactggacttcttcaatgaactctcatatataacccc

SEQ ID NO: 131150 - DNA, 734 bp, Homo Sapiens
cagaaattttcaattttattaatattcaatttacgtaacaggctcaaattttattaattgaattctgcatccatacgaatttagtcttaatttataaagcaacttacttcgatactcttccttgaagtatgttataaaatacaacgtttaaataaacatcacaaaaatattgtttgtcgatcatttttgtgactttaacagagaaatcttcaagtttataatccactcattcttgcttacagccagacactacataaatccttaccaaaacaaaacaaacccaggtaggttcactgttacccctaggtatgcttcgttggaattcacccagagaaacccattttccctctaacggagtcaatactttcattctctacaggcatctcaaaaatgactataataatgccatgtggctttggggactctggagaaaaatgaaacatttaattaaaggcaatagttgttcaaacagtaagaatgtatacacagtttatatatagatagatagatggatatgtattttttccccagagaaagggctcaagagacaaaacagtaaaacacttcaactttccctaactcttgaaaaaatatctgattttaagtcagtttacaaagttcttattttaatgagccacttgtatggagacacatatgcataaaaactttttatgaaagagcggacgcgtgggtcgacgatatcccgggatatccggaccggtaccagcctgctt

SEQ ID NO: 131151 - DNA, 637 bp, Homo Sapiens
tttatcaatggctctgaaaaaaatttatttgatggatctgagaattttttcacacatgaatcatttctccttccaatggttattgatactgatagaagttccccgctgagactccctggacccatggtttgtgcctgctgggcatcccactatgctgattcctactctaaaagacacttacagcagaaagcattcacccatgaccattatgaaggaaatattctgtccctcactcaccctctggaagctaatatggagcagcagtcactctatccagagccacatgttcacagttctctagcaagcaggtcacaccccgtgggtcccctattccccgtgacccttgttgatccatcctcttcctgctcagttgctcccctgctcacctggactgcgggaggcatgggtgcgcccactgaggccatgctgaggagctgggatggaatgcaggacagggagagaggggagactgagctgagagggagcactggatcctgggaggtgtggatgcactgattacagtccaaagacattgggagcaacaaaggacacacaatgactgaaaacattaacgttaccttctgggatctctcagtgccctgagcgatctgtgtgtctacctacagatgggcaaagc

SEQ ID NO: 131152 - DNA, 739 bp, Homo Sapiens
  misc_feature (674)..(674): n is a, c, g, or t
atgatcaaattttattgtttattttataaaaacagtacacagtgaaacaaaagaaaattattcttctctcagaaagtaacgagtaggtcagccttactgttaagaggataagtagacatcatataagcttgcagcttacaaggtacatgttagcctgccacagtttctttgcatcttctcatgaaaccacaagaatacaggattgttccaaccacagacgtgagtttactgttttcttgtttttgctttgccaggccaaagtcagtaacggttactttgtccttatcccccaacataatgttgtttggtgtcagatctctatggacaatcctcttctccttgtgtaagtatcgaagagctaagcacagctgtataaatattttccatagtctttcttcagtaaaatggtgatgtttttccttcaaagaactgaaatgctctccaagcggggctccttctatcagctccataactatgtacaacctatcattttccagaaatgttttgtaataacgtacaatgttgggatgataaagcttgtaaacacagccaaaagctccacttccaagatgatccaaaattgcatagttgcctatatatttcaaaggagctttgttctgattaatgctttcaatattttcagcaatttgcttcagttcatcctccactaatanattcagcttggataccaattcttcataagcactgatatcacgtacataatgccctatgtcaatga

SEQ ID NO: 131153 - DNA, 654 bp, Homo Sapiens
ttttattaggagtgttctctttatttctctttggtttcttaacacaaaagacatgcattctataaataaaaggaactaagattttctgggaaaccataaattgggaggaattcccacagtcacacctctgtggtcaagaggatggtcttcagcccccatctggctgtaatctctgatgaaatccagaagagaaggcccgtgtgttatccaagaaggtgaaacactcaaggacagtgaatgccacagtcctctgctcagagctgggctaggccccaaggcccactgagtacaatgtctaccctatctccttgttacatcctttttacaatatccttgggtgatgcttcttttcatggggctattggaaaggctccaacaccaaagagccagaccagccatttacgaatagccattcaccatcggactgaggaacctactgggagagtgtgaatatgttggtgtttcctgacttgtgctcagagcccagatcaaaacactggcttgatcttactttgaaacatcgacctcaggtgcagcagtgtaaattctacaccaggaggtgggattggactcaggaagtccactacaagagcagcaggccatggtagaaaatgatctgccatacccagtggcaaaatctgggccagtatccta

SEQ ID NO: 131154 - DNA, 1464 bp, Homo Sapiens
ccttttaaatcagcttaatcaaagtttattttcacaatgctacagaggtaagtccccaaactttacaatcctcatttgtttctctcaaaaagatctctttttttaaaaaaaaggctttagaataccacaccatgtttaaaatcctgtaagctatttttgaaatctaaattaaattctgacaatgataaaatgtttgccagccaatcaaagtcccaaactaattaacattcaaagtaaaaaagaatcatcattgggatctcattatattttgatagctgtaaaggctgattgactcctgtcattaatagtgttagtgtcataagcaaataatatcacttatattctagaaaaggaaataagcatatttgtcttgcacatcttatacactgaggtataaaatcatgttttaccaactttttttattaatgtaccaaataatttcttccacaatggcaactgtggtaaaaacccccatagcattagccaacctgctggcatgttctatggtcttctaattaatatagtgcacagacatttataaactacacagccacagtaatttacaagtaactaataaatattgaaatgctgggaatataacaaaactacattctaaatagtttactttccctttttccttatattattacttttatattcattcttcccactcatttttttcactagactctattaaattcaagatttagatatggctaagcgtaagacaaaagagatgagcgtcgacaacacagttgaattttatcagttgtctaagccacttgaaagctattctccaaaagataagttattcaacccaaggcagacggagaaagttggaatttgaatcctaggttctttatattgtgttaactgtcaggtccacaggaacatccaaggctcaagttgttgaatgtctacatgtcatgaagttaactatggcactagtggaatgtcgattactgaagatgaacccctagacacattcagcaagacattcaacttgcagaaggcagggaatttggagtggtacacaatcagataacaaggtttcaagctctagtcaaagacaagatgatattatacctaaataacatttctaaggaacttgaataacaatctctaaggactcttgtcactatatgaagaacttaagtttatgactccacactcttaattaaaaggacagccacttaatcaattttctgcagtgaattattagactaacttcctagcatctggagattacagtatgttccaccttgaagctatcacatcaagaccattacctgacatgcattcaacaaatattcgatgacaacaagtataaggttaattgttacagaaagttaggtcttctaacacctaagtgttaagtggactcaatgttgcgacgcgtggtcgacgatatcccgggatatccgaccgtaccagcctgctttttgaaaccgtggtcaagctaca

SEQ ID NO: 131155 - DNA, 1014 bp, Homo Sapiens
  misc_feature (908)..(908): n is a, c, g, or t
aaagttaaacttttaaagttaaaagtgaaatttattacaatacaataaatgcaagtgtcattattaaaaatgccggttaaaattataaagtatctaaataatttttctaatataaatattggaaatgacaactttaacaattctatatgtacacaggacactgaaaacataaaatcatgaacaaggccaaaaaataacgttgcacattaaccctttagttattactttctattttccagtcccagcatcatacctgctaattactcagatcacaagcctcaaggattaagtgttttgaatgtatttcagtttcatactttaacaatgcttaaagactattggttgtattctgatcaaatggttctccttcccatatttccctttctcaatagatcttagacaaaaaggtgagcagggaaaactgtgattacaggatccaacatgacaggtatacccaatgattcatttaagggtggcataaagttatatagaaaagacctacaagacggaagacaagtacatcaacatgtagtgaaattaagcagttcacccactgcgtgcttacatggctcctatatctcttcgggaagaagccagagccgtagagaagtcagggcaaaccagaagtgttgaggagtaggggtggggggcagagggaaggagctggggagaagtgccagatcataaaggaaatgttaaagagttacctatctgttctcgccctcctgctaacgcaggggctggctcgagcccagcctccctgcccgcatctcagtggagctcttcccccagcattgtctttcagatgaaaagatacatctgttccccactgagatgtttttttgggggagagtagttttgtttttaatttgataatatgacaattatgtaattttataggtacatangttcatgattttgatataggtggatgatacactattacaatgatccaatattactttttagaacatagattactcctacatatgaataaatcaatatcctaataga

SEQ ID NO: 131156 - DNA, 1001 bp, Homo Sapiens
tttttttgtgaaatacccttatttttattctgaagaaatgtacatatgttaaagtactaaatccaaagagaacatatctgtgaattgctaagaaaatatagaaaagtaaagaaagttctagtcttcaaaacaagtgataaacttttaaaacatttttgcaccactgtaacaacatagtacacattttactatctgtcctagagggagatatactagtaaattataggcgaactatgacttacagtatagtacatagtgaattcctgattatgaaaggttcaacaatatgaatatttacaaagtatttcaatgttcttttggttaaatagaagtcttaagtaattatcaagtgggcacattctttttctgtggcctccacttcctatcaatgtgttgccttctgggggacctgctttcctttctgactctagagtgaccctttcggatgtctgctggttcaggcttaagtgggatacctcccagtaatatttctacttgatttggagaccactgaaatgatagctttcctccctctcctctaatccacttatatccaaggatccctgaatcggcaagaggcctgggctctgtggccttttccctaggcgggaccttcctgttgaatgttcctctgtgtgtccccagctggctgctatcctatcccacagtttttccctgcagagattgagtaggacagggagtggggccttgggtgccactttgtgaaagattgccagttccttcatttcagctcggaggccctcgtggcgaatcttggttcgagggcaattcctatagtgagtgtataaattcgaacatgtatagctgttcctgtgtgaattgttattggctcacatttatataccattgagctggatcataagcgtaatcctgggtgctattggtgagcaactcacatattgcgtgggccatgtgcgttttcatcggaacctttgtcatttcttactatcgttatccgcgtgaaatggttgtcttttgtc

SEQ ID NO: 131157 - DNA, 889 bp, Homo Sapiens
caagacaggctccagatgtgtttattaggctatttaaatagaaccatgtgaccatttctgtaggtaaaaggacaaagaagaattacaaacactttgggtctttcccgaattctctcccctttctctggtcaactccacccaccttcactctcaaaggaaaggcacagggggaaggaagtgagtgagggggctcagaagagtctgtgtggctcctaccaccccaaacatattctggtttcccgaagataagaggcaaggcttgctctgatctttcccagttctcagagtccagcaggccgctgtgctggacacatacatggatccaccaacatacatcagtccttctgtgttctctcctgcatggtagaggctggaagcctaagagctatattcctcagaatttcctgccagccaggatttgctttaaagtccactaatgagaggcacttctagaaaccatgattccttctccagcagtggcagacagtaggcatgaggttttgtagcatcttctgagcattttccagtacatcatctgcttttgtgctgctggaagctgagaccatcagcaggagttttctgtgcctcctgcaagttgctgatttctcacagttgctactggctttctccaatgttcacttctctatccctttcagtggtttataaatacttcattcctatagtagatcccttcctgcttatattaataatacctagaggggacatggttttcctgattcatccagctatcttaggaccttactccaaaataaggaaggcttctcttggggaggtaattgcctgtagaaagatttcctcgtgccgaattcgccacccaggcctcgctacctaggagcggaagaagggccgaggggggggtttggtgttg

SEQ ID NO: 131158 - DNA, 1038 bp, Homo Sapiens
  misc_feature (231)..(232): n is a, c, g, or t
  misc_feature (239)..(239): n is a, c, g, or t
  misc_feature (241)..(242): n is a, c, g, or t
  misc_feature (244)..(245): n is a, c, g, or t
  misc_feature (247)..(247): n is a, c, g, or t
  misc_feature (250)..(250): n is a, c, g, or t
ttctcgaaaaatccctctccggggctccccgcccccgggggccatatacttaatttggcgtgagggatctcccaagccccctttgttcggggccgccgggatctctcctagggaaaaccagcatttgaccccagtgttcactttccctttcgtggggccccgccgcccccaaacggaatggttttagaaagcttttttgagggcccgaaggcgggccgccaatttcttctnntcttttngnntnngntgntaccaaaagtcctaaaagtttattgccagaatagcaaacttcataaagacaccttaaagtacatcgaatatgacaagcaaaataaacagaaaactttgaccaaagaaaagattgccgctgtcatgcacagtcaaattaataccaaaccaaacaagtacatcgaagagtatatgggttatacaatccacactctgaaactaaaggagactcattccaaaatgcttggttttgggttgggggtttgagaggggggctggtgctgggagggtaattttctcctaatacagaatatggaaatatttagatgagaagcagaatgactaaaatatcagtgatccatttaatttttatctccaagaatagaaaactgtattataggcttccaaaattaaagaattgatcaaaaatcgaaacacagaagagaagaaacaaatcctaagttcgatttgtgctattgttacaactgattagcacttcagacgcactgcatccaagtgtactgcttatttaagatgagctaagaagataaaaagccagaacagcctttactatttgatttcaatcatggctatattttctgtaagcatagaatgtcctatcactctactgcaagcaccgggattttcttttctattatttaataaagtggaaattcatataaatgaagtcaaggtatagcaaccactcccaactgactactagtgcccaatagaactactgctaaatgagtaggaataagagtaggaagaattccctgtggcgtcaaagcttcctctccgggacccacc

SEQ ID NO: 131159 - DNA, 730 bp, Homo Sapiens
gggtttacataatcaaattttatttgacacataaaatgtttaagtgatgtgttttatactttgaaaataaattcatgcaccaatgttttaactcacatatatcatacagtgcaggatttatgaacatacataaaatcaaaatcataccatataaacgtttacaaataagtttttcatgacacacggacactattgctctttaaatatggttgtacatgtcatcattaatcgattcattgttcttccacatggttatttcaatgcaagatccgatcagcatgaagagtctagtacaagataggcagacatggttatcactctgcatcaccagtcacatggttacagaaaacagaattgggactgcatagggactctactgcgggcccaacaacctattagtggattgatgtaaggcattagtaaattggcatataaaaatagcttaatgagtgatctaatccatttagaatgctgaagcacttctgtggtaaatgttagtctattctacaattgaaaatgcctcattttaccttttctctaaactgacaaatgcaagtagccagtaactgtaggtctagaattttcgttcactgaccagaaggactaataggcgtctatgtgctcagaaccaccagtcccgcaccaactctcctttcagtgagcactgtcagccacatcctgtagtcactggtcagctacatggaaagtgtgactgaggggcttacggatg

SEQ ID NO: 131160 - DNA, 1044 bp, Homo Sapiens
  misc_feature (221)..(221): n is a, c, g, or t
  misc_feature (347)..(347): n is a, c, g, or t
  misc_feature (371)..(371): n is a, c, g, or t
  misc_feature (983)..(1003): n is a, c, g, or t
tccctttaagcaggtatgcagaagtttttataaatgtttgaacatgggagagagtagagttattataatgccgataggacagttggacatgcatgaagctcagctcctggagacaccccagtccagaatagtgtgatgttgtgggggttccagccacgtctgtgttcctatgcagcatcctgtgttactggtatggcacactgtggatagctggacaatcntagagatcaactgcccaatctaaccaacatggcagcggctgaacttgcatttcctgctaactgccagatgtgccaaccttgtcccatatgcaaaccactgaaaaaatgatctggatttctatagcnaaggcccttggggggggcacgtcntcccatgcccttggcctcgctggccacattggccaatgagccagggctggagtctgagacctttggttgttctttaaggcacctcctgccactttctccctcagaggcacaaacactttgtgttccacgtcagtttgaggggacggtggggggatgatatgaatgtcacaggaggagacaccttctgtctttgtttcaaagaaagtgatgtgccatttgttaatataaatattgaaaatatattgaaaagagcaattttaaattatttttggcttatgttgcaatatttattttcttgtattagaaaagattcctttgtagagaaaaaatgtatttttcattaacgcaaagacctatttctcctttttgtacattgtccatgtgcgcaacccttaacgagcaatagaatgtatggtcacctgggtgtggccagtgcccgctgtgccctgcatgattctgtgttgccgctgctgcatagttcccagccccatcctgtcctgctcactcatgggggcttccagaccccggccccaccagggcttgtgtcatagggagccctttgcactcctcgtgtgttggcaaacgcagttaataaagcaatgttttctgtgnnnnnnnnnnnnnnnnnnnnncctgagcaggcggccgcaagcttattccctttaggtgaggg

SEQ ID NO: 131161 - DNA, 1371 bp, Homo Sapiens
gcggccgcatctgacatcggatgccgtggcgctgctgcgggacaacgtcactccacgtgaaaacgagctctggacctcgctgggggactcgtggacccgccccgggctggagctgtccccggaggagggacccccatacagacccgagttcttcagcggctgggagccgccggtcactgacccgcagagccgcgcctgggaggacccagttgagaaacagctacagcacgagcggaggcgccggcagcaaagcgccccccaggtcgctgtcaatggtcaccgagacttggagccagaatctgagcctcagctggagtcagagacagcaggaaaatgggtcctgtgtaattatgacttccaggcccgcaacagcagtgagctgtcggtcaagcagcgggacgtactggaggtcctggatgacagtcgtaagtggtggaaggttcgggacccagcggggcaggagggatatgtgccctacaacatcctgacaccctaccccggaccccggctgcaccacagccaaagccctgcccgcagcctgaacagcactcctcctccaccaccagccccagccccggccccacctccagctctggctcggccccgctgggacaggccccgctgggacagctgcgatagcctcaacggcttggaccccagcgagaaggagaaattctcccagatgctcatcgtcaacgaggaactgcaggcgcgcctggcccagggccgctcgggaccgagccgcgcagtcccagggccccgcgccccggaaccgcagctcagcccgggctcggacgcctccgaggtccgcgcctggctgcaggccaagggctttagctccgggaccgtggacgcgctgggtgtgctgaccggggcgcagcttttctcgctgcagaaggaggagctgcgggcggtgagccccgaggagggggcacgtgtgtacagccaggtcaccgtgcagcgctcgctgctggaggacaaagagaaagtgtcagagctggaggcagtgatggagaagcaaaagaagaaggtggaaggcgaggtggaaatggaggtcatttgacctgccaggcgcccttcgcaaagagtgacgaggccccgtgggagaacggactcctcagactctccccaatagcggaagtcgatcttctgaaggatggccaatctgctccggccctggtcttcccccatcccggtggacagacttaacgatccttgctgcagtccctccggagaggatctggactggctgggagtggggagggcgtggagacagtctacggaaagcgctagcagacccccgagagggtgcagtggagccctgagcattgtaatatgcggcccagcctataaacagcctccgtgcttagt

SEQ ID NO: 131162 - DNA, 1369 bp, Homo Sapiens
  misc_feature (313)..(322): n is a, c, g, or t
  misc_feature (387)..(399): n is a, c, g, or t
  misc_feature (480)..(564): n is a, c, g, or t
  misc_feature (599)..(660): n is a, c, g, or t
  misc_feature (1257)..(1257): n is a, c, g, or t
gcgaaataaaggcgtgaataggggggggagggcctcgcggactactcggcgaagcggaaaaaaggctgtagaaggggaaggggtagggcacggcaccacaactgctcgaatagtaggaaagcgggcagaaggaagcgtcgcaggcgagggcttttatcggcggtgcgaggcgtatccgcggacgggggggcgccctccgttgcgatgaaagcggcgcccacgggacgaatatcgggggggcgagaaagaacccgccgttaggggagagtcggcggataaaaggacggcgtggcgtgggtacgccgagggcggnnnnnnnnnnatttggtgggaaaagtccgggcaaccgccttggttgcggggcggcgcagatccgctgcggggggnnnnnnnnnnnnngggacaaggggttctatgcggtcaatgggggcgcccccgccggcacaccaagagggttgtgaggaaaatcttttggaagannnnnnnnnnnnnnnnnnnnnnnnnnnnnnnnnnnnnnnnnnnnnnnnnnnnnnnnnnnnnnnnnnnnnnnnnnnnnnnnnnnnnggggagggtgtccgacgggagggtggtgagggaannnnnnnnnnnnnnnnnnnnnnnnnnnnnnnnnnnnnnnnnnnnnnnnnnnnnnnnnnnnnntgggcgaaatgttacacattagcttctttattgaagaggcagctcagacctatttatatatgcaaaagtataggatgacaaagtatgtaatgattctttaaccttctcaaatatttcacttaaaatatacattatgctaagctttaaggacagcgtaggaaatcttagtagttgccatcaaaattactataaatatgtatttcctgcacagaattatgcaaaatctgccatttaattcctgttgtgcagcatattcatacacatctagaaaaatatgattagagtgatgagcgacacaaatgttagccatttgtgattttagaaaacttttatggaaagtgtaacacacatgcagaaaaatacacatatcttaagtgcacaggtcagaacacactcaaatacttagcacctaggtttagaaacagattattcccagcaccagataaatggcccctttcagccttggccaagggtaactgctatcctaattttaaaccacgtatacaagttttgcccgtctttataatttatatagaaggaatcatacagcatgttggcttttgtgtctggagtctttcattcagcaaggtttgttanattcagctgcgttattacacggacttctagttcattcatgctcactgttttacagtagtccatggacatatgccacttctttattcattccattgcacatgtgccttaagat

SEQ ID NO: 131163 - DNA, 1041 bp, Homo Sapiens
ttcgtgtgtcccagccccactttattttcgaatttaaaactcagggtcaattcctggggttcccaggcaaccctccctcgagcccactcactaggggccagccctagatcttgaaggccaaggtgagtccatcgcccaggggcaggaggctgatgtagaccctgacgtcccgccggatgcgttcgtttaggtttcgcacacactcggccgccacgtcccctttcggaggttgcagcaccttcccgcgccacaggactctgaggacggcgaggatgcctccgggtcgcagcagctgcaggcagcgctcgtagtaggcggagcagttctccttgtccgcatccaccacggccacgtcgaaggtgccggcctcgcccgccgccagcagctcgtccagggtctccaaggcgggcttcagccggaggtcgatcttgtgctccgcctcggcctgcctccacaggggccgtcccagctccgggggctgcgcgtccacctcgcaggtcaccacgcgcccgtccgcgggcagcgccagggccagggccagggcggagtagcccgtgaaggtgcccaggtccagcgccttcttggcctggatgagccgcgccaggttggccaagagctgggcctgctcgcaggtcatcatagaatccccctgcggctgctccagggtcagcagcctcaggcttcgcagcgccgggtgctcccgcatggagcggctcagaagatactgccacaggcggctgtcctcggggggaagcaggcactgctctcgccggcctcgccatggggggcaccgcctccccaggaagaggccagtggcgaaggcggcgcccagtgcggctgagcccagggccagcgcggcgggcacggagagccggggcaccggctgggtcatggcgcgggcaggaggcggcgggaggcagtgacaggtcacgtgagctggagctcctgggacaggtctcggactcgcgggcccgccatcccgggaattccggaccgtaccagccgttttggtctttctcttcgggtttgttactttttaaa

SEQ ID NO: 131164 - DNA, 734 bp, Homo Sapiens
  misc_feature (686)..(686): n is a, c, g, or t
atttaagtaatgtacattttatttaagtcatgtgatggattttcacagaatacatatgcccagggaaccagcaccagattacacaacagaactggatcagctcccagaagctctcccctcgtcccctcccaaccctaagggcgatcactatcttgactttggtgcactataaattagttttgtctggttctgaacgtaatacacctggaaccatctagtatgtactgttgcatttggcttctgtcactcaagatttcatcatgcgacttgtctatgttgctgtgtgtagccgggcatgtcaatcccgttgctgtgtctatgtgcatggtagtgagtagggcatcattcattttccattctgttgatgggttatttccagtttggggctgttatgaaagggctctgaacattcccatgcaccctcttgatgctcacacctacacatttctgctgggtgttgacagcctaggagtggaactgctggatcacagaggtggcatatgttcggcttcattagaaaactgccagttttccaaaatgtctctaccaatttacactcccccagaaatacaagagaggtccagtcgctctactttctcgcctccacacggtgcggtctttttcactttagccattctggtggtggagaccactcgtattcgcagcgcttgacgttcagatccggnggcatactgctggagcacgacgaaccccatgctgacaagaggagctgt

SEQ ID NO: 131165 - DNA, 1109 bp, Homo Sapiens
  misc_feature (79)..(100): n is a, c, g, or t
  misc_feature (273)..(283): n is a, c, g, or t
  misc_feature (950)..(950): n is a, c, g, or t
  misc_feature (1064)..(1064): n is a, c, g, or t
  misc_feature (1076)..(1076): n is a, c, g, or t
ggttggtaaacgacggccacgtgccatgctcgaaattaaccctcactaaagggaaaaagcttgcggccgcctgccaggnnnnnnnnnnnnnnnnnnnnnnaatatgatcccatttatttaaaaaataaagattacatatttgcttatatacgcatacaaattttctgaaaattacataagaaattgttaatagattacctctggagaatagtactggggtaagaggtgagggggcagaattctcattttacagccttatatactgttgtgaannnnnnnnnnnaccatgtactttttaaaaatacaaaattgaggagggaacctcctactccaaaattacgaagcattcttttatgtacatttctctaagagttatatttgatatttttcaaggcaaactgacttgaggtactcgatgtttttaaatgtatttctaataattattagtagggtcacacctatttgacagcttttttaaaaagtcacatattgctgtatttttaaagatgacaaacctttatttaaatgagatgcttgctggagattttctttttcaaactcactttttaagttatggaaataatatcactgctgaaagtttggaaaacatatataagggtgccaaaaataccactaaaatcacataaaccaatcttaccattattaatggtgtgatttctttctttacatatctattaatacctagtactatctatgtagaaaatgtgtttgcaaagctgagatcacactgtacctatagctctggatcctgctgctttttcccccaacacttaacagatgctcagtaaacatgttaaaccaagttgttaattagtattgtaccatttctcctcatcaaaaattacttctatagaaggcatttagttggtttccagttcttgagtaaaataatacacttatgagtatgtctttcctaacatgtctgcttnatgatttagagagctctggatcaacgtatgaatatttaagttctgataatgtttcaagagataactggttcactctacacaggcactgtgtgcgtcctgcacacgtccatttanatccgtattcangtaaatgaagtgtctggaatctctccataaata

SEQ ID NO: 131166 - DNA, 1351 bp, Homo Sapiens
  misc_feature (274)..(296): n is a, c, g, or t
  misc_feature (389)..(409): n is a, c, g, or t
aaggtgggcattttcctttaacctctactttttcagaagcaacaaaggggcctcaacctgagtttcctatgggcctctcttctgcatccccaaagcggccaagagcaaatcctgggggataagaaaaaagtgtaaactaggtaggattgtgatgctcaaaataaccatctagcaatatcttggagcttgagaatagattttgtgggcttatttcttcttgcctcttccccatcctttcaagagagaacttatttttgaaaagtatctatatatnnnnnnnnnnnnnnnnnnnnnnntattattatttaggtttttataccatactgtattggcgagaataccactatcattgtcctttacagtctatttcttcccccaagtcttggtcnnnnnnnnnnnnnnnnnnnnncatgaaccacacaggagactttaacatcctggtcttttctgtttcttctttgtttcgccaagtttgtctgtccccctttgccttccctgagtgttgaacatcaggtagtaaaaggctaaacgcaatttcttgcatgtcaatctattctttttctatgtttgactctgatgcagtgtgtttagcgtgtctagtagctggctactcctattaaaaactcttcctggtagaagacaacccaaagacccttttcgatgaggtggtttctcattctacatcctctgatctctatagactgtaggatgctttgctttcaaagataactgggttagagggtggggtgtgcaataggtgatttatcatggtttttttcattatcaatattacatggatgattttctcagattcttctgaaagaagaaattgacaggcactgctagattcagctattgaatggctgaagagattgagtatttgaccttctctcaaaatcataaagtgagaattcataaggcacccaatgttaagatttatccagatttttacattttgatttcttctctctgtggggtggcaagttgagggagcattcttcattttagcttttacctgacaaccaaacttgcctttaccccatccctagaattggtgctcttggaatattgctgttaccatcatttttggggggccatcttcctaatgctacacacagcctgacaggggagcagcagatgaaagggtatgctattctgtttccagatgtttctttatgtaaatatgacgccaatgtaaatcctgtgtcaagatcatagagaatggtgctttttactacagttagcacatgcatttttagaaactactacatgttttagagaatctttgctgtgtatatgtaaactgtattgttcaactgttaacaaataataaattatttcattattaaag

SEQ ID NO: 131167 - DNA, 1600 bp, Homo Sapiens
gtaagtcaatgtgattatttgtttcatttcagaagatctatgggtcccactgcccgccacacgtgtctcctggttctcaacgaagtgtgaccagctcttctgaagaggtagggtgaatggcgactgtgttgtcaaagtctgccttcgttgctcccatcttcactgcaacagcaaaaccctgcagcatttcatcacacccaagtccctgcatatggatcccaaccaccttttcttccttgttagcacagaccattttcatcacacattttgttttccttttggtaactgcgtgatacatcggggtaaagctcgttgaataggtcttcacattttctattccatatttatgaatggcttcatcttccgtgagtcccactgtcccaataggggggtggctgaagaccccagtttgggatgttgttataatctaattttggaatcttccttttattcaaaaagtcgatgggcaagttttcggccagcagctattgcaactggagtaagaagagcttttccacatacatccccaactgcatagatgcctttgacgttggtattctggaattcgtctacgatgatatgacccttgtcatcggtttgaatccccagtttgtttaaactcaggtctttggtattcgggacccgcccaatggcccagagcaggcagtcaacatctggaatcatggtcatgactggtagcctaccgggaactgcagtaaccatgctgacttccaagcccgacaaagtctttttaacctccttgacctgggagaacttcagcacctccacgccagcgttctccagctcctccgtgcagttggtgctgatcattgaatcaaaacttctaagtaccttatcatgccgtatcatcagtgatgtcttagaacccagggctgacaggatccctgccatctccacagcaatgtaacctgcaccaacaatgacgctgcggccgggcaattcttccagctgaaaaaatccatcgctggttattcctaagctggcaccggggatctggctctcatgaggggtggagggcataccacctgtggcgatcaggatgtgtggggcggtgtactttttcccactgacctctattgtgggcttgggatcactcgtgaaggctgcatggccacggatgatttctatatgggacttggtgagattgttttgatagatggcattcaggcggctcacataggcatcccgcttttccttaataacacgccaattgaatttaccctcacaacttggaaagccataatcagcatgatcatgcatgaattcagagtggacagctgtgttccacattacctttttgggtacacatccaacattcacgcaagtgccacccagcttgtggctctccaccacggcggccctggcacccagctcggccgccctgcgcgcgctggccagcccgcccgagccgcccccgatcaccaggtagtcataggaggccacggcgccagcagcgggcggcgggccctgcggctgcggctcctgcctgcaggccatggcacgggagagggcgcgcgtgagggccgcgggctcgggcagcggacgcgtgggtcgacgatatcccgggaattccggaccc

SEQ ID NO: 131168 - DNA, 1019 bp, Homo Sapiens
tttttattttttctgctcagaaactcattgattttactctgaagcacccacgaatgacagattcccaggaggggcagagaaggctgagcggcaccacgtggggctggccgcgggttgtgggcatgagcacgcctggagaggccatggggctggtgacaagctctggccagaagaccccaagaaggtctgatcctggggtctgatccaggcctgcggcactgggtcctaggcagactgtctgcctggtgagacgtggaaggagccagtgtccgcagccgtctcaggacgtcagagagctcggtggcctgtctccagcagcatgctctccagatgcagcctgctgtcgctctccacatagggctggtgcagccacatggacaggtagctcagggtgaggtcgggatccccggtgtgggcaagctccttggccaccgtgcgcttcaggagcagctccttcctgtacatctccaagagcttatgcgaaacctcatagaaatgggttgtaggccacgtgtggaacagagggggtcgtttactctcctccccataatggtagttttctagttcacaaattcccttggtagttgaagacagcttttccattttcacctgtattttggtcaacccatccaaggtggcctgcagttcctcacacagcttctccagttcctcgttatattccagacacaccttttcttcattttccttcgaggctgggctgctgctgtctagttctatcttgtctttattcaataaactgattttcaagttggcaatattatttgcagtggtaaaacctgcatcattgagggtttcccacttcaggattaaattgtgccaatcagccgcattgtccttaatttttcttgcactgacagataagacaggttttctgggcgttacagttccaagagtctttgcttccataaggtccacagatatccgtagaaggagacgcctagccccgcccacccggacgcgtggtcgacgatatcccgggaattccggaccggtccagc

SEQ ID NO: 131169 - DNA, 1026 bp, Homo Sapiens
  misc_feature (106)..(114): n is a, c, g, or t
  misc_feature (678)..(678): n is a, c, g, or t
  misc_feature (805)..(805): n is a, c, g, or t
  misc_feature (818)..(818): n is a, c, g, or t
  misc_feature (821)..(821): n is a, c, g, or t
  misc_feature (837)..(837): n is a, c, g, or t
  misc_feature (847)..(847): n is a, c, g, or t
  misc_feature (860)..(860): n is a, c, g, or t
  misc_feature (862)..(862): n is a, c, g, or t
  misc_feature (885)..(885): n is a, c, g, or t
aaaaagtggcaaggatttttcttggcttttattagcatgtgttaaaatcatattatccaaacactaccagaagaacatgtattgttctgaataaagtgcttaaagnnnnnnnnntgcaacttattaaattggacattcttttctagttcataaattttggattacaatcagggcacaaaaggagaaacagaatgcagtattagagcgagaagcttagttaagaacttgggtgtagacacaataccatgtccactcttcccacttccttgctgactgaacactgcacctgcataaagcagcaaacagctttgtttcaataaatacatttcccttcattcaaatcagaaaagttaattatagtaaagcattttaatttgaccatctgtttatacccacaggcaaaatttatccacagagtttaagtgtgaaagtgttatttcattgggccttcagctttctaatgctatttgggttcaagattgtctcagcaattcattattggtttctttatatttacctagtactatttaataccaacactatagtgttttgtgttaaaaatgccaaccaaggatattttcacagttctagaaacgagtgggcctgaggctttcttcccaataaactaagttttcttttaactgggtttctcacattagcactctgatatctgcacanaaccaagtcctgttgtgacagattttaaaatcggtgatgttctgaaaaaatagtaacttggaagtctctgtgtttgaatcttgggtggtcatgttgagagcaggaaaactgcattaatacattttanacatcatttgcancanacatttaatcttccanggacgtgcanggtggtgataggnanctgcagtgtgagcaacccatcangagtgctggtggggtggcttggactcatcagtggacacactcacgcagctctggacgcagactgcatctggtgcgagcttgacttcttacaagagaagtagtgctcactcaacatcaagacttcgtgatcactgcgcgaca

SEQ ID NO: 131170 - DNA, 867 bp, Homo Sapiens
  misc_feature (78)..(112): n is a, c, g, or t
  misc_feature (620)..(620): n is a, c, g, or t
aaattgataatcatataggggtagcgccggtatcagcgaacgacgagcgcagcgagtagtgagcgaggaagcggccgnnnnnnnnnnnnnnnnnnnnnnnnnnnnnnnnnnncagtcgacggtaccggacatatgcccgggaattcggccattacggccgggggctccccgctcctcctccccagccatggcgttcacgttctgcgggcttcgtgctacatggctggcgctgctgctcactgccgcgctcatcttcttcgccatttggcacattatagcatctgatgagctgaagactgattacaagactcctatagaccagtgtactaccctgaatccccttgtactcccagagtacctcatccacgctttcttctgtgtcatgtttctttgtgcagcagagtggcttacactgggtctcaatatgcccctcttggcatatcatattgggaggtatatgagtagaccagtgatgagtggttccaggactcgtagtgacgcctatcaatcatcatgaatgcagatattctagcaatattgtcagaaggaaggatgggtgcaaattgaggtttttatcttcgtagcatttttttactacctatatggcatgatctatgttntggtgagctcttagaacaacacagcagaagaattggtccagttgaagtgcatgcaagaaagccacgaaatgaagggattctatccagcaagatccctgtccaagagtagcctgtggaatctggatcagttactttaaaagatgagtccttattttttaaatgtttccagatttttggttgtggaaggactgttttcatatgttatactcagataaagatttacatggtattacgtataacttaatat

SEQ ID NO: 131171 - DNA, 2080 bp, Homo Sapiens
  misc_feature (66)..(76): n is a, c, g, or t
  misc_feature (191)..(315): n is a, c, g, or t
  misc_feature (332)..(340): n is a, c, g, or t
  misc_feature (384)..(437): n is a, c, g, or t
  misc_feature (456)..(464): n is a, c, g, or t
  misc_feature (509)..(633): n is a, c, g, or t
ctaggtaccgggggaggcgtgcgtggtggtttttttatagacccggggaaaccccctctaaacaannnnnnnnnnnaaaattgtaaaaaaacacacaactctttaggatgaaaggggcccaaaaaaagaccccgaggggggttggtttttaaaaaccccccccaaatgaggaacccgaaccccgggggttnnnnnnnnnnnnnnnnnnnnnnnnnnnnnnnnnnnnnnnnnnnnnnnnnnnnnnnnnnnnnnnnnnnnnnnnnnnnnnnnnnnnnnnnnnnnnnnnnnnnnnnnnnnnnnnnnnnnnnnnnnnnnggttttcccaaattttnnnnnnnnnaaagaaagggtttttttcaaaaattcccaaagggcggttttttnnnnnnnnnnnnnnnnnnnnnnnnnnnnnnnnnnnnnnnnnnnnnnnnnnnnnnttaggggccccctttttcnnnnnnnnnggggggcgggaaaatggggcccccccgggggaatttttaaagggnnnnnnnnnnnnnnnnnnnnnnnnnnnnnnnnnnnnnnnnnnnnnnnnnnnnnnnnnnnnnnnnnnnnnnnnnnnnnnnnnnnnnnnnnnnnnnnnnnnnnnnnnnnnnnnnnnnnnnnnnnnnncttaatttcagagttttattgtattgcactaaaggaacagcaggatggttatacaattttctctcattcagttttgaaaatctgtagtacctgcaaattcttaagaatacctttaccaccagattagaacagtaagcataataaccaatttcttaataagtaatgtcttacaaataaaaacacatttaaaatagctttaaatgcattcttcacaagtaattcagcatatatttttatatcatgtttacttatgcttaagaattaaagcaagtatatttattactctgatggaaatatgggaaatctctcattcatgcaatatacagggataatattcaagcgaagggaaaattcccgctttttatttttgtaaatgtatccatatataatcatcgacatgacagatgaggaaacccatgaagtttcccactagtcagatatacattttcacttcatcagaagcacctgatatctacagctaatttataattagatactgtttcaatgaaaccaaaatgagccctacaagttcctataaacaaaagcttccaatgtactaggacagtcagtaattaatgcatcattcagaggattatggctgttccttaagaagtgcaagttcaaacctgtcaacaccagaggtaatcattttatattaatttatacgtaataccatttaaaatctttatctgagtataacatatgaaaacagtctttccacaagcaaaaatgtggaaacatttaaaaaataaggagtcattttttaaagtaactgatcagattccacaggctactcttggacaggatcttgctggatagaatcccttcatttggtggctttttgcatgcacttaactggaccaattcttctgtgtgttgttctaagagctcaccaaaacatagatcatgccatataggtagtaaaaaaatgctagaagataaaaagctaatttgcaccatccttccttctgacaatatgctagaatatctgcattcatgatggttgtagggtcatagagtcctgggccactcatcactggtctactcatatacctccaaatatgatatgccaagaggggcatattgagacccagtgtaagccactctgctgcacaaagaaacatgacacagaagaaagcgtggatgaggtactctgggagtacaaggggattcagggtattacactggtctataggattcttgtaatcagtcttcagctcatcaaatgctataatgtgccaaatggcgaagaagatgagcgcggcagtgagcagcagcgccagcatgtagcagaaggccgcgaacgtgaacgccatggctggggaggaggagcggggagcggcgccgttgccagcggagaaaggcggcgccggacgcgtgggtcgacgatatcccgggattccggaccgtaccagcctgcttttttgtacacacggttcatagtaaa

SEQ ID NO: 131172 - DNA, 1308 bp, Homo Sapiens
  misc_feature (182)..(261): n is a, c, g, or t
  misc_feature (280)..(280): n is a, c, g, or t
  misc_feature (313)..(480): n is a, c, g, or t
  misc_feature (504)..(504): n is a, c, g, or t
  misc_feature (519)..(536): n is a, c, g, or t
atccttcggttcccacttgattaggggattttgatgtttcaggggcgagcttttgaaacccagcaacaggcttttaccgttctgccctttactgccttgtctcacatgttttcctccgtttccctgtatttgtgaaaaccgtataccccctttgatgagttgtacccttcccgcagcgaaannnnnnnnnnnnnnnnnnnnnnnnnnnnnnnnnnnnnnnnnnnnnnnnnnnnnnnnnnnnnnnnnnnnnnnnnnnnnnnnaatgcaactggcccgacangtttccgacttgaaagcggcagtggcgccaccnnnnnnnnnnnnnnnnnnnnnnnnnnnnnnnnnnnnnnnnnnnnnnnnnnnnnnnnnnnnnnnnnnnnnnnnnnnnnnnnnnnnnnnnnnnnnnnnnnnnnnnnnnnnnnnnnnnnnnnnnnnnnnnnnnnnnnnnnnnnnnnnnnnnnnnnnnnnnnnnnnnnnnnnaagaattcggcacgaggggagcgnccgcggctgtaggcnnnnnnnnnnnnnnnnnncctctaaaatacttagctttattaaagacatggtactaaaaataacagattccaacatttgctctatttctacttatatatcataaataagacagctgttgatgcaagacacactctttcacaatctttccatatgcacccaagcattcttgtatcagaataagctgtttaccagccaaccgtatgtggctgaatgattaaaatgaccatctatactttacatagtaaagcatcttccaaaattttaatgtacacagtgacaaaaaggaaaaacatgcaagaaaaacagtaattctgaacacatgaagagtgattaagcagcttcataatcaaatcaggcttcattacttgcaacaagggcaactctttccattccccactaaatactaaagtttcaatcttattaacattaaaagaaaactcaagttgaaaccaagtaactaacatgctattcagctttttagatctaaaaaagtaactcttcccatgaggtaaggcaactgagtaatctgattgtattagattgcattaaaataattatacttaacttttaatacactaattaaaaggtattacttttttggaaatacaacaataatgagttcagaaaccacaagttatagtactggggaaaaacattagcagtgctgtcactttactatttgcatactttctgtaaaaagtgagcctaagaatgatggatgacctgtatcttaaactcaagtaaacgtatccttaaacataaaaccaataacctcccatatactcctaa

SEQ ID NO: 131173 - DNA, 1527 bp, Homo Sapiens
  misc_feature (29)..(29): n is a, c, g, or t
  misc_feature (462)..(494): n is a, c, g, or t
  misc_feature (880)..(903): n is a, c, g, or t
  misc_feature (1022)..(1034): n is a, c, g, or t
  misc_feature (1272)..(1272): n is a, c, g, or t
  misc_feature (1386)..(1386): n is a, c, g, or t
atagaccatgctaatgctagaccagtatntaagggctaatctcacacctccttagctgtaagagtctggcttagaacagacctctctgtgcaataacttgtggccactggaaatccctgggccggcatttgtattggggttgcaatgactcccaagggccaaaagagttaaaggcacgactgggatttcttctgagactgtggtgaaactccttccaaggctgagggggtcagtaggtgctctggagggactcggcaccacttgatattcaacagccacttgagccaaatataaaattgtatttacagctgatggactcaatttgagccttcaaacttgtagttatcctattatattgtaaactaatacattgtctagcattgatttggttcctgtgcatatgtattttcactatgtgctcccctccccagatcttaattaaaccagattttgcaattcgcnnnnnnnnnnnnnnnnnnnnnnnnnnnnnnnnncttgctcggccgctctcgagacctcaaaaaagctttcaaaaccattctatttggcccccgcgcccccgaaggaaagggaaaatggcccacacctcgctccctaggaaatcctggccatgaccagcggtttgaatcccgcacaaccaaaaaacgcctcgcgccacaacccagggtcctcgaacaactccaaatgcgagtcctgaggccctccctgggatctataaacagggagtccacacgaatctcgatattacgttagccccccgcccctgccacttttccccaggaactgtccgacatataataaaggaatttatgtccgaccccgcagacccctcaaaaaatggggatgaaccaaccccggaatcccccataggagtattctnnnnnnnnnnnnnnnnnnnnnnnngctatctccctcctttccccctgggtagaaaaaaacccggggcccacaccacccctcttttccacatactcgtctcccccccggtttaaaaattgtcaccaacttgggttgagaaaaannnnnnnnnnnnnatgaggcatttagtgtgttttccacccaacccagctacgacaactccacagtctccttccacaaataaacaacccgcgctcctttgcggatggatcaaatacgaaggcgcgctatacgattatctcttcccacaccgctcataaccaacggtcgcccactatctgtcgtggggggtgaaaaaaaccacaataggtgggtcatgcaaaatatcttgcgttagcgtgaaagtatgttganttaacacggggagcccgccccgaactaccatgcaagaacccccgccgaaaaacgagacttttgtgtatcgccgtgatgtcggggcggtggggaacactcgccggcgggtggcanagcgcgggggtggcacaaagattgattaccccgcaataagaccggcccgatcgtgcaacacggcgcgtcttcattctcgcgccacaacccctatattattgttctcatcagcgacggttctttgtacgacaatgcacacgg

SEQ ID NO: 131174 - DNA, 1294 bp, Homo Sapiens
  misc_feature (680)..(680): n is a, c, g, or t
ttttttttgggagggaagacatttactttaggtataaaggtttactattattaacaagttatcactattatttacatgtttataaaatggaaataaaaatgacatacacgtttggtgccaaaagtggcacatccaaactaatatcagtataaaaataaattttcaagctatgtgtttttaaaataaaggtcattgaaacagtaagggggaaaaaatctgcatctggcatgtgttgaaatgcaatcatcatcacagcaaagcagccctggggcaacaaaaccagtgcctgctggaagaactgtccccacgcgctcttgcaagaacccaagcaaacaaacaaaaaaacaaatacaccagtgatgttcctgagctacagaagtttagggcatccaaactgttgtgaattcctgctaaagaggaggccctgtgggatctgagctgatgaactctcctgagtgctcagctagcgtggcaccaggacctggcactacactctgagaggacgctaagcctacctgtgaaacacaaatcctctgctaacacaaaacagcgcacgagtcctctctgtcaatcaccaatccccttgcaagtctcctggctgcagataaacagggacaagggctgaggacagacagaagccactgggtttgggagaccctgtgcccatcagacatgccctnttggtggtttcggcagagatccccaatgtttcgttcattcgtagagacatgcttgttcacacctggcagcagacctcattggttaacacagctgtggccccagcagggaaagcaaagccagcccagcaaaccctctgtccaccccacatggtgttttggccttcagtggctaactttcctccttgtttcccatagagctgggccaggactgcatgcctgctggaagtggcatgctgggttagtgagcgtgctgagtgagccaactcccactctgcccgctgcagcacagaaggatgcctgcccatgcacaaagtcctccaggatcccagcaaggatgcaaatgctgtgggcagcgggaagaaaggactaatgaacaggccgcagcccacttcagagcaaccaaacattccacaggagctggtgccagctcaccccacctgggaccaggggcagcagcatggaggagaggacgccagcagtccctgcagctgtagctgtgggctcctctcacgggtcctggaccttggcccttttggctttcagagacaggtgcgttccttgttgataaaagtgtggagccagctccaacagccaggccgattcaatggcagtca

SEQ ID NO: 131175 - DNA, 1036 bp, Homo Sapiens
  misc_feature (704)..(704): n is a, c, g, or t
  misc_feature (728)..(728): n is a, c, g, or t
  misc_feature (744)..(744): n is a, c, g, or t
  misc_feature (769)..(769): n is a, c, g, or t
  misc_feature (882)..(882): n is a, c, g, or t
  misc_feature (970)..(970): n is a, c, g, or t
  misc_feature (1008)..(1008): n is a, c, g, or t
ccttctccattgcaaaaaagtggcggtgttttaatcaagtctcattacaacggcagaattaggaatgagtcccacctagcttccacatgcgtgggcagcagctgtcacacgggcctgtcgtggcactcagcccatggcacagacatatgtggctcagggcaagaaccagtggatggggctctgcacaggaacgctggcctcgggatgggagacccggcctgcccaacactgctcagagcccctcccaactctgacaacaggctcgggtcaggactccccgaaatcaggcaccctcctgccccactgctgagatccccaacgggccagacctagcttggaaactttcttccacctggctggccaggaaggcagcaaacagagatgatgactcggaatgatgggctattcggaaatggctagggaaacaactgtttccctactgtcctggcgggacccaccctgggctaacgggcttcccaaggaagtcctagtggctctggggtcctgaagtccccaaatgggaacctaggctgagagaagcaaggctgtgagggcatccaaagggctgcctcaggttttgttcctgagaacgaagcgtggccccggaggctcaggcgtgctcagtggggccagggccaccagcatgggagtgggcctgtcctagcctatgcctcccagctggtgctggtcccctcctcttgcanaaagctgtcagcctggccacctcnctcctccctgactgcnagaacccagtgtcactacactgcanagagctctctgagggcagactgtgttctttctgggtctgtccctgcctgagacttagctgaagggggcgacagttgggacacagggcctggcacttcccgatagcctacatcnagcaggcgggctccagcaggcgtccccacctctacacggggatcctcacggcagcaggatgcaggtgaagagtcagctagccttcccnatgccgcagctgtgacaatcacgctcgctcctttctanctgcaggcaggggcctggctttcccgcg

SEQ ID NO: 131176 - DNA, 1025 bp, Homo Sapiens
  misc_feature (44)..(44): n is a, c, g, or t
  misc_feature (144)..(144): n is a, c, g, or t
  misc_feature (190)..(190): n is a, c, g, or t
  misc_feature (286)..(286): n is a, c, g, or t
atggggctcccggggaaccgccagcaggagggggccggagaggncccatccagcaggagtcctgttgtcgaggtcccagcctccccgtaaagctccgcacagaggccaggtcatagctttcgcaaaaggcttgagcttttccanccaccagaaacccccagggagagacaggagcaggcagagaggaagnccaggggaggggagagcagaccagaagcagagttaagaaaacacgaccacacccccagacctgccttccctttctccactcctgctccatctgtcncctgagttggcaggcctggcaaggagaggcggccagtggtgagagccaccctagcattctgaaaggaggaagccgccctggcccaaccaccaacagctgtgtgacctcagcaggcccttcctgcccagcctccacgtgggcctgtcctagcctatgcctcccagctggtgctggtccccctcctcttgcaaaaagctgtcagcctggccaccctccctcctccctgactgcagaaaccccagtgtcactacactgcaaagagctctctgagggcagactgtgttctttctgggtctgtccctgcctgagacttagcctgaagggggcgacagttgggaacacaggccctggcacttcccgatagccctacatcagccaggcggcctccagcaggcgtccccacctctaacacggggaatcctcacggcagccaggatgcaggtgaagagctcagctagcccttcccatgcccgcagctgtgacaatccacgctcgcctctttctaacctgcaggcaggggccctggctttcccgcggcctgcctcgcccctggcttcctcccttgctcctgccctcagtgttcagtctcagaaccgtcctgggcacagagtggcatcccgaggaacgcaaaggagaggcagagccagaaagagcaactaacaagcagagaggggcctcgtgccgaattcgccacccaggcctcgcttccgggtgggttttaatttactttggatttgtt

SEQ ID NO: 131177 - DNA, 798 bp, Homo Sapiens
  misc_feature (703)..(732): n is a, c, g, or t
ctggagctccttgcacccaagtcctgcagccccagtcctggcaagtccaagcgacaccgcagccgcagcccgagactggccaggttccctggcttgccctacggccctcatcccgtgaacgccgtggtgccagccgtagcccctcaccccagagccgccgcctgtcccgagtggctcctgacaggagcagtaatggcagcagccggggcagtagtgaagaggggccctctgggttgcctggcccctgggccttcccaccagctgtgcctcgaagcctgggcctgttgcccgccttgcgcctagagactgtagaccctggtggtggtggctcctggggacctgatcgggaggccctggcgcccaacagcctgtctcctagtccccagggccatcgggggctggaggaagggggcctggggccctgagggtggggtaggcagatgggccaaggtgaccaccattctgcctcaatcttttgcaagcccacctgcctctctcctgctgctcctccagctgtatctgcacctgcctctctgtcctggccaggggtggacaactggggtcccccaaaactcagtcctggcacctcaactgtgacaatcagcaaagccccacccaggcccccatctgggatgatgggagagctctggcagatgtcccaatcctggaggtcatccattaggaattaaattctccagcctcnnnnnnnnnnnnnnnnnnnnnnnnnnnnnngaccgcgtatgcggccgcaagcttattccctgttagtgagggttaattttagcttggcactgcccg

SEQ ID NO: 131178 - DNA, 376 bp, Homo Sapiens
cattctgtagtcgtctttatttagagcagaattcagactcagctggtatcccccagggcaaccccaggatggggaagggctggtctgtccccacccacttctccaggatcctcccagcccccaggctggctttccctccaactgtcagctgcttagctgctcatctggggattggagctggagcatctgtcaaggttgtctccttgacaaacagcttcctctttggaaatggcttcactcaggtcctgcaggtcatcgtagcaggacagagagggaccctgggaaggaagacagcagatgagcaccagacaagggaaggtgctcgtggttacagaggaaacagggctggcacaggaaatgacgaatgggagagagg

SEQ ID NO: 131179 - DNA, 492 bp, Homo Sapiens
  misc_feature (42)..(84): n is a, c, g, or t
  misc_feature (88)..(122): n is a, c, g, or t
aaaaagatcgatagactcactatagggcgctagctcgtctgnnnnnnnnnnnnnnnnnnnnnnnnnnnnnnnnnnnnnnnnnnnccgnnnnnnnnnnnnnnnnnnnnnnnnnnnnnnnnnnncagtcgacggtaccggacatatgcccgggaattcggccattacggccgggaacaaaaaacttgtatttccctgcagcttgggaagccagaacacaatattgcagtgaatctgaattttctgtgacaaataaattattaaattggcacatatgatcatcaccagtcatgtctcatcaaaagcctttattatgatgcttgtacattttgaagaatttagaattaatgagaagttaaccctttagtcatgtaacacaatcatattttaatcagctttttcttttgctaccaagagtttcaaaaaataaatgcagtatttgatttcaggctgctaaatgggctcatttagcattcattccttgatgtagacatt

SEQ ID NO: 131180 - DNA, 2714 bp, Homo Sapiens
  misc_feature (58)..(82): n is a, c, g, or t
  misc_feature (1495)..(1495): n is a, c, g, or t
gtgccaagctaaaattaccctcactaaagggaataagcttgcggccgcctgctcaggnnnnnnnnnnnnnnnnnnnnnnnnncacagctgaattacatttactgtacaaagaacggttcggagagaaccaggaatggcggagtgtctaacagcagcgcgggtagtgttgatgccgtgaatgcaggaccatccaggtcctcaaagtctgtgaggtttgttcataatcccaaacaagggccctgctggcagcaacaggacaggtggggccaggacagggaagctggagcaggaggccagtgtctttgggggctgtggcagggccgcctgcctggggttcccttactcatctggtagttcatgcaggccacggccctcatctcccaggaacgggccatggggcgagtccactggtgcccagtaacaccctccgtgggaccaccttgggaagcatgtgccgcggagtccaccacggggggtcctgggtcccgggagggctccttctgcgtgctggccatgtcgtgccgcacggcctgaggacaggaggtagaggtgagcaccagtgctgtgggcaggcccaggcgatggtgaccgtgcagaggggctgctggggcaggcatgggcagaagcactgggtggaggagcggccaatggcttcaggagagaggtggccggccctgcgtgcctggggctcagcatgagcgccgggctggtgggcctttgaggaggggcctagcctcccgaggcccccaggtggacgtggacgtggacgaggtggttccaggcacgtccctaagaaggtcaggatggttctgatgccgtgcaacctcacaggagagctgcagctgtggggaccccagggccagcgacagaagctgccgagaacaggaggctgcacgcaggtgcccggggtctgcaccgctgcccatcaagtattcctaagtctacagatagctctgcactctccagggtgggcgagatgatctgagttttgagtggtcaatgtccccgaaggtgtcacatcacagcaggaaggttctcatccccacgtggggagggatttggggagcaacaaaaatgtgggctgccaggtgcacctcctttctcccctctcctgagtgctgcttgggctctgaccacaggaccacaccctccatcccgtgggagccagggccccggtcacccaagcttccagagggagcaccggccctgtctgctcccccggcctctgggcagccccgccactcgcagcgcatgaattcacaggatgccttgccatcgcggccgcgagtcccctctcgaggagtcccaagtgcgtccccgcagctggcgtggccatgaagtcaccagtgcaccaccaccgggccacacccaggcttccctgaaggccccttaaaaatgtacaaaaaagtgaagtgttctctatataaataagaaaggccaaccaggttccccgccgttcaagcccaggcagctggggaagggcccggcttgtttncagaccaagattcccggaagcaccagcagcccagccgcgccccctcctgccgcctgccgcgcttggtccgtgcatgctcctcctcgcacccggctcaggtgtgaggaaagcccggcgcttctgaggcagctgtgtggacagtctccacgtaggcggcactggcctggcgtccagccaggagtgtccagctcgagccctcctggcatctgcacaggcggccccgcccgtccccgctaggagatcttgcagttactccgcgagcagttctggggggggctctggggtggacggatggacttggacctcttgaggctgttgcccttgctgccgccgcccccggccccgctggccagggagtaggaacggccgtgcatcatgaccgcgttcatgccgttggccatcgagaaggacttgaggtggctcttgatggtgacgggcagtggaagcttgtcgatgaggtgcacgggggtgcaggagacgatggcccggcagcagaggtcctgcaggctgaacactcggttgggcctccagatcttctccatgccgtgccgcatgagcacgatgcgggatagctccgtgaaggactcgatgacgttgaagttgcacagggggctgacctcaaagaaggtcatgcagttcttctctgcgtacgcgcgggcctgctccgtcgggacctgccgcttgaaggccaggtgcagccggtttccaaccaagatccgggggactccgggtgcatgctcatcgatctccttgatccagcggtcgatgccgtcaaaggaccagcggttggtgatgtcatacaccaagaggatcccctgagcgcccctggagtaggacctgaagatggtgcagaaccggccctggcccgacgtgtcccagagctccagcttcacgcgccggccgtccagcaggatggtggtggtcttgtagtcgatcccgttactgtaggcgtacggggactctgccgcgccgtcctgcaggctctccaggatctcgcccttgcccacgtcgctgtcgcccaccagcaggaacttgagcaggtagtcgtagctcttcaccggactgccctgcgagcccatggccgcgccgcctgcgccccgcgccggccgcctgccgaagcaccgccgggtgaggccgcggcgtgagagagcccgcgccccgcacctgcgcccgttgcgtcggacgcgtgggtcgacgatatcccgggaattccggaccg

SEQ ID NO: 131181 - DNA, 500 bp, Homo Sapiens
actgccagttgccaccttgaatagagctgacggcttctgcctcgctttcttggagccctaagctgccacgtagaaattccaacgacttcactggagggaccactcagagaagtgttgaagctgcatgagagaaggctcaactgagcccagatttccagccacccccgactgcatggtgtagacacatgagtgaagccttcttagagcctccacaccagaccaccctccacctgtatgccactgagcaaccccacggggagcagaagaaacactcaacctgccgcaattcctgagttctgtggattatgagcataacaacatgactgttgatttagtctacatttggggtggtttgttatggggtaatagatatctgggacacattcacacatatacatcctagctgtgtgacctcgaacatgttacttaaggtctctgacatcagtatttttatcaacaaaattgtaataatagtgtccgcctcccgcgatcctctagat

SEQ ID NO: 131182 - DNA, 1058 bp, Homo Sapiens
  misc_feature (61)..(79): n is a, c, g, or t
gtgccatagccgaaattaaccctcactaaacgggaaaaagcttgcggccgcctgctcaggnnnnnnnnnnnnnnnnnnncttactaaatccagcttttattcttaggtattcacctgattgctgtaaactttcaattcgtttccagagttcccataaatttgagtttttgccaccttatttgctgcttttgtggaaggacagacttgtggaatttcctattccatttcgttgaccacattaaagttttagaagctctcctctagtctacccttcattttaaaaagtcaaaaagacaggaagtgacatatccagggtcacacaacaaatcaggggctgagctgagatcagaataaggatgtttgactctcaggtcagagctctttctgcttcaggacttcatcagctcttagtgttgagaaggagtcaggctcaagctaaacaccaatattaggccaaggggcagctttccaaggagtaggggctgagggtaagagtccttggtatacctggtgggcttgactgactcctttactgacaggggaccctacatgagtccaggttgtggactgagtaatgatgtccctatcccttagaaaaacacaggcagagagctttcagatttgatgggggtgaaaatgtaaacctttatctttctgaggacatgtatttagcttgatgtttctaggtctcattccactccatctcggccagggcaggaaagagcctacagcagaaataaggagccaggtcctaaggtagggctgtaactccctgccaaggccaacagaaaatgggcatggcatggcattaaaccaccactttgaccgtgggcacctgcaaaggttcatctttcagctccctcttcccaaagctaggagtgcctcatctcatctctcatcacctgactgaattccaagcagactgtgccatctgctcacctgccctctggaggaacacctctacttttgcggtgttctctgtgtgagcacagtagtatttagataagcgttagattacagcaggttacagatgcagtttcccagtccccacacctgct

SEQ ID NO: 131183 - DNA, 944 bp, Homo Sapiens
  misc_feature (453)..(453): n is a, c, g, or t
  misc_feature (774)..(774): n is a, c, g, or t
  misc_feature (862)..(862): n is a, c, g, or t
  misc_feature (874)..(874): n is a, c, g, or t
tttagtaatacaaaattatttattagtaaaaaaggagacagcatttgttcgttatacaaaaagtaaaacaattgaaagtttcctacaaaaatttaaactatgagcatacaaagtaggagtggcgctgtgaccgggtctgaggacttcatatgaatgcttagcatcagaaaattggaaatagtgacatgtaaactgtgcttgggatattgtgttaccaagttgcatattttgcagtgtcatctagacgtggtagaaaaatagatatacccatgccatgttctgaattactgtaatttctattaactatagcagatgtcacagtttgtttccctcttatagaaatcactggtggcggctgctgagggggcaaagtccacacagtctgtgctcgggtagaagtactctgccgcctggagagcatccaagtcctctgcctcacacgatgcgcagtancagatggaggtggtggccgaggagaagcagctgtactgggcgtgtgaggacaagtgttggtaggaatggtcttctggggggtagccacaggttctggtgtccagagaagcaggggaattgtaattctctggagcatatgaaggcagctgcactggcgagtaactgtagtctaaggagccagagagaatggaggaatttgaaggtgatcctgggatcaggctctggttaaagcaaaaaggggtggcctggaagctgtctgggaaatggtgtggagcatttgtgtggattgagcaaggctcgggtgctctctgtctgaagtangatcaagatctggtcgggcagctgagttttctcaatgaacacactggaaatctcccgttgcaatatggcgtggagaatggtcagtcanaacatctgcaanatgtgactggtcgaagtgaacgtgctcgacggtcccggagcctgtgtgctctgcgacatctcagtattac

SEQ ID NO: 131184 - DNA, 1734 bp, Homo Sapiens
ccagaccttgctttattgagggggaactccagatgagggaacccacctgtaccccttcctgaccgcccctcacatccaggcccagggttcccacctgctgcctgggaaccaggcccacctggagacctagctccagcacctcctgggccatccacaccagtgcctatagctcttcagctctggggcaaagagggcagcaaatcccatgaccaaggggagggagggaggcccagttaggatgcaggcctagtcaggatggaggtggaagcttcctcactccgacctgggtctgccgttctcaaaaccagaacaccccaagcccagggccctcgctgtgcctgggacctagcctgtcctctccaattctcagttaactgcctgcctccctggacctatgggctggtgacttcgtgtgggtccccctgggacacaggctctgccttctgcccccacccatagaggcctcaagcccttctggcttccagcagggaaaagtagaggaagggccagctccaggccccagccagggatggccctgcccctccatgctcactgaaggctgcctccaccaccccatgaggttagaaaacaaaaagcactaaggggcggataggcagggccacgtgacaggcagggcagcaagggtcagggcactgcagggggaagcagcggtgtgtctgagttctgtgcggagacgctgggtgactcaggcccaatgagccccaggccaaacagattaagtatggagtcagcaatgatgcgggctgtgcgcttctggtacccgcctgaggtcaccataaggatgggcacccggcggccacggaccatccggaacaccagctcatcccgcttcacgatgcccgctgggctgatggacagccccccaaggcggtccccctcgaggatgtcggtgcctgcattgtatacccaccacgtcgggcaggtgctcctggagggatttcttgatggtcctctccaccttatccaggtactcatcatcctctgtgccccacttccagctccaccttccgcctgatggcctgcttggcaaagcggtcccctgggtagatgtggcggttgtagacatccatgatgtacacacgcttgtcgtccatgaagtctcgctcatgcccattgccctgatgggcatcaagatcaatgatggtagccctggagatgccctccacacgcgtcaaacagaaacttgatggcgagcgtgatgtccgcataggcacagaagcccccgccacggtcgctggagcagtggtggaagccaccccccacgttgatggcccagcctcgctccacagccagcttccccgccattatggttcctcctgtctgggtccgaaggggcctcagcaccttcctctgcacaaggaagttggggaggaagataacgggggggatttctgtgatggtagcaacagcaaaggaccacttgagctcattaagatagcgcctcgtgtgcaccaccagcaggtcctcctccgaggcctcccgcgcctccaccagcatgctgtcagacagaagcttctcttcttttaggaaattgatcactttgccccattttccggcatcaaagggatgcagcttctccaggcccatgaaggtgatgttgtagcgcggcgagtacacgattggccagcgtgtctctggcacatgctggtacagctgggttgtgtgtagcatcccggggccggccctcccaaagatgcagggaattccggaccc

SEQ ID NO: 131185 - DNA, 472 bp, Homo Sapiens
cttgtccaagatcatttattgttattattatttttctctcttaattggattcagcgtttctggctcctcacacacatcctctctggtgggggattcaggtttgtgcaaagcacaaaggagcttgtacccacctgggcccccggccagcagcacggccggctttgatcggagcccctcttccctgtccgggctcgcctgccccagtccctgcttctgacccctgagtccggcctcccgagcctctgcctgcaccctgagcatccccaggacggctgggagggccaggtcttccgtgatgcagaagtgcctgagatggttcatgaaatgccctcattgttccccttctgctaaggcccccgacgcctccctcctgctgtcctacacagggcccttgctgggtcacacaccaaacagcctcaaggaaaaattcagcagctgagccgtgcgggaggcctgggctcaagcccggagt

SEQ ID NO: 131186 - DNA, 1093 bp, Homo Sapiens
ttttggatccttgaagtttttactccagagctttcattttaagaaattgcaaaaaagttattaagtacagagagaaacattttccctgtaataatttgaaattaaggtgaccatttgatgccttatcccctgccaaatacattgatttactttccagcaaacaagaacatcctctgatgtaacttaacaggcaaccatgaaaatcaggaaattaacacggacacatcattaccacggcattgtaggccccatttaaacttttccaactgtccctgtaacttcctttcaagcaaaaagatccagttcagaatcatgtgttgtgtttagttgtcatgcctctttggtcccctccagtttggaacagttccagggtctatctttgattttcatgaccttggcactttctaagattacagttttgtatacagcatgtctctttacgtgggtttgtctgatatatcctcatgattacatccaggttatggatcttcagcaggaatatcacaggggtgatgttgcaatcttctcagggcatcctatcaagtgccacataacttcactttgtcccattcctgacaatgcagactctgatcactaaatcagagcctgcactcttaactactccatgacagtccacaaaggtcccttcttcagaagccacaaagtgagttccatttggtgaagtaaatccactagcatcagtccctcatgatcaaagtaattgcagctccataaaatctgctgtaaagccataaacatagctacagaaaagccaagcgtatgtacgcttttggcttttgggctacaaacagatgtaaatacattcaggcacagactaaaaacacttttctcctctgtttcccttactctgctcctggcagggcttgtagtctgttagaccctctctcccggccttcaatgctaaaaccacattttccatttctttcctgagtacatactatgtgtcaggcacaatgattctacatgtcactaagaatacagagatcattaagacacagtcatcattcctaagcagcccacatttaactcggacgcgtgggtcgacgatatcccgggaattccggaccggtcc

SEQ ID NO: 131187 - DNA, 1083 bp, Homo Sapiens
  misc_feature (59)..(80): n is a, c, g, or t
  misc_feature (1016)..(1016): n is a, c, g, or t
  misc_feature (1027)..(1027): n is a, c, g, or t
gtgccaagctaaaattaaccctcaactaaagggaataagcttgcggccgcctgctcggnnnnnnnnnnnnnnnnnnnnnnctcttcagaagctttattctccctgggaggggcacacctcacccagccaagggctgcttctgactggacagagggcgtccaagatgcagacatggtgtgcaggcaggagggcttccactagccccccaggtgggaggtgctgtgcacccaggctcaagagggagggggccccagccacgagggaggggcagggactttcttctcacaaagacctttcttcagtattcgaaggtcactgtcttgacccgcaggtactcgttcagagccgcctctcctagatctttgccaaatccagactgtttgaatcctccgaagggagcggccacgtcggtcttgttgtacgtgttgacaaacacagtgcctgcctggagcttgtcactgacatacagggccttgttgatgtccctggtgaagacaccagaagccaggccaaattccgtggcattggcccgagacagcacggcatccaagtccccatcagcaaaccgagagatgatcatgacaggcccgaaggactcctccttggctatgaacatgtggtcttccacgtctgtgaaaacagttggctcaaagaagaaccctggccgagggacctgattcccgccgcagaccagtgtggccccttccttcacgccatgctggcagtactccatcagcttcacaaggtgggcatggtgattctgcggcccgtggtcggtgtccctgtccagcgggttgcccaccttcatcttccgcactcttctacactctccgcacgaatcatcatgaatggagtcctcacacaagagtcggctgctgcatgcattctctcctttgttgagaaacagactcatcccatctgccagccttgttgagtcacatcccaagatgtgagggtgactcccgccagttcaggacactctcacgtactatgcacacttcagagtgctgcactcntgtggcttgancattctcaacagaggctgaacctggcacacgaccatcggaggggtttcaccttgcc

SEQ ID NO: 131188 - DNA, 795 bp, Homo Sapiens
ctggctttaacatttattacaaagataagagcagaggctggtgagttacacttcttcctccccaccaggtgctctctgcagctctggaaaaatggtgtcctctttgttgtcccaccagggggcgccacctccagccccgccccagcctcatacccagttcttcagctcggccagcggtaactgaagcctcccagaatcctggatccgggcccctagtaccctctttcccagggacccaagagtcctgcctccagtcgcctgcacttgtaactgagagctggaggtcgtccatagcagcatagtgagagtgtttttgatgagggtatgcagagtgggggtgaccatgttcccacctggggcctcaggtgggccaaggcctccccactttagccagcgtcccctccagcagccatcagcaagccaacccactccaagccagggccccctttggtccttgcacttgaggtgctttgttcagggctgggtcaggagtggcagagacgatgtccaccacctcagtactggggaaagtagcctggttcctcctcgtgggtccagctacttggactgctggctgggttctggaagctgcctcggccccagggcagtgctaagcagctcagtcagggcatccagcttccccgccagcgtgtcaatctgtttctccagggcccggtgtgagctgctcagattctgctgcaggtcatacaggatcatgtgcatcttggagatgtccacatggagttcattgttcccggagctccggtgtttcagcgcactggcggaactgtggga

SEQ ID NO: 131189 - DNA, 1306 bp, Homo Sapiens
aaggaaacctaagccatcaaaataacttttatttgtattttctacataaacacacagtggcaattcatggcatttggtaattcgtccagacgtgaaaggtttatgaaatcagcaaatgccattttgaaaagagtattctgtcaaaaataatttaccaaagttcaagataggcctgttcagcaaaatccaatatcattctctcagtactttataaatggaattttcttctacttgtatccatttcccggggcttatggacccattcatactctccatatttagaatcaaaggttcctttctgaagagaccttaattttaaggtaaaacgtggtccaagttcctgaattcccactttcttttcactcctgaatatgtatctgtgaaatctgaagaatatgtaatcccgttgattgtggaatgtggcaacctgccttccgataaattgaggattatgaggaaagagagatgcaaacatacgtccaattgaatgacccagccgtgttgtaaaattattcagaattatttcaggtatgtgttctgtggggtccttgcctcttctcttaatttctttacgaagacgaacactgctcattttaaaatgagcagttgggccatttggcaagtgactcaaaataagtccatttggggttttacgatcttcattaataacaatcaggtctgtgaaatctcttgcgatgcactgtggaataatttttttcagagccagtcctcttctgtaataaacatgtgagtttggtataactgtggagagctgttcacagagtcgtactgttctcccatgaggtctatctgatgttgtgatgagaatcttgggagaagtctgtttgttgaagtaagaagcaaattcatctgtagcttcatcataagcgacctcttcatcattagggtctactgtggtttcatcatacactcgctggttgtcaatggtcttgggtacaggctttggtggagccttatcgccaagagcctctctttcttttttaagttttttcttagctgccaacttttccttccgctgctgctgtttccaccgcgtgaacattaagtgtcgccgctgtttgtttttaatctccgaaatgctaaagcctggcggaaaggcagccgctttcgggggttggaccccgttttccgtcgccccatccccagcgcctgcagcctcctgaagttcttcggcagcggctttccgttttagacttttcttcccgctgctgctgctcttatccccggctttcgccatggtcctcgtgccgaattcaacacgccgggcctcgtacctagccgtagc

SEQ ID NO: 131190 - DNA, 842 bp, Homo Sapiens
  misc_feature (507)..(522): n is a, c, g, or t
attcagtatgtgtctctgtggggtccttgcctcgtctcctgaatttctgtacgaaggacgacactgcttcattttaaaatgagcagttgggcccatttggcaagtgactcacaaataagtccatttgggggttttcacgatcttcattaaatacaatcaggtctgtgaaatctcttgcgatgcactgtggaataatttttttcagagcccagtcctcttctggtaataaacatgtgagtttggtataactgtggagagctgttcacagagtcgtactgttctcccatgaggtctatctgatgttgtgatgagaatcttgggagaagtctgtttgttgaagtaagaagcacattcatctgtagacgttcatcacaaaacgacatcttcatcacatataaggtctatcaactgtgtttcacctctacacacatctgcgtgtggtgtgctcaaggttcttgggatacagcctttgggtggaccctaattcgcgcaagagcctctctttcnnnnnnnnnnnnnnnncttagctgccaacttttccttccgctgctgctgtttccaccgcgtgaacattaagtgtcgccgctgtttgtttttaatctccgaaatgctaaagcctggcggaaaggcagccgctttcgggggttggaccccgttttccgtcgccccatccccagcgcctgcagcctcctgaagttcttcggcagcggctttccgttttagacttttcttcccgctgctgccgctcttatccccggctttcgccatggtcttggctcctttgcttccgtccccggccgtaatggccgaattcccgggcatatgtccggtaccgtcgactg

SEQ ID NO: 131191 - DNA, 738 bp, Homo Sapiens
tgatgtttgaaattcaagtaactttatttaaattcaaaaacaattcttaaaactgcatttagagtcaagacccttttgtattataaaaatcacaagtatttctaagagacaaaaatacttctaggttaactagaccagatctgactttggactttattctttaaacaaattgcagagaatagagaaaaaaataggttatttacagaaaacaatatctacatatgtacttagaggtacaaatttggtgacagaaaagacttcagtatatgctggcatcttagaagcagttctcaaagagcttagttttattttcttgaattttaagaatgcctaagatccttcttcatcctcgatcttgggagccaagtagtattttaagtgtcccatatccgcaattttatactctacaacaaggggtacatctgcagacatactgagtgtcaccgttgaagagagtggagtggcttttgtaaagaagttcaggtacctcagtgcaaaagttagttgaactggttcattcatctttatggtaacaagcttcctcctctttatcgacatgactttgggtgggcaatttaatgggtttcatttccaaagtcttcacttcaagaaaatttatcttctgcttttggcagggaatttcaacagcatctccatatggcgtggaaactcgcgtattaccggcccaattccccgaagggggttttatacccaaggtggcctcctggtttggaattc

SEQ ID NO: 131192 - DNA, 1000 bp, Homo Sapiens
  misc_feature (853)..(887): n is a, c, g, or t
  misc_feature (890)..(929): n is a, c, g, or t
aatgggtaaaccaggcttccctccccttttttaatcggaccatttacttggttctggggccaaattttaatggttttccattttccaagttcctcccacttgcagaaaattttcactccgttcttttgcacagggaaatttccaacagcatctccaaatatggctgagatctcggcatattacgtgcaaattcaccagaaggcatctttactacacagctgtactcctgttctggaattccaagttgttcaacatctaaatccatcaacttcatttcatagtctgaaactttctcctggtttggtgcttcaaatactagcgccaaggtatccgcgttatcttcggcccttagtgtaatgatatcttcattgccggcgcattttagtattttggacatactggtgaggttcacgcccatggccaggttgcggtcgcagcggtaggtgtcgaagccctcagaccgcagggtgagctgcaccaaagagacgtgggacgagtccatgctctgcaggtttacaccgctggagctaatatcccagcaggcctcgttgatgaggtccttgagtgcctccaacaccttcttgaggatggagccctggaccaggcgcgcctcgaacatggtggcggagtggcaacaacgccgctacaggcaggcgggaaggaggaaagtctagctggtttcggcttcaggagcctcagagcgagcgggcgaacgtcgcgacgaccggctgagacctagaaagacaacgaccactctgctacgcctgcaaccgtttaatgccgccgcgtccgcaagcgcgcccccggccgtaatggccgaattcccgggcatatgtccggtaccgtcgactgnnnnnnnnnnnnnnnnnnnnnnnnnnnnnnnnnnncgnnnnnnnnnnnnnnnnnnnnnnnnnnnnnnnnnnnnnnnnactaaaaaaaccaggcgcatttgccggcccgcatttatttgatggtgtgtcacagtaattaacatgtcttt

SEQ ID NO: 131193 - DNA, 1489 bp, Homo Sapiens
  misc_feature (1414)..(1448): n is a, c, g, or t
tcccctcttggtccgcttgttggcgcgaaacacgtctccggcgttcgcgccccggacgtcccttcgccccccccgcggccccttgtgaaattcaagtaactttatttaaattcaaaaacaattcttaaaactgcatttagagtcaagacccttttgtattataaaaatcacaagtatttctaagagacaaaaatacttctaggttaactagaccagatctgactttggactttattctttaaacaaattgcagagaatagagaaaaaaataggttatttacagaaaacaatatctacatatgtacttagaggtacaaatttggtgacagaaaagacttcagtatatgctggcatcttagaagcagttctcaaagagcttagttttattttcttgaattttaagaatgcctaagatccttcttcatcctcgatcttgggagccaagtagtattttaagtgtcccatatccgcaattttatactctacaacaaggggtacatctgcagacatactgagtgtcaccgttgaagagagtggagtggcttttgtaaagaagttcaggtacctcagtgcaaaagttagttgaactggttcattcatctctatggtaacagcttcctcctctttatcgacattacttgtctgtgacaatttaatgtttccatttccaagttctccacttgcagaaaatttcactccgtcttttgcacaggaaattacaacagcatctccaatatggctgagatctcggcatatacgtgcaaattcaccagaaggcatctttactacacagctgtactcctgttctggaattccaagttgttcaacatctaaatccatcaacttcatttcatagtctgaaactttctcctggtttggtgcttcaaatactagcgccaaggtatccgcgttatcttcggcccttagtgtaatgatatcttcattgccggcgcattttagtattttggacatactggtgaggttcacgcccatggccaggttgcggtcgcagcggtaggtgtcgaagccctcagaccgcagggtgagctgcaccaaagagacgtgggacgagtccatgctctgcaggtttacaccgctggagctaatatcccagcaggcctcgttgatgaggtccttgagtgcctccaacaccttcttgaggatggagccctggaccaggcgcgcctcgaacatggtggcggagtggcaacaacgccgctacaggcaggcgggaaggaggaaagtctagctggtttcggcttcaggagcctcagagcgagcgggcgaacgtcgcgacgaccggctgagacctagaaagacaacgaccactctgctacgcctgcaaccgtttaatgccgccgcccccggccgtaatggccgaattcccgggcatatgtccggtaccgtcgactgnnnnnnnnnnnnnnnnnnnnnnnnnnnnnnnnnnncggccgcttcctcgctcacagactcgggcgctcgtccgttt

SEQ ID NO: 131194 - DNA, 953 bp, Homo Sapiens
  misc_feature (54)..(98): n is a, c, g, or t
  misc_feature (111)..(111): n is a, c, g, or t
  misc_feature (165)..(165): n is a, c, g, or t
  misc_feature (194)..(194): n is a, c, g, or t
  misc_feature (197)..(198): n is a, c, g, or t
  misc_feature (200)..(200): n is a, c, g, or t
  misc_feature (203)..(204): n is a, c, g, or t
  misc_feature (206)..(206): n is a, c, g, or t
  misc_feature (208)..(211): n is a, c, g, or t
gggaaaccaagtattggccctgtttccctttcctttcggggcgcccgggccccnnnnnnnnnnnnnnnnnnnnnnnnnnnnnnnnnnnnnnnnnnnnncccgcaaataaanttattagtttattactctgcttccacaaaaataagttgtacggtttattaaaantaaagtgggaggggggtttttagcatttnggnntncanntntnnnntttacatacttaattttttattttgaaattccctattccctctatacaagaacctttgctgaaacagtttccacaaaggcagcagtgaattttcagaacatttacattttttccccctcagcaaaaagataaatcacagtgtaaattatgttgttctgctgtcatctttggctggggttagacccagaagttggtgactagcaaaccaatatagccaaatgttgctagtgctccttaggcctttaagctataaactcagcaaggaatgtctgcattttatctctttaaggtaccaccaggggggtatgacagcattaacttccataaacttttatagacaaatggaaaaaaatctacaaaatttgctagtaatattacacagcaatacacactttttatactctacacaaaaccaaaattcttggtcttaatggcgagtaacaatttctgtttgagaatctgtttagaggaatagagtgggacgtaaagtcgagaaatgcaagtatttgcagtaggaagatgttggtcatctggtggtcttattgtgattgagggcataggctggaatccttcttcactggctggcagtgatgggcttgatgtccaaaagtaaacaagatcttgtcgttctgtcatgctcatcttctctactattgaccagaaccaacgcttgaactgcagaagcttctcagcattttctcctaagaatgaagaatgggtaataaatatactataccagttg

SEQ ID NO: 131195 - DNA, 731 bp, Homo Sapiens
acacacttttatactctacacaaaaccaaattcttggtcttaatggcgagtaacacatttctgtttgagaatctgtttagaggaattagagtgggacgtaaagtcgagaaatgcaagtatttcgcagtaggaagatgttggtcatctggtgttcttattgtgattgagggcataggctggaatccttcttcactggctggcagtgatgggcttgatgtccaaaagtaaacaagatcttgtcgttctgtcatgctcatcttctctactattgaccagaaccaacgcttgaactgcagaagcttctcagcattttctcctgattcatcattgaaagaggtaaaactgatcagcatttgcacattgacttcaccgcagccatttaccaaaagcctaaaatcttctgccgttaaatcttctaatgaattttttggaagcacatctagtagacctttcctcattgcatgtaagggctgttctgcaactaccaacattctgtgttctgcgtatttccgcacatactcatatacattctgtggagtgactggtatatttacaccattaggaatgagttcaacctgtcctccaccttcttctttacacaggtcaattgcaaatgccaaatccattgctgagaaaacagcatcagcatctgaactctgagacgcgaggattagttgccgccccggccgtaatggccgaattcccgggcatatgtccggtaccgtcgactg

SEQ ID NO: 131196 - DNA, 664 bp, Homo Sapiens
tttctttttaaatatacacatatattttattttaaaaagcacaagaacattatacaagttttaaatttacatttttgcaataaaagttatcaatatatgcattatttgtataacttcatcatggatggaatttgaatcagtggtataaacatgttgcagtcactaaatatagatcatcatcacagtgaaccaaaatgcatagttgttatgaaatgacaaatgaccactaaaaggtgaactcacagcccatacaccaatataataaattaattatacagatatatttttcttcaccatatcattaaaattctcactagccccttaccaaacattagaaaaacacagttctggagccatcctgttgaaccagtgccttcacatactacactaaagaaaataaagtgactcagttgcttgtttgtaagtaaacttcataagcataattgtttgcaatgattaaggtaaatcactaggacatttgaacataatgagaaatccctggggcttggggcagcactgagacatacgctcatctacagtgcaaaaatctgaatcaatctcaatcagtggaacgcaatatgaaatgggttctttggcagtaaaggtctggctggccattgccagacagtccctctgtcctcttgagagcctaactccagaattt

SEQ ID NO: 131197 - DNA, 1048 bp, Homo Sapiens
  misc_feature (823)..(823): n is a, c, g, or t
  misc_feature (829)..(829): n is a, c, g, or t
  misc_feature (833)..(833): n is a, c, g, or t
  misc_feature (842)..(842): n is a, c, g, or t
  misc_feature (850)..(850): n is a, c, g, or t
  misc_feature (862)..(862): n is a, c, g, or t
  misc_feature (880)..(880): n is a, c, g, or t
  misc_feature (883)..(883): n is a, c, g, or t
  misc_feature (885)..(885): n is a, c, g, or t
  misc_feature (890)..(890): n is a, c, g, or t
  misc_feature (904)..(905): n is a, c, g, or t
  misc_feature (907)..(907): n is a, c, g, or t
  misc_feature (1013)..(1013): n is a, c, g, or t
ccatgagagttgatctgaggagttatgtattagggataagaaacagtaaacactcagtaaatagtggctattattattatatcatcatcattattaccctcaagttgctccaggagaactcctattcaacctccaaaaccccatgtggtttcacccatcctgcagagattgagctcaaaatcagagaattgtgattttgtgattatttgatgagttcccaaactggggtccttagatcagctgggccatccctgaggtctctcagcatccagctctgttattttcctgggcatgggtctcaggcccggccagtccggctgaggagtgtgcagacgcaggcagtgtcaattcgaatccatcgccagcccacacggccctgggcatcagcggtcaatgcccgcacataggactgcttggccttgcactcagatacccagtgcctcctgtccactccccggcagccccctccacctgcccccgggccaccttcctcagcgttatcagccttgcagcgggtttcaaagaagtactggcggaggggactgccgccagctgcaggcacctcgcccaacacctccacctcgcgcccacgcaagtccacagcggtccggcggtctgtcacccagccactgactgcatcgcacacagccagctcaccccgacgactcgctggtgcagtttcgctcaccccacgccggctgcggttggccggggcacctgctgactcccgaaaggccccagcctccagcaggaagagcagagggggcccagcaggggcacccctagacaggatactcggggggagagaaggtccactcagggngcaganaggnggcatgttnagggtggnggttgggatcanttggacactggggaaganganangagangatgggaggacatnnangggaaaagaagatctctcgagcactgtcagactcctcgctcggagtctgggctgggatcccagctcggggggcctgtggagaacagtggccctcctctgcaccagnggagggaggggcacacagagtctggatcagcctct

SEQ ID NO: 131198 - DNA, 719 bp, Homo Sapiens
aaatggttaactttatttgatgtctcgccaaataacatatatatgctgtaatgttcattgaaattaaagattccatgagacaagtttaaattaaatgttcacactaaatattttgtaatgacattttaatcttagaatactatatttttgcttgttgaaaacatagttgagtaaaattatttcagtgtcagacatttttagtagcacgtacagtcgcttagctttcagaacagaaagttccttttcaccctactctgctactattattctagtatacatagtcttaagaacatacagtatctattgttcagtgtgttacaatttttctcttctattagtatctaatactaaaattagagtattcaagcttagagatggttttttcattagaaaagtttgtgcggtcaatgcgagaactagggcttccaaccttgctcagccaggacttcctataaaaaaacagataaataaataaaattagcatacaaagtatacatggatcagctaaaatgagcccacagtaggtattaatgggagtttacctttactaagtaatttttgcatatatgtgatatttacatttgtttacattgtatatatcactctaagaataccacagagtataatgtataattaaatacagatgaagaaaatctactaaattaagcacagtcaattcctgatgattttatattagggttatctccccacccgccaac

SEQ ID NO: 131199 - DNA, 1014 bp, Homo Sapiens
tttaatttttaaatggttaactttatttgatgtctcgccaaataacatatatatgctgtaatgttcattgaaattaaagattccatgagacaagtttaaattaaatgttcacactaaatattttgtaatgacattttaatcttagaatactatatttttgcttgttgaaaacatagttgagtaaaattatttcagtgtcagacatttttagtagcacgtacagtcgcttagctttcagaacagaaagttccttttcaccctactctgctactattattctagtatacatagtcttaagaacatacagtatctattgttcagtgtgttacaatttttctcttctattagtatctaatactaaaattagagtattcaagcttagagatggttttttcattagaaaagtttgtgcggtcaatgcgagaactagggcttccaaccttgctcagccaggacttcatggaattgactttgtcttctggcccctgcacttggcctgtcacggtgcctttgctggtattcttcacccagccaaccactcctattttcctagcttcatcttctgtatacattctgaagcaaacaccctgcactcttccgaacacctcgtagtccacggatttgagtgactgggcggtagacatggcggcggcgagccctctgttgaggagccggagaggggctcggggcgcagcgactgcggcggctgcgagagggaggggacacatgggactgcttggcgcaccccgcgcctgtcaccggtcccggacgctagcgcgccggggtcacgcgtcggaagcggcaaatgagactgcggggcctgggagcgagggcagccggggacgccaggagggaagaggccgctgggccccaggcatcctaggcctctcttcccggactggggaggatgctgtctccacagcgctccctaccatttaattgatcaaggtactctgttctcaaagttagtaaataaaagccggatgctgtgcccaaaaaaagagtggcttcccc

SEQ ID NO: 131200 - DNA, 355 bp, Homo Sapiens
  misc_feature (223)..(238): n is a, c, g, or t
tgagtgaggcttggggaaccccacagtccccattatataaggggcagttattatacctattctatagatgagggaactgagctcaaagaggtgtcatgctagcaagtggcacagctggacctgaaaccacgtagttcagcgacaaaacctgtgctacatttttgttgcatactcacttacctgcagaggccaggcaggtcatgtgaatggatgaagtgggccnnnnnnnnnnnnnnnngggagctagatttcatgttgttccaaagaaggtagccaagcagaccagtgttgctagctagctcttctgactgttcctgggaagccagaaatcctggctttcatgtgaaatctctca

SEQ ID NO: 131201 - DNA, 857 bp, Homo Sapiens
  misc_feature (77)..(97): n is a, c, g, or t
  misc_feature (815)..(815): n is a, c, g, or t
ggtggtaacgacggccagtgccataccgaaattaaccctcactaaagggacaaagcttgcggccgcggctgtaggcnnnnnnnnnnnnnnnnnnnnnaacttctgaaaaatatttattcttgtttgatgaaagcaacgtttctcagcaatgcattttaaaaaatattttagctgtaaattaaaaatggccataatgtacccttggcagacttcagcatataccaaattttaaatttaaatcagcttgaattcagtggggtatacaaatcattttagttgttttagggctttttattgaatagaaaaaatataaacaatgttgtagagtaatgagaaatcctccacactgaaaaaaaactagtagttttaatttttttggaatcatattttctgaggtgtaactggctttcattagatgatcatacttttcctgacatttttacaatgtattctttctttaaatataaaaactgacaagataaatatagtgtttcaacttcttagcctattatttgtgatttttctgttttcctctgacccatcattgattctataaaaaagtgccaggccaagaaacaatagttagagtaattcttcctttaagttctttcagcagtcttgccaagcaagcatgtatcattcctgatgtacttctaccattgacagcaagaagaatatcaccacatctaattcttccatcattgtatgctggtgttccttcaacaatggatttgatgaaaaaaggtttgtttccattgtattcttcataacctcctacaatgcagaagcccagacttccagctgtgtttcttcgntatacaatatctttacagttatacaagcaccgtggtaattcc

SEQ ID NO: 131202 - DNA, 656 bp, Homo Sapiens
  misc_feature (656)..(656): n is a, c, g, or t
tgataaatttttttgtctgttgacaaaaacaaaatcttttttcaaatgtagtgctggtgaaaaggtagggctgagtgattaccttagccacagggtggctgagcaggaactttagaagaaaatcctgagctttcctgtccattcccagcatccagctcctattctagtgcctcttccctgcagggcagggaccccttgggaaatcgaggaggtgggacgggctgggccctgtgtcccaggtttcacagggctcagggttatgctcccgcttgaatctggacgtgaatctggtaaaaatatcaagtacctgtggaactccttgattctataccctcttccttctttctgcaaggcagaggaataatatttttaaaggttattttgttttagttttaaatagcaaaacacaagctgcatttttatttattttgcataagaaaggtaaatctttttacaaaaaaaagtatagagttggaaactctgggaaaacttacggaaatacacaaatgcttctctgtaatgtgcaatatgctttgcaactgtagatgatattttatgtttaatctgtaaataagaaatgtatttaaattaaaagggatctttttgtaaaaggaccaaatgttcttttataaatgtaataaggaatatcttgctcn

SEQ ID NO: 131203 - DNA, 1565 bp, Homo Sapiens
cggtgggggaagcacaagctttattggctgaaagttcttctcaggagcctggtctgctgggactgcatgttcctggatgggctcccccaggcctaagctccaggtttcctctggccttccgaaggattttgtgggttacgaccaattgatcaaagatgactttttcctggcgcttgctcagctgcaaaagcttcatggtgttttgcaacttcttttcttgttcaaacaattttttatgtagtttggtgacctctgccttcatttctccaatctgctcacagtgaagggggcactggccatcctcggggagtgagactctccagagaagcttcagccgcctgtaggcctcttccagggtcagcttggccgtgctcacactgttcacaaacttgctcagtggtgctggttgtggcccctttgttcccagctcttgacttgtggagctgggagcctctttgggtttgaatgtccatttcagcaaggagcctctgtccctggctgatctgtttgagcagggcctcatagtcctcaatcaggcccaggacatggcggccattcttgctggcccacaggtggtggccagtgaccaggcgggacacacacggagtgctagttgccgaactgccactgtcgcaggagagggagtccgtgtcattcccagagagtggaggagtctctgaaactgattttggtgtcactgcctgggagggatcaaacagatcaaatgaattatcactttccatgggatatttgtcaccatcgtgtttgtcaggctgaaggggcacctcagggatggacacggcttggacagccagagtgagggctccttcctgtgccttctctgccccccttgccagctgttccttgagcctgctctgcagagtgctgctggtttcgatgctcctttctagttgcaagcgcagagcctggatctccatcaggaggctgtgcaggtccctgaaaggatcctgccgcttccagccttctccccgacgcctctctcagtctcctgtgctcttcatccagcttctcatacgccttccagctccactcggagagactgcaatagcttgtcattctgtgagagcagctgctgcctcaacttcagctcctcctgcaccctgctcagctcctggccgctgcagcggacctcctggatcagctgctggttgtgtctctccttctcgctgccttctttctgcagcctttcattttcttccttcacgctggcatactcccgctgaaggtgctccaggctcacggtcttcctggagagggactctcgtaatttgtcattctccttctgtttatctctggatcctttaatgagcattgcattgagggcctggttctgcttcctcaagaaatgaatttctgatgttagagaactatgaagctctgaaccagaagcaaaaatgcttgtagaaccttgaacaattcagatccttgccgttccactgtttccgtagcttctcatttgttttaatagattcttctaaacgctttctcaaagttcgaatttcccctcgtgccgaattcaacacccagcctcgctacctaccgta

SEQ ID NO: 131204 - DNA, 897 bp, Homo Sapiens
gatggctcccagcctagctccagttcctccgccttccgaggatttgtggtaccgaccattgatcaagattgactttttcctggccttgctcagcgtcaaaggcttcattgtgtcttgcaatctcttttcttggtccaaccttcttgtatgtactttggtgacctctgccttcatttctccaatctgctcacagtgaaggggcactggccatcctcagggagtgagactctccagagaagcttcatccgcctgtaggccctcttccagggtcagcttgcccgtgctcacactgctcacgaacttgctcagtggtgctgggtgtggaccctttgttcccagctcttgacttgtggagctgggagcctcttgggtttgaatgtccatttcagcaaggagcctctgtccctgtctgatctgtttgagcagggcctcatagtcctcaatcaggcccaggacatggcggccattcttgctggcccacaggtggtggccagtgaccaggcgggacacacacggagtgctagttgccgaactgccactgtcgcaggagagggagtccgtgtcattcccagagagtggaggagtctctgaaacccacactgggcttatgagtcatcttgtaggagaggctcaagtcaactcaaccaacacttatcaaccacccactcggcagaagaccccagattcacaaggatgactcaagctggtgcctgcattccagtagcccacagtctgatcagaacacagacactgcagaaggtgcaacagcagagtgatgaagggccagagccagaaaaaacaattatctgtgcagggagggagagaacagggaaggcttctgagaagccccggccgtaatggccgaattcccgggcatatgtccggtaccgtcgactg

SEQ ID NO: 131205 - DNA, 1263 bp, Homo Sapiens
  misc_feature (1079)..(1090): n is a, c, g, or t
  misc_feature (1092)..(1100): n is a, c, g, or t
cggcagtaactaccacggtcttaaggtagcgaggcctgggtggcgaattcggcacgagggacaccaaaatcagtttcagagactcctccactctctgggaatgacacggactccctctcctgcgacagtggcagttcggcaactagcactccgtgtgtgtcccgcctggtcactggccaccacctgtgggccagcaagaatggccgccatgtcctgggcctgattgaggactatgaggccctgctcaaacagatcagccagggacagaggctccttgctgaaatggacattcaaacccaagaggctcccagctccacaagtcaagagctgggaacaaagggtccacacccagcaccactgagcaagtttgtgagcagtgtgagcacggccaagctgaccctggaagaggcctacaggcggctgaagcttctctggagagtctcactccccgaggatggccagtgcccccttcactgtgagcagattggagaaatgaaggcagaggtcaccaaactacataaaaaattgtttgaacaagaaaagaagttgcaaaacaccatgaagcttttgcagctgagcaagcgccaggaaaaagtcatctttgatcaattggtcgtaacccacaaaatccttcggaaggccagaggaaacctggagcttaggcctgggggagcccatccaggaacatgcagtcccagcagaccaggctcctgagaagaactttcagccaataaagcttgtgcttcccccaccgagctcacgctgtctctttgttccaagtgtggttcctatttattgaggaagaaagagctgtctggccaaaggaaatctattttttcccttcatgttttctctctgaaagttggcttgagagttgttgtcagaaaggtgcaggtgctccacaaacgggtggtaaaaaggcctcgagctcttggatgttgtatttcagatcaggggcaggcaccggagttgaggctgtgcgccttggtgggcttcacgtcttcccctggatttgcttagtactcagccagtgccacagtttgaagattctcattaaatgattcatttcatttcaaaannnnnnnnnnnnannnnnnnnnaaacatgtcggcccggcctcggccctcggagaagcttttctagaaccattcggttttggcgcgccgggccccagtcagggtaagtgaaccatgggtcataagctggtttccctagggagatccctgggccatggactaagtgcttgggaattcctcaccaaat

SEQ ID NO: 131206 - DNA, 875 bp, Homo Sapiens
attcttctcagagcttgtctgctggactgcagttcctgatggctcccccagcctaagctccaggttcctctgcccttccgaaggattttgtgggtacgaccattgatcaagatgacttttgtcctggcgcttgctcagctgcaaagctttcatggtgttttgcacttcttttcttgttccagaccattttttatgtagtttggtgacctctgccttcatttcctccaatctgctcacaagtgaagggggcactggccatcctcggggagtgagactctccagagaagcttcagccgcctgtaggcctcttccagggtcagcttggccgtgctcacactgctcacaaacttgctcagtggtgctgggtgtggaccctttgttcccagctcttgacttgtggagctgggagcctcttgggtttgaatgtccatttcagcaaggagcctctgtcctggctgatctgtttgagcagggcctcatagtcctcaatcaggcccaggacatggcggccattcttgctggcccacaggtggtggccagtgaccaggcgggacacacacggagtgctagttgccgaactgccactgtcgcaggagagggagtccgtgtcattcccagagagtggaggagtctctgaaatcggcagaagaccccagattcacaaggatgactcaagctggtgcctgcattccagtagcccacagtctgatcagaacacagacactgcagaaggtgcaacagcagagtgatgaagggccagagccagaaaaaacaatcctcgtgccgaattcgccacccaggcctcgctaccttagtaccgttatagtactgccgctcgttttaacagcctgcttttacaacttggtagcctctcg

SEQ ID NO: 131207 - DNA, 879 bp, Homo Sapiens
  misc_feature (830)..(830): n is a, c, g, or t
tatttcatagtatatttattagaataagagattagatttgttaaacatctaggttaaaatggttaaaaggattttcatacaattttaggcactatacacgttgtttacaacagcattggtacttggatatggggaaagataaatccgacattttaatatcttgatcaatttgtgacattcaaaataattccatttaagaaacattaatcaaaacttaaagagacataccactaagtatcccacacagtatactgaaaataaatatagaaatacaaccagaagtctacagatcaccacagtagacagactggtgaagccccagctatcatggcagtgaagggctctggctagatttggatgtcaactgctgagttctacatgaaaagcaaataataataataaaataacatgatgtacactctctgatgctcattttcatagcagcaaagcatgcttcacatgcactgcctgtgaaggatctcacaaggctccctcctagagagaaagtatgcccagcaagaataaagtaccaccaaatgtcaaagaatcccgaaaatacaggcagacagccagtcatggagcaggaacagcagtgcaattgtaagaatgactacccacattcaccaaaatttcactgtaattcagcctggcacaggttttgatcatcagcatacacacaaatagccccaagcacaaagccaatccacttaggggaacaataatagtaataagaataaagacagtaatattaaaaatgacaagagtagaatcttggcacatgctgtgttcttcatcctttgtcacaggtgaaatgcacatctgaacagagncaggcatgggaaggaggccccaaaagcgacatggcaaaccaccgggcag

SEQ ID NO: 131208 - DNA, 539 bp, Homo Sapiens
gtggaattaggcagtttttcttcatgttcacacggtttttcaaaagttttcagcggtatagatcgaatcactcggaattcgtcagaggagaaggaggactctgtggacaaaaccaaaggcaccaccttgccatccacagaaacactgagctggagttcagaatattctgaaatgcaacagctatcaacatccaactcttcagatactgaaagcaacagacataaactcagttctggcctacttcccaaactggctatttcaacagagggagagcaagatgaagctgcctcctgccctggagacccccatgaggagccaggaaagccagcccttcctcctgaagagtgtgcccaggaggagcctgaggtcaccaccccagccagcaccatcagcagctccaccctgtcagttggcagtttttcagagcacttggatcagataaatggacgaagcgagtgtgtggacagtacagataattcctcaaagccatccagtgaacccgcttctcacatggctcggcagcgattagaaagcacaga

SEQ ID NO: 131209 - DNA, 737 bp, Homo Sapiens
gagtttttttaaattgcgacattaattaccttttattattgtacactcctacttaattatttggtctttagggttgttcactattatttccttgttattgttatatatttactgttggttcatttattttgagatggatgtcgactgcatgcatcgcatttagctgccagcttgtcatgtctaagatgaacagacagctctcaccttgccatgtctaaggtcgaccagatggctctcgccttgccatatctaaggtggaccagatggcacttgcctagccatgtctaagattgaacagttggttctcacctcatcatatctaaggtcaagttggatctcaccttgccatgtttaagattgaccagatgattctcaccttgccatatctaaggtcgaccagatggctctcaccttgccatgtctaaggtcgatcagatggctctcaccttgccatgtctgaggttgaccagatgggtctcctcttcgagtgagttcaaccagatggctctcaccttgccatgtctaaggttgaccagatggatcttgccttgccatgtctaaggtcaaacagatggctcttctttttccatgtctaaggtcggccagatgactcttgccttgccatgtctaagctcaaccagatggctttcatttttccttgtcttcagtcgaccagatgtctctcaccttggcatgtctaggtcatcagatggtctcacttgcacatctacgatgac

SEQ ID NO: 131210 - DNA, 808 bp, Homo Sapiens
  misc_feature (165)..(182): n is a, c, g, or t
cgtgtttagaataacccaacagtttaattaaaaagcgttgccctgggggctctgtgccagccccacagctgagaggggctcccacgacatgccccccaggcactgggagcagccccttccaaggtccttcccttgtttccccgccccagccctgatccccaattnnnnnnnnnnnnnnnnnngataaaggacaagacggcacaggacgtcagacagttacgggaagagacccaggcatcctgaccccaagaccccatcctgatccttcctgccagtaaggtggcctctcattctccctgcctcaggccccagacctgctctgccctgtggcaggtctgagggcctcactgtgagggtagtatagttctctgaatatagtatgtctagacccacccttcccctcccccaggggactagatgaatatttgacacgcacatctccctcctttcctaggtggcggagggagacccctggcaccatggtagggaggcggggctcccaggcagccttgaggcatctatcgccaagctggccctgggccactggccagccccaagaagctcatgagatgaggaggtctgaggggagctggagcctacatcttgtcccctacccttgcaggggcctccagctcagtgccctccagggtcaggctccacccacccctgccctgcccagctcatctgctcctccccgctgcacctcaggaatagaagtgggaagaaccattgaggatgtgggaagcgacactggtgctgcggctcaagggcccgggcaccgcggcagcaggggggcccacattctcac

SEQ ID NO: 131211 - DNA, 1365 bp, Homo Sapiens
ttcaaggcacataaaaatatttttattttctataaatacattaggaaatgtatttcttcccaacccagtccaccccattaactcaattttttctacataaaaaagatgctaataccaccctcacctgtgactgctaaacagagaaagattgcctggactaggcattatcctcctagttggaaataaaggccctttctgggggcaggaagtgggattttcaggggaccctacagacgtaggcagccaagagtcaaacaaaacaagcatatgcaatagtcataattatgctagtatgacagtatgaattaggtgactcagccaggcacatacaggagttcggagtggggacagtggaagcccacaaaactccatgtttgggccatcagtagacacttggtctgagaaacacagtaaaatgtctgcccgggtagtcacgatcattctagtatgaggtagacaggaagcagagcagggccaggaaatggaaggggccacccaggccctcaggagtccctgacaagggaaggtccctccatgctctctgagggtggcggggctccaaagatcctggccaggagccctttgttggagcgggccttgtcctgggcagttgccaggcgagcccgttcacgtccccctggccgtgctgctttacgggccctcagttcctgctcagtaggacgctgggcaaatgtccaggagccatctgggcgagcagggtccccatcggccgcaagaaagcgttgtccccgttccacactttgaagatagaagtcggtctcacgcttggcttgagcaacctccgctctcaagcgctgcctgcgcacctggcgctcaaaggcgaggtgctcgctgaggtgggaccaggtgaaacggtgcaagtacttgaggttccaaagatcataacggaaggggctgcgcctgcgggcacccataggcgtgttgtgtagactggccgccacgcgcttggctatgcgcttgtcacggaactccacccatccctcggtgtagtccttggtgtaggaccgctttttccctccggcagctgctgctgccttcttcttgcgtctcacgaaccggtcctcagcctgaaagaagacgcgtccgacctcgccataggcgctgagaaggttgcggacgtgcaggggccggaagcgcggcgggatatggcccaggtacacaatacctggcactacccgcttcttgctgccacaggccgcttcttcggattcctcctgctcctcctccgcatctagtgtctgttctgtcccttccagcggctcttgctccgttgcggccttctccgattcctctgcctccatgttgaccctcgtgccgaattcaacacccagcctcgtacctagc

SEQ ID NO: 131212 - DNA, 1134 bp, Homo Sapiens
  misc_feature (60)..(78): n is a, c, g, or t
  misc_feature (181)..(287): n is a, c, g, or t
  misc_feature (836)..(836): n is a, c, g, or t
  misc_feature (839)..(839): n is a, c, g, or t
  misc_feature (842)..(842): n is a, c, g, or t
  misc_feature (904)..(904): n is a, c, g, or t
  misc_feature (908)..(908): n is a, c, g, or t
  misc_feature (912)..(912): n is a, c, g, or t
  misc_feature (934)..(934): n is a, c, g, or t
  misc_feature (937)..(937): n is a, c, g, or t
  misc_feature (939)..(940): n is a, c, g, or t
  misc_feature (1040)..(1040): n is a, c, g, or t
  misc_feature (1064)..(1064): n is a, c, g, or t
  misc_feature (1081)..(1081): n is a, c, g, or t
  misc_feature (1083)..(1083): n is a, c, g, or t
gtgccaagctaaaattaaccctcaactaaagggaataagcttgcggccgcctgctcaggnnnnnnnnnnnnnnnnnnngtaaatcatgactgctttatttgctggactggtgcctctcagcagattcaggggtcgtgcagggctggttaccacaaactcagtaggagtgcaagggctatannnnnnnnnnnnnnnnnnnnnnnnnnnnnnnnnnnnnnnnnnnnnnnnnnnnnnnnnnnnnnnnnnnnnnnnnnnnnnnnnnnnnnnnnnnnnnnnnnnnnnnnnnnagcctcattgtgaggaatgaataagtccacataaaacgcttagcacggggattggcaaagagtaggcactcagtgaatgtcagcctttgtgattgctgcagttcaaagactggctcagtgtctctggaggaattgtctatgaccttgccaagtagatgcatatggacatggaatgaatggtgtctgctgtggttctaactccttatgccactattccagtctgtaagtatgcatgtgtgtgcagggaatatgcctgtgacagtggctgagtgtactctttactgtgaccatgacttgtatgactgtgcatgtatttgaggaagccctggccagacccagagtgcattaggttctcaatatgtgcaactcagtgtgtggccaatcaccacatgctcttccgctcacaccacggtgcctgccagccagggtagcatcgacatttgaactccacagccatctgtgcctgatcttcaagtgagagggcacccgcaggctcaggggcccaccaccaggcgtgagctggatggagaaactggcagggttaagganganganggctttggggtggctggtgcggcggaacagcgggcaatggcggagcaaagggctgactgcanaaanggcncactggtcacgttcaagatganggncnnccatgtatgtcatatactcctttgatggctgacagatacctttggtctgtatttcccactcaccagagacactccactgcccctgggcgcatctccccangtgtgctcactcatcaggtgcacnaatggttggctttcaananatcggaataggcacaccgcaattgtgtcacacacacagcaacgatgctcgc

SEQ ID NO: 131213 - DNA, 1298 bp, Homo Sapiens
tagttgtcagtaattactttattgagcatctgcaaggtgcacatcattgtacatagcttgaaaatgtcaaattgagttttgtcacaccctctgtaaaggcttccctaatttccatggtttcgtggtttttcttcctctgttccaaggaacatgttattagtacctttactgcagcacttacttgtccttcatgtgttacgattgtaccatgtgttctctccactaggttttgaactcctcaaagatgaaatccatgcattgttcatctctgcaaccttgatgtccaaatacgtgtttgacagatgaacgaatgactgaataaatgaaggatggttcactttggttcctcctcccaactccctagtctgcatttagatcgaagtgctgatgctgagtgagaagacaacattcaaaaggcacaatggaaaagagaagtgtccaaaggcatagctgatccacagactagaaaatcagctccgtaatgaggaagaggctaatcccaaggcctcagaacataacagagccacagcaagatctttaagccagagttggggttcataaaccccaacctctacctcaaagcccagcgtagctcattaggaacaggccagcagtccagccacctgctgtggcttcacgtccaatgcagatggttctagagacccacaggcacagccacactagtagctcagggcagtgggtctcagccacctatccttactgatactttttgctttattgtccctttttaggtttcaaaactggccacccaagaataaatagacactaaacaattggatgtgccaacgaacgacattccccaatggttctcaagacgccgtttggcatgctgtgctccttacatggtgctaaggggctcaagctgccgtggatgcccttttcggacctttcagtatgcaaatatgtgctaggagggaattaagtttccatgggatgcagtaagcataatgttgtacatggatggctaattgttttcatcacacatgccaaatccaactgctttgtcagggcctggagtctgtttgatgaatgaggaaatcttgccatggtccagagaggcaactgaataatagcacgaacttcccatgtctgacatctcaggtgtgatgggacatgtgcaacacgttggctcctaatctgctctcagctagccatgaaactaagggctagcctgttgcctcccagggccttgggttccggacgcgtgggtcgacgatatcccgggaattccgaccggtaccacctgcttttttaaccactggttatattcacatgct

SEQ ID NO: 131214 - DNA, 1534 bp, Homo Sapiens
  misc_feature (64)..(72): n is a, c, g, or t
  misc_feature (147)..(246): n is a, c, g, or t
  misc_feature (282)..(358): n is a, c, g, or t
  misc_feature (410)..(514): n is a, c, g, or t
  misc_feature (646)..(675): n is a, c, g, or t
  misc_feature (725)..(1212): n is a, c, g, or t
  misc_feature (1272)..(1272): n is a, c, g, or t
  misc_feature (1306)..(1306): n is a, c, g, or t
cctttcccccccttttaagctttgggggcctcaaattaccctttgggccttggtttttaaattnnnnnnnnntttgattcccccgctcccggttttaattttttcctaaatccttcccccttagcaaaatttttcagccgccagccnnnnnnnnnnnnnnnnnnnnnnnnnnnnnnnnnnnnnnnnnnnnnnnnnnnnnnnnnnnnnnnnnnnnnnnnnnnnnnnnnnnnnnnnnnnnnnnnnnnnaattaggtttctttcccaaaattcccaagttgccgnnnnnnnnnnnnnnnnnnnnnnnnnnnnnnnnnnnnnnnnnnnnnnnnnnnnnnnnnnnnnnnnnnnnnnnnnnnnnccaaaaaactgggttccccttaactttggcccccccggggatttttttgagnnnnnnnnnnnnnnnnnnnnnnnnnnnnnnnnnnnnnnnnnnnnnnnnnnnnnnnnnnnnnnnnnnnnnnnnnnnnnnnnnnnnnnnnnnnnnnnnnnnnnnnnngttaagaaaatttttgtggttttattgtatcatgaggcattgaaacatctgaacaaatcaatgtctgggcggtgaggcagctgctttctccttcacttctttgggttactagagcaacttgtcagtagattnnnnnnnnnnnnnnnnnnnnnnnnnnnnnngcctacagcagcggccgctccaacatcaaaatcctcgtgccgaattcttnnnnnnnnnnnnnnnnnnnnnnnnnnnnnnnnnnnnnnnnnnnnnnnnnnnnnnnnnnnnnnnnnnnnnnnnnnnnnnnnnnnnnnnnnnnnnnnnnnnnnnnnnnnnnnnnnnnnnnnnnnnnnnnnnnnnnnnnnnnnnnnnnnnnnnnnnnnnnnnnnnnnnnnnnnnnnnnnnnnnnnnnnnnnnnnnnnnnnnnnnnnnnnnnnnnnnnnnnnnnnnnnnnnnnnnnnnnnnnnnnnnnnnnnnnnnnnnnnnnnnnnnnnnnnnnnnnnnnnnnnnnnnnnnnnnnnnnnnnnnnnnnnnnnnnnnnnnnnnnnnnnnnnnnnnnnnnnnnnnnnnnnnnnnnnnnnnnnnnnnnnnnnnnnnnnnnnnnnnnnnnnnnnnnnnnnnnnnnnnnnnnnnnnnnnnnnnnnnnnnnnnnnnnnnnnnnnnnnnnnnnnnnnnnnnnnnnnnnnnnnnnnnnnnnnnnnnnnnnnnnnnnnnnngttatctacgctcatttcagaggtggttatttcctacaggactataagtttacaagccgnttccccctgtgacttccttcttgcgctccctganccgaccctgccgcttaccggatactttctgctttctcccttcggaagtctgttttctctcaagtcacctttagtatctaattcgtttagtcttccctcattttttcttctgcctactcctttatccttcccctccttacggttcaactcttatctactgttactctttttcctttgtatatctcggacattttctcaccttcttttgtggctgttgcttatgtcttag

SEQ ID NO: 131215 - DNA, 860 bp, Homo Sapiens
  misc_feature (85)..(106): n is a, c, g, or t
caaaatcaaattttaggccggggaggcaaactccttttacccttccctttctttggggtaattgaggcacttgtccagtaggttnnnnnnnnnnnnnnnnnnnnnngggccaaccttttgcattacttaagtctttccaaggcatgcgctggtacaacacaaacttttcccgtcagatgcaactagtctagcatccaaacatcatgcacaacacctcagtggcagcagcgcactgcgcccactcccaccgcggccctgctcatttgtgcatgatatttggagcatctggaggagtgggaatagtattgggaagaggagggaggaggaaacagcgtgagtgcctagctgagaggaggtcagccaaagttgtgcagggcgagcctgaacatgtcattggtgcaaacccaagcatcgttgatgttctttaataggaacatctggtggaaccccatgatggggtcttcatccgccttaagctggcccacaaccatgctgatgatgcagctatctggagtgggctgatggtcctgcgcggtgatgctgtgctgaattttctggaacggaaggctagacaacttctccacaatggcagctttcccctggaactgttgtccttcccacgtaaggcatgacgcgtcaatgtaaattgcgcctagttgggttctatcattatcaaataactggtagtaatgttgaatgaagctggatccaatctgctcccaaattggcttgtctcccattctggagcgtcacccggcctcacggagacccgaggggctggcacgatggcggcagcggcagcggcaacccagcgcggtctgcggccgactgtcccttcccacctgccttccttcgcccgc

SEQ ID NO: 131216 - DNA, 952 bp, Homo Sapiens
  misc_feature (228)..(228): n is a, c, g, or t
aaaaactaatcaaatctctttaatgtttaagcctatttgtatctgatattttgttacttgcagccaaaagcagcctagctgatacacaatcgtccccctgccccctggtcacccttacagctcaaagatgaactctagagaaatgcaaagccccagttgggagccagccggagactctcctggtctttagctgggaaaataggactgtgggggtgggggcagcatcanatggatcacagactccaagcaaaggcatgataggagtttatttacagacaagacacagcaaccagcacccactcgggctctgaccaggggaggtggtagacaagaccccagatatatataaatatacatataggtcccagcaccatcagcaccagaacgttccccagccaggtccctgccagaaggaccaagagtcaggcaggattgaggacatagaaaggagagggccccagtctttgccaggtatcagtgatcacctgttatggtccccatgtcagaggaagaaactatccttggccttgaagtgtggacactgaggagcatgaggacggagagaccctctggaggcgcccccattcctgtgtccagcctgtgccctcaatgccaaggccacagaagcgaagtgccagcaggagcagcttggggaatggagacactgcaggcccctccaggaccatccaggagccaggcatggagttggggtcctaggccatggctgcccatcacacaggagcctcccccagtttgctggtggcacttgtgactcgcttattctcccggaggtttcggaggcgggcgctgaggctgctgatctcttccacataggcctggggcaccaccccttctcaccatctgccaggcggacccttccagccagccgtcactggtccaggtcctcactgacaggatgtcagtcttctccaaggtcagctcatctgggtgc

SEQ ID NO: 131217 - DNA, 671 bp, Homo Sapiens
  misc_feature (651)..(651): n is a, c, g, or t
ttttgatgcttagaatcatttaatgaatgttccaaacacacccttcactgggctacaggtaaatttcactgggatggaagcagatgaaccacccaatcaaacagtacatgattactcggtttccagaaatctggataccagaaaaactcagtaggaaacatcaggatcacctagccagaggttccttgtgattctttgcttcctcctctcctcttcctcctccctgctaaggaacttctccaggggtacaaatgttcaggatgggagaaggggaagtcaggtcccttatctctagggcaaagaggagtgctgtgacaccacaccccagagacaacaagatgatgtggaggcacaggcctgctcaataaatagttcccagaagtctccacagtgggattaatgggcccagggacgctgaactgcaggagccaccttcccgaggccaggctgtggcctgctcgctacgtgttgcacaccagcacatctgcaaagggtcccaggaggatcttgttgaagatgcagcggacccacaccaggtaggtggtgaagggcttgatgttctcagtgaaggtgtggttctgcagagccaggatgtaaggcacgtaggtgttctccccctgctcctgcagccacacctcgtacttcacctcnctcaccttcaggtatttaag

SEQ ID NO: 131218 - DNA, 1352 bp, Homo Sapiens
  misc_feature (456)..(497): n is a, c, g, or t
  misc_feature (529)..(529): n is a, c, g, or t
  misc_feature (1111)..(1111): n is a, c, g, or t
  misc_feature (1341)..(1341): n is a, c, g, or t
gggaagtcacaaggcattttattccacaggaagaaaaatgatgactctgatatgagaaccagactcaagagtcttcacacactggtgactgtaatagtgtttacataatagagaaccagatatttttagaattttatcaagcagctactatggtattttgaggcccagatcatacttacaaacaaagtggccctggagccttcagaacattgcgatgagcacccaccaagcagtgcgtgagtgctgagacaatcatcaccaccccccagcaagacacacacaaactaaaactcacccagtgccgcaaaagccaagtttccattctgcaatccactaacttggagttcagcaaaggcaaccaagcctcggagttcaagaaagctgatccttgaacactatgtagctacttgtgctaaagctcccttccttcctctctgcatgcacgcgcgcgcgcgnnnnnnnnnnnnnnnnnnnnnnnnnnnnnnnnnnnnnnnnnngaggggaagtgggagaggaaagggaggggaangaagattagcttcatttgtgtcttggaaggatttgggtcatgagttataaacaccaaaaccttccacgcatccactgatccactgagtcatcccagactcagctacatgtgacaaggttgtagaaattgattagctttattaaaataaaaatttaaaaatcacaaggtgactcattcattctaaagtgaggccccttttcccttctccctatctgcttaatccttacagaaaagcgaaacaccaaaaacaagacccagggcgctcataccaggccttgctcccagcaggaatttaaaaccaaggataagagatgcctttgtcaaatcttggttccatgaaaaacttaccaacgcagctttttaatactcctatttcatccccctttctggaactctccctgctcccttctcatcctggggtttccatcctgtgtcccctcgggctgtggagctacgatgcctgcctgtggctttattaaaaagaaaacagtcccggggctttgttcttggttgttgctgcccaggcaggagagcacttttatgtggatttctgatttgttgcaacagttcaatgggactttntttttccttctcaatcaacagagtttaccaatgtttccaacctctctaataataataacctgagaaaacttacaatgctgacttgcacccatgtggtaatggagcacaggtttccccctaagtttggtaagactagttaggaaaaagccaaatggataacttacatcataatttgtaagaatctaagcactcctttgtaaaatgggggtgagaaattaaaagtgggctcncaagccctctc

SEQ ID NO: 131219 - DNA, 1026 bp, Homo Sapiens
  misc_feature (790)..(790): n is a, c, g, or t
  misc_feature (796)..(796): n is a, c, g, or t
  misc_feature (813)..(813): n is a, c, g, or t
  misc_feature (820)..(820): n is a, c, g, or t
  misc_feature (833)..(834): n is a, c, g, or t
  misc_feature (855)..(855): n is a, c, g, or t
  misc_feature (858)..(858): n is a, c, g, or t
  misc_feature (867)..(867): n is a, c, g, or t
ttttttttgggaagtccacaaggcattttattccacaggaagaaaaatgatgactctgatatgagaaccagactcaagagtcttcacacactggtgactgtaatagtgtttacataatagagaaccagatatttttagaattttatcaagcagctactatggtattttgaggcccagatcatacttacaaacaaagtggccctggagccttcagaacattgcgatgagcacccaccaagcagcaagacactcttgggatttggggaaggggccgcttgtctgttttccactgtgtagtgaccaggcccaggggctggggaagcactggcctggctcacccttcagtgagcacagagaagcagcgacagccagggagtgacacgggtcggccaactgtgctgggtcaagggactgggtagctttggatatctccttacccaatttactcttattccatttattttactttcctcagagacgaactgtgtgtttgaagcagaaagaaaagcagtagaaatgatcttaacaaagtcttaggcattgctggctgaatatcagtttacaaagagacggggcatttaaggagccaggggcagggcctgtttcctccaaagctttggatgttttcctggtgagaaccaggaggggatgtcaaatgcccctgaaaccttctggccttgtctggcccagggctgcagggcaggggagagctgagacgtggagcagctcgcagttggccctcccatcttccacccaggcccgccctaggtggtctttgggattcattttncatctngctctccctaggtgcanatgtcanagtgctcctcgtnngcgatttcttggctcgagggncanattcctatntgagtcgtattaatcgtatcatgtatagctgttcctgtgtgaattgttaccgtacattccaacacatagagcgggacataaggtaagctgggtgctatgatgagtatcaattttgcgtggccatgccgttcatcggaactgtctcactgatatgatcga

SEQ ID NO: 131220 - DNA, 936 bp, Homo Sapiens
  misc_feature (779)..(835): n is a, c, g, or t
  misc_feature (854)..(879): n is a, c, g, or t
cttctctaaaactcaattcaaggattgcttttcaagatgctgcagactattctgttgccccactataccatgcatatgctacctaacagcatttgctatactgttctgaattattgacgaattgttctctcatttaatttgaccttgaggacaggaactatgtcttgatgatctttgaggctcctgcttctatcacagtacccaacatatagtagatgttataaatactagttgaaagaatcagtgtaaaatggtagataaaggggctgatactttttttcattaataatcttcaggaaacacatttaagaattatagcaaatgttagttgcctacccaacagccattcttcctttctcttttgttattaaaacccagcttttgttgtagcaatgtatcctatggcatgattcttgatagacctaagtcagtcatgacatccccttcttcttttccagtgatccatatgggttgggcatgatgagtcacagaggaaagatgctgaggcttcagggagaggtcttcttccctgatagagagtcactttctccccttttctccctgctgtgtttactgttttgtaagggatatgaagcatggaactggaggagctgtcctgtgtcagcctgaaataatcaaaaggatcaaaaatcctgttttaggcaacataggaagactccaactccacaaaaaatttaaaaaattagccaggtatggcagcacatgcctgtactcctacctacttgtgaggttggggtgggaggatcacttgagcccannnnnnnnnnnnnnnnnnnnnnnnnnnnnnnnnnnnnnnnnnnnnnnnnnnnnnnnngaatgagaccctgtctctnnnnnnnnnnnnnnnnnnnnnnnnnntccagttttaaagagtttattcaccaacctggacaacatagcaagaccccatctctt

SEQ ID NO: 131221 - DNA, 688 bp, Homo Sapiens
  misc_feature (68)..(84): n is a, c, g, or t
aaactcttaaatagttttatttaggggtattttttttctttcaggctttctgcaaaatgaattttttnnnnnnnnnnnnnnnnngatttcctgttgtttgttctactaggttgaaaatgtgggccagactacttacacatgcggtacatgctgaatataactgaatatatgcttattcctacagacattctgcaagatagggatcacccaaaatagggtcttcaatggactggaccagtgtttcaatgcaaattccagccccccaaaacaacatggttttgatttcacagtatgaattccctggaatccgggaaaaggtaattggttaactgaggtcctccctcagcagctcggtccctcgacattctgagaaatcaggaaggactgcaccacttcttcagtggactgggggctggtgctgacatcttcaagagcatctgtcactgaatattgccgatctcgcaaccggttccagttagacagaacattgtgatattcaaacactttctcgtaatttccaatggagttgtaaagtttaatgagacctcgataatcatattctagtccactgtagccctcaccaaaaagtttcttcccaattgctatagatcgcagataaagtttctcagcattttcatactgattcatgtcataattatataaagaagcagatgtccactgaaagggc

SEQ ID NO: 131222 - DNA, 743 bp, Homo Sapiens
ccatggcttacttttattttttattataaaaacacatacaagagttttaagaaataacgaatataagacaaatcaaaaccatggtgagttattaaacccattttctatatacaaatactaaaattcccaaagtggaatatcatccaatgtgagacacatcatagcacggtccatatgtacacggcacacagagctctgcctgcgctcatctgtgaattgctcattacatgtcactgataaaaaaatctgcaagggaacttctactcttcagttctcctcttcctgatgcattgtcacatatttttaaggaactttagggatatgaagaaaatgcattaaagtgggtttctgctaagggctctgcatgttttgctctgatcaattacgcactacatcttgagaaaaacttttgcaactcatttccagcaaagatagcagaaaactctaggtttttgccaatttattttttcctagtcactcattggaacacaagtccaacaacaacagctcaggaaccaaatcatgtttttatattggtaagttcattataaaatgccactcaattttaagaagccactaaaaggacactttctgcagcaaaaaaagggctaagttcaagtttttggttgtttgacaaagacacaataatataacccatatgtcacagatcacaacagccttaagtgaaacgtattagatttagggaaaaacgactatgcgactgcttgtttctcctgtctccc

SEQ ID NO: 131223 - DNA, 673 bp, Homo Sapiens
tgctttacagaacaaacgtgttctttactgtgaagttcattatgaacctgaatccctgatcatttaaagcctattatccaacttatgcctcaagcagcaacatttttgtgttcaacaatttaacttactacacacaccttgtgcaaaatcacaaaccttctcatacatttatgagcttcagaatgtaactgggaagtgtagcacagccctttgtccctctgcattgcatggtgagaaacggctaaagcaaccatcgccgcattctgttttatgagcacaaaggaacacctattcttatctgggccacgcgccccggtccttaggaggatgccagatccccctgggatggcaatggcagaggctgcacagcttcctgaagatgtaggtaccacagcaccagccccgggcagggagccaggccaagggcaacgacagaatcttccggagacagcacagcaacccactcatttgtgtgcacccgcacccacaaccgtcttgcactgggtgcatgtcacgcccagggtgagggaagttgaggcctggcctcacagtgtggaccggctgcgggacaagaacacagtcaactttggctttgcttggaaagctgcttcagatacataactcccggcccctcctgaaaatgatcgttttcttagccggggccctgtgcttt

SEQ ID NO: 131224 - DNA, 747 bp, Homo Sapiens
  misc_feature (637)..(637): n is a, c, g, or t
  misc_feature (736)..(736): n is a, c, g, or t
gtctgggacagtctttattggagcttggaatgtcatagcaattcgccctcatcagaggcagactgtgagaaagagcagcgatgtggtggacccccagcagggggaaggccgggctacatgagggagccctgcttgcctgcaagcagggcacaggcgcacacgcatacactctcctacatgaacttacactcacacctgcgcactcgctgccggtgggtcagaggacaggtgccttgggctgctcccctcctcatggagaggcctcctccactctgggggatccgctgagctgagacgggagggaaccgcttgaggatcagggacgaaggagctggaagctgcaggcattttgcagttagggagaagggatccaggacaggagggatggccagggactaaccaaagggagctggagaaggccctgcagggccagggaaggggaagaagatgctggagatgggcagaaggggagggagaacagatcacctcctctccttcactcactgcaacctcaccgctggggacagaggcctgggcacagaaagcctggggagcgtcaaggagtcccctgtgtcctaggaaggcactgaaatagggaacagatcctgggagccagagtctcccccaagtaccccanaggggacaggaatcggaatggtgaagcgggaagggtcttacatgctggttgtctggggcaaggagactggggaagcacagattctgcttctcaccccanacggtggggtt

SEQ ID NO: 131225 - DNA, 717 bp, Homo Sapiens
actcaaagcataaaccagacacaatacgttataccagattaacatgcaacttaaaaagaggttaatgtacatactaagcatggaaattcaccagtaaaatcttatttgtcattttacccccactaccttgacattattcttccatttcataatcaacaaggttctacttctggtcacctgataaatgccttgcattcctggagcttgacatttcagtcaattatggacacaagaacaatgttacaagcataaagaaaaaatgcatctacgaaacagctgactgcactgctttcaatggaaaggtccccactccaacctgcccactccctcccttttctcagcacaaacataaatatcccccagtcattcatgaagctgtgttgtcaaaaaggtcctgaagcattatttccctaaacacctaacacatcagcactgaccaaataaaaaccacccaagcactctaaaattctcactttttcaaacattccttgtgtgtaaaattttctaagcatacagagaaacacaagttcacaaaatgataaaaagataagacaaaatttctgcctcttcttgaatgcaaatcttgagtcaaaaccttttattgttttggaaattcaaatacaagaaacctaaggttttcttatttgcttgtcaatatgcatagagcccaattggcagggatggagaggggacgggggaaggtgttatacaaacaga

SEQ ID NO: 131226 - DNA, 978 bp, Homo Sapiens
  misc_feature (731)..(731): n is a, c, g, or t
  misc_feature (772)..(773): n is a, c, g, or t
  misc_feature (811)..(811): n is a, c, g, or t
  misc_feature (860)..(860): n is a, c, g, or t
  misc_feature (910)..(910): n is a, c, g, or t
  misc_feature (919)..(919): n is a, c, g, or t
  misc_feature (928)..(928): n is a, c, g, or t
tttttccaggttgacaggttttattccacccccttccatccccatggccaccccaggcaggaggagacaggtgtgctggagtctggtcactttggggcccggcgtgggcagagcccactgggtttacattctctgtgggcaggtgtggacaccagagggctggggcaggaggagcgtgggagcgagcggccgacccccgtctctggcccggcccctgggtaaacgccgactcagatgcctgaaacagacctgggccgagcaaggaaggctgatggtatttccaaccaagacagaaatacaaagtgaccaaggccagtgacgaggccgatagggctggcgggacgggacgcagtaaaaaagtctcactcacacacacgccacatggacacccccgcacacagggacgtgtcagtaaaaactcaaggccagctgtgaggcctcacacgacactctgccggcccccagagccctccaagtcggacatgccagagccccggccccggccaaagtcaatgaaaatcccttcagaatccgagtccacggactccaggatctggtccaccaggttctccgggctggagcggggcagggagctgcgggtgggatccaagccctgctcagggggctgggtcgtggggtacagtctgctggggcagggccctgagtggggcccggggaggactgaaggtccggtggggcctggccgggcggtcggaaaagcctgaggctanggaggacgtctctccgcacagagtgctgcggtgctggtacnngcggcgcgcgcctccgctcgtgctctgcacgggtcagncaagcgtgtgtactcttggacgcacacagggtcttggcacacgtccccnacgggacggcggaggagcctttctggggagagacaggcactgtcaaccanaggcactgngtcccgccngcttggactgctgtcactgaactggtcctgtgcaggcactcagggaagcc

SEQ ID NO: 131227 - DNA, 1477 bp, Homo Sapiens
ccaggttgacaggttttattccacccccttccatccccatggccaccccaggcaggaggagacaggtgtgctggagtctggtcactttggggcccggcgtgggcagagcatgggggtttacattctctgtgggcaggtgtggggtacagtctgctggggcagggccatgagtggggcgccggggaggacctgaaggtccggttgggccctggcgggcgggtcggagaagccctgaggctcggggcaggacgtcatctccgacacagagtgcctgcggatgctggtgccgccggccgccgcgccctccgcctcgtgctcctgcacggggttcagcagaggcgtgttgtagctcttggagcgcaccacggggtttttggccagcacgtcccccgaaagcgggagcggcggaggaggcgcttttccaggatgcaggaatgggtgaagggcccctgcgctggagtggaggccgtaggtgcccaggtatggcgacaccacttttctggaccagcgtctccaggcgcaggtagtcctcagtcacgcccctggactcatgtaccccctgcagcaccagcagcatctgcacgatggcagggggcacgcgggcatgggcccgggccagcgcatcctctagcttcacactgagggtgatggcattccggaagtgcagcagggccagctggcgcaccgatggctccttgccctgcaccgggtagaagatggcctgcagcatgggcagcacgtcactgaagaagaagtcccaggtctctgccagtgagtccagcagcttctgtccctcatagaagcgaatcttgtcccgaaggatcaccatgccttttgtcagcagctggttctgcaggtactccgtgaagaaggaccccagctctgtcttcaacagctgccggacgccctcgttgaggctgaagagctcctggtcgggcagccccttgcgctggaagacggcgatcaccccgttgtggatgctgttctgggtgccgagaggactcaggaggtgggatgctgccagggtgggcacaggtggaatcccagcccacgggtctcctctgctctgcgaccttggctgaggtctgcaccctcctgggggtgagctctgaaaccctgctcagcactaagcacactggatgcctggccttgggggcagccgaatggcttacacattaggaggcgttcacatggccaaagggcagagggggcccaggagcttgagggcaggcggctcactgggctcccccatgactcagcagaactcaggctgcaggctcgggtgggagctgcccccgactgcaccctatgcagggaagcccagctgctggctgataaatattttatcactgctcacagagcagtccccaggaaggcgcctgcatcctccaagcccaccagagcaccccttcctgcccggacagaaggaactggcccgacgcgtggtcgacgatatcccggaattccggaccgtacc

SEQ ID NO: 131228 - DNA, 2435 bp, Homo Sapiens
ttttttacaaaactaggcctggtttattgccgagaagggagaaccggggccgccgttaggaattaaggccacaggcggccctcgtgctttgacgaaacagcgacttggaagccggggaaccccgccccagactgtgcaaaaagtgctgctgcggccgcagacgccagtgctggccctcagggcggcccctcagccggcgaggggcgggacttccgcccgccaatccctgagggggtaacatcgcccgccaatccctgagctgggcagggtgggccccgctcaccccctgggctgcccaccccggggtgttcccgccgacttctgggcggggcctcccgggccaggcctgccgggggcggggcccgagcagccggactggccaggttcagcgcgcctcagtagggttgtattccgtctctcccgaggacacctgggagatgcgccgcgaggaccgccacagcttccgcgcgaactggctgctgcgcacctcagagggctgccccgcgaccaccacgatgagcttgccatcctccaggcccaccagcacgtggctgcgctccttggtcacggccacgctgcggatggccaccttcatgggcaagggaggcgcggccgggagcagtgtgtttagttggaggatgtgcagggcgcactgggcggtgcccagcaacacaaagtcctctgtcaccgtcagggctgtaggctgctctgccaggggcagtgaagcccgcaacttcccattgactgaatacaggtgcaaggagtaggtgacctgggccccaggacgttcccacgctgagctctgtaccacaatctggccttcggaccccaatgccaggtggaaaataggtccagggaatgtggcacccagaggccgtagtgccgctacaaactgtccgcggcgtacagtgtgtatgatcacagttccatcctcagatccagacacagccatgtcaagttcagtgctgatggccacacagctcactgcagccccatgcccatacaggacctgcacaggctttggtgccaggcctactgacagaccaccctgatgcaggagccgccacaccatgcacgtggtgtcccgggagcctgagatgaggtagatgccacaggtgtccagtgcaaggcaggttactacatcaaggtggcagctgagctggctcaacagcttgccacggggtagtgcagtcacccgcaggctgccatcccagtggccaccgctgaatagcagctttccatccggggccactgccagtgcttgtccactcacaccactgcctggcacccacgggccactcagcagtcgctgcgtcttgtggctgcccatggtggggtctttgctgaagctgaagtagttgcttatgttgcggtcatagggcaaccagctgtgggtgcccagcagcccactggcactcacagtcaccaacaggtctggggaaccctgggtgatgaaggagtggggctgccggtgggggaccagggctagcaccaggggtacaccatcactgacaacctctgcgaagaatgccttgagttcgtccaggtgctggaagatgctaggtgagttagtgtccaggcgtgcaaggcgatgggctgcttcctcagctgagagccgagttggatgtggcttccttcagcagctgacagggagtctgcccaaagttgctgataatgccctccagagccttccgttcccgctcatctgtcacatggtccaggtctacagccccctcataggtgcagtaatagaagacattgagggcctcctcggcggctggcccccgctgcttgtagccaaagatgaggtcgatccactcgtgtaggtgtgcagacacatactccgactccagagcctggcggtgctgctggatgaagtcctcaggagagctggcccacgggggtagcaccacatcgcctaccttctcgttggtcagctggagacagcccaggtcaaaaccgttctggttctccaggaagtcaggaaagtagaagaattccgggatgagctccttcacatcggcagggctctccaggcgtgcctgccaggctgccgccaccgagtggaactgccggtcggagcagtcaaagcggccactttgcagctggacgtgcagggaggtgaagggctccacgcggatgaggtagtgcatcacgcctgctgcattggagtagtgggtgccatagtggaacttgtcaatggtccctgctgggtcctcaaagctttcatacttctccctcacgagctgggcatgcttggggttcaccacaccgatgggcttagacaggtcccggaagacggctgggttgctgaggtccagggttggggacacgtagtcctgcaggacccaggggaactggccacccacccgagcaggggctgcatgagggccctgatggcctaccagcccaccctgccctgcccacaccctcaa

SEQ ID NO: 131229 - DNA, 995 bp, Homo Sapiens
  misc_feature (821)..(821): n is a, c, g, or t
  misc_feature (827)..(827): n is a, c, g, or t
  misc_feature (854)..(854): n is a, c, g, or t
  misc_feature (874)..(874): n is a, c, g, or t
tttgtgagaaaattacaatatttatttacacatttacatatagcacaatgtattggtcaagtactagtaacaggcaattaacaaactaataagaaaatcagcattttaacaatttaaacgcttcatgacagggtaattcatgtccaacatatcaaaaacatatttatagataactttagaaagaaaatacatactttttttgataatcacaagtagcaatgagattttctatattattttcagtctcactttagaaatgttttaattgtctaaatttaatcaattcatcgattaaaggaaagacaataaaatagtaaaattacatgtgtttatatataagtgtgtgtgtttcaaataacaaaacgcaggttgtaaactaaaatcactggaaggcaaattgaagacaaaagtgatgctggtttaagttgtttggttcttcacataaattccagtttccaagttgtgttttacaactctagtaatatccagatagataattcaacctgcaacttttttcttctattcctgtttttctcttgttcacactgtaatttttgtctttttactgatactgattaaataaaataggacttccagtcttaatacgtctcccaggagaagtgaaatgagtttaactaggtattgagtatcattttccattttacttttctatatttatctgatctaaaaacactccaaccatgtagtttttcttccatccttttaagtccttactttcagtaaaagggtaaccggacaatggaaagaccgggccaaatcagggtgaacaaccctagaaacagtatcatattttgatttanatggcncctattattactaactatcagattcanatcgcatggttaagagtttnatgagcaggatgttacgaaagtaactaccatacaatagtcaaaaacagactctgtgccaacatgattcatctctgatggattggcacaaggagcacggatcaacggatactgggacatgtc

SEQ ID NO: 131230 - DNA, 1623 bp, Homo Sapiens
tttaagaagctacagtccactgaaaaggaagtattatggtttttctgagaagaaaagttgctaaatactgcagcaaactcaggcttttcctgagaaaagccacaaacaaaatcatctctgaaattttttaagcaacaacttcctgaagcgtggaatttatggggccagtgagacactaaaatttcacaactctcacatacattatctatctaggactcagtgaagatgttcttcagatttttatttaagttaaattggtaaaatacaaaaagaaaatctggattgagtttcaaatcatcttaaatagcaatcctatgaacaattataactgcaatttcaaacactaagacttaaatatacaacttgatcatacaattatctcaaaacatatgatcaaaaactttggtcaagagcttctttcatgaattcttcaaggacagctatcacatttttggcttcaggcatttcttcatgttccactttaacaatcttcaaaagtatatctccactaccacagttctttaggaacatgtaacatttaaacaaagcataatgattcatttctgcctgtcggataaatctcttcaaattgtttgtgtcttgtatggcctttagtttaaagttctccagtacttgtcggaaaagaaaagggttacctcctttggcaccatttaaaaaagcttgcatccaatcctcacaaaaccggttacttcctgcattgcagaactgaggctgggagctgctgcaatcgatgaccacagacttatgctgctcctctgtcatggccatgcacaaagaagtcatggtgccttcatgaataagtccttgaagactggccacactcagaaacctgttaatgtctctctttgttttttcatctgattctttaacttcaacaggagtgtaactcaaagcagcatgtagcagaaaggtaagcttttcctgaaagagaagaacaaccctttggattgggcatacaacatcctcaaaccagctgctcaggataggattttatgtgactctccaggccccttgcctcacaattcatgttatttttcagcccttgaatgtacttgtccaattcaagcctgaaaagctcaagtcctttttcagaccctcctaaaaaacagaccacatattctgaagggttacgttcagagtctatcgttactgtttcaggaagcagtttttcattttggaaaaggcagtaataacaaccaactcggtaacctggaatttttagctccacagatgcaacattacccagcccttcaaagactgcacctcttgaaagacgcttagcaatgaaactgcgcagctctggctccacttcggatggtagattagtatctgccaaggagaggctgaaatcatcaccagagggagtttctgcatttgtgccacttgggcttccgtcctcactgtcccctcgttgctgtgcctatctgcttccgcgatagctgtaaagacagtagtggctgctggacggcggctcgagtctccgctcctcggctgagcctccctcttcgctgctctctagttccttttcatctccatccatcgactcctgcaaagaggggagcattgcctcggccgattcacccccagcctcatacctagcca

SEQ ID NO: 131231 - DNA, 466 bp, Homo Sapiens
  misc_feature (378)..(413): n is a, c, g, or t
atgattatttctatgcttaactgattttcttctgaaaaaataaatttttatgtagtttcaccaggtgatatggatcggacacaaattgagcttaatccgtacctcacatgtgtattttcaggtgggaaagcagtgccactctccgcttcacagatgccccctgccaagatgtcagtgatgctgccgtcagtgaacctcgaggactgctctcagtctctgagtctcagcacaatgcaggaggacatggagtcttcgggggcagataccttctgaacgggaagagacagccagcacagtgtttatgccactggttttaaagtcattttaccttggcttaaaaccctctctcagactgtttggtttttgagcatattctgnnnnnnnnnnnnnnnnnnnnnnnnnnnnnnnnnnnngcataatttgggtatttaaagtttttaaataaaataagtataagtcataaaaa

SEQ ID NO: 131232 - DNA, 629 bp, Homo Sapiens
  misc_feature (601)..(601): n is a, c, g, or t
cagaatatgctcaaaaaccaaacagtctgagagagggttttaagccaaggtaaaatgactttaaaaccagtggcataaacactgtgctggctgtctcttcccgttcagaaggtatctgcccccgaagactccatgtcctcctgcattgtgctgagactcagagactgagagcagtcctcgaggttcactgacggcagcatcactgacatcttggcagggggcatctgtgaagcggagagtggcactgctttcccaccttgttgctgtgaaggtgcaatatcagatttatttctaacacgtaggtaactttgtgatggtttgtgttcaacttgcttaacatcctgattttgctttagttggtactgggaaaaatcttcagcggctactggtaaattaacatcattttcttgtgctgtcagaagtgttgtgggaagaaccagcttagaatttggctccaactccaattctcccaaactcattggaccatgactagcacatgaatcttcataaatactacctgaaactgtgtcaaattgccgagataatggtttaagatcacattgttgatccaaagactgtgtattagtgacaggtggctgcntatagagagaatgtccctttagaatgtc

SEQ ID NO: 131233 - DNA, 706 bp, Homo Sapiens
  misc_feature (54)..(89): n is a, c, g, or t
tttttatgacttatacttattttatttaaaaactttaaatacccaaattatgcnnnnnnnnnnnnnnnnnnnnnnnnnnnnnnnnnnnncagaatatgctcaaaaaccaaacagtctgagagagggttttaagccaaggtaaaatgactttaaaaccagtggcataaacactgtgctggctgtctcttcccgttcagaaggtatctgcccccgaagactccatgtcctcctgcattgtgctgagactcagagactgagagcagtcctcgaggttcactgacggcagcatcactgacatcttggcagggggcatctgtgaagcggagagtggcactgctttcccacctgaaaatacacatgtgaggtacggattaagctcaatttgtgtccgatccatatcacctggtgaaacttgttgctgtgaaggtgcaatatcagatttatttctaacacgtaggtaactttgtgatggtttgtgttcaacttgcttaacatcctgattttgctttagttggtactgggaaaaatcttcagcggctactggtaaattaacatcattttcttgtgctgtcagaagtgttgtgggaagaacccagcttaaaatttggcttcaactccaattctccaaactcattggaccatgactagcacatgaatcttcataaatactacctgaaactgtggtcaattgccgagattatggttt

SEQ ID NO: 131234 - DNA, 1236 bp, Homo Sapiens
tttaggaattaagcaaccacatttttaatcaataaatatgaacatttgttttttaaccagttactattaggcagaaaaaaacagtcatttatcaagaattcaaaagataacaccatcttgaaaacaaagtgccaaaaatctttgccataaactcttcctcacttatagaactaaaagtaacaaatatttactcaaaataaggcttggaataatctaaaaagttccagatatattttaaagctataacagattttgcacataaagccaaaacagattgttttacacatacatagactatctgacaacccaatgaataaatgattgaatggataaattgttgagcattagtgattacttatgttcacattatgggccaggcttacatccatttcttgttcttctcctgcctcactgtcccttgctcttccaaggtccttggtgaggtggcttccagataggcctgggcagtaaggtgctggtggaagatgtgagggcaggataggtgagaccaaggtattctcttatctgtctcagctcactccatctcagtcagtggctttgttcttgtcatggctccattttccacaatccattggtggtcctaattcccactaggcagcccccaccatggttccagctcctctggatgatcccactactggacacaggaaaccaaacctcttcccattatcctcatagccctgggtgtgggtaacagcttcttgctgtttggcttctcttttatcatctatgtaagtcaatttcctgtattaaactccctctgttgaaacacctagaatggtttctgttttgcagactggatcctgatggatacatatccgaatcattaagctttttctcctctaactcatatgagaacttttgcatgaaaatctgccctaagccaatgaaaaatcattcaaatcacactcaatacccacattctgcaataaagagcagtaaatatccccttggctgtgttttgtcaaacattgggattctttttgccaagtgcaaacatgactctaccactgttaccaccaattgcagtggacacagccatgagctttctccagaagtcacttctgttgcatgtattaagtctattaacaaggtaacagacatacaaagagaaaattaatcttaagagaaagttacacagtcaccaaatgaataacattataaaaaaagtctctgaaaattcagagaacaaaagacagcaccagaaagtttccc

SEQ ID NO: 131235 - DNA, 1228 bp, Homo Sapiens
agttctgggatacatgtgcagaacgtgcaggtttgttacataggtatacatttgccatggcgtttagctgcccttatttactttttttaagatagtaaggctgacttgattggaggaggccatggcagcagctataggagccattgcagtggggtcttgcagtgtgggagagagcttggactcaagtcctttaaagagatttcagaataggataaagaaactgtggctcagagtgatccttagatttgtgtaagttcacataaataacagtcatggaaattgcaatgaaaagctctgtaattccatgtctaattctccctgcctcatagaatgcagcccttctaacttcattatgttctaatcttggaatgtagactacctctcagggttggtgaaaacaaaaaggataagcatgccatgatccttctagaactcaaaacttggattcgtacctgggatttaatgtggtaccattttcaaataaatctccaactagaattatagcttcatttgtttattcgtggcaacaatttctttggttggtgactgaagcaaatttttctgaaaagcccaaatccaccatataccagggatctgcctctcattggtttttgaatatatgtaattttttctaatacaatggctttctcaagtgatctggattgattgaaggtgatagactgagttatatgtttcctgtgagacaacattagagataatattgaaatattaactacattaactatgcagttgtagcaataattaatgaccaacaggaaattaaaataccttgcaaacagtttacagataacaataaaaaggaaattttgtaggcttctgggtaatcattacattattctcatatttataaactgtttttccaaatagatatttttaagaagttaacaaagtactgtgagtatatgtgccaaatcaaatagaacaaaatttttacgatgtttgccctcctcagttctgctccacataggcaattttaaggtcttttgtaagttgaaaatataaatgtccttcatcactgcttctatgggttctttacatctttcactctaacgatatgcaacttatattgcaattttgcaaaaacaaaggaaaaaacgtctaccatgtggctagcgtaagtagctagattctgctatccattctgcatgtagccatctgccttgtgggtataattgcaatgatctacatttctcacattgttagagtt

SEQ ID NO: 131236 - DNA, 1495 bp, Homo Sapiens
  misc_feature (61)..(80): n is a, c, g, or t
  misc_feature (437)..(449): n is a, c, g, or t
  misc_feature (1372)..(1372): n is a, c, g, or t
  misc_feature (1383)..(1384): n is a, c, g, or t
  misc_feature (1392)..(1392): n is a, c, g, or t
  misc_feature (1401)..(1401): n is a, c, g, or t
  misc_feature (1409)..(1409): n is a, c, g, or t
gtgccaagctaaaattaaccctcaactaaagggaataagcttgcggccgcggctgtaggcnnnnnnnnnnnnnnnnnnnnagagcttctccatttttattacacaaaattgttaagttttcagcagtagggcttctcaaaacaccagctgcaggctattacctgaaaaagacaaggcagttatattaggttctcgtgtaaatatgaatatacaatcaagtcaagctcctgacaaattatacatcaaggatgtatatagttcaaagatattgtgctgttacctcccacctccccaaaactccaagaactagcacctgcagagaaaaggagaaatacagaaagagtcctgaagacagattagtagtcaaagcaaagacgccgcagggatttgaaccccgtcctggaaaccaggagtgccaaccaccagcatcttttgcnnnnnnnnnnnnnaagctagaaaaaggccaaaaagcaaaacctgagaaaacaatacgtgttgttttctcaggaaaagaaaaaccttcatgaccctactgaagagcattggagatcagcttccgctaagatgctagcttggccaagtctgttatgttcacctgaaaaagtcttagcagagaatttttgcattcccacccaaaagccctctcagccactcaaatgcctatcttctccagtctacaagttacatgttcccacccagcattacagttcttgaacatgttatttctccacttactggtttaagttggttttagtcactggataagtattataatagagctacttagctgtggttttaatacccttctgttaacaatttgcaggcaaattaatggccttttctaacatagttcaacccaccaaagacctcgacaccatcgttaccttgaaaccgattatggatcatgcccacaaggatccaagctactggctgcatcgaggtgaggggtgaagggtctgtgctagatcaaaaggcacggggtggcgatgtggcagagaagttgcttgtggggagaccttgcttttaacaggcttctggaaaagctagggaaaagtggttgcccgctttccccctttccctccccttcaagcaccgcttgagatttgggctttattattaagagctgctataaaaacagcttgcttaaatgttaagagaagcccaggggtacttcaagcattccttcggatgcttcactccagaaagagggagttgaggcaagtcctcattactaataaaaatcaggtgaggctgacacttctcttgaccttaggatatagcgctttgttgtctctcctgccacaggaaggctccatggttgtcctactttaagccttcggtgcctttagtgaggggtacctgaacaatctanaaagggttagnngcactcanccctcaccnccagcaanaagtttgtccatgcagtactcagataagtgaatcatcatacatgtcatacgatcgcttgagtatacagaagtgtcactcggcgatt

SEQ ID NO: 131237 - DNA, 1225 bp, Homo Sapiens
  misc_feature (1061)..(1072): n is a, c, g, or t
aggggtacttcaagcattccttcggattgcttcactccagaaagagggattgaggcaagtcctcatgactaataaaatcaggtgagctgacacttctcttgaccttaggataatagcgctttgttgtctctcctgccacaggaaggctccatggttgtcctactttaagccttcggtgcctttagtgaggggtacctgaaaaatcttaaaaaaaggcttagcgcccacctcacccctccacccccacgccaacacagtttgctcacatgccagttactccagcataaagctgaaatctattcaatactattgtcccataactgatctgactttgtatgtaaatacagaaaaagcttgttcacctgttttcctcattttgtccactggtgaattcaactggaagctccttctatagtctgaagaataccatctgaaagaactagtggttcccaatccccacatttaaaatggaatgtttggtttatttaaagtaaataggctattttttcttactgggtctggcttctctggcccttcgcatacgtgtgtctgctgagtgttcctgcatgtaagaattaagaccaagggaggggagagagaaacccacacataaacaatgcactaaagatcactgaactgtttaaacatttccacttgccagtttaatttcttgaagactgttgcttgtttggaatgtttcttgtcactgattttaaggttgcatctggaaaagactaaaggcttcagtcccctcccaccaccagaaatgaacaaaaagcattttacctaaaaatacaccagcaaaatgtactcagcttcaatcacaaatacgactgcttaaaactgcagaaatttcctcaacactcagcctttatcactcagctggattttttccttcaacaatcactactccaagcattggggaacacaacttttaatcatactccagtcgtttcacaatgcattctaatagcagcgggatcagaacagtactgcatttacttgccaacagaacagacagacctgaagtcaagacaactgcattctctgtgaagtctgtnnnnnnnnnnnngctacacaagtaagccccaccccctcctcccatccctccaaattccaggaaaaaaattttgagtatgctgataaactcactgcaaggtctcatacactcactagacagaaggaagagccaagcactcatatgcaattcaaaatcctgaatggc

SEQ ID NO: 131238 - DNA, 520 bp, Homo Sapiens
aaccccacaggcaccccctcccttccctatataaggtcaatagtgtaaaacattgcctaccactctaagattgtaagcatttaaagttaacatgcaaactttggaaatgtgaaaaagtattactctaatcactgtcaatttatagacccctgactttctggaaataaaatgtgtaattaccttttactctgatcataatctcccacctgtctaagaggttatttattccttatttagagggcctctattgccatgtgcctggaattattatatgctcatcactttatgaagaataaaatttgtctttcctgccttaaagttacattcgttcttccgctcaaatcctgatctggtccattaaagagtgttcgcagacaaagtttctgaaagattagagaagaatcccccccaagattgccccaacactgaactacagacaaacactattttatttaaataaggagacagctttctaaaagtaaacattctctaataaaaccatacatgttttctcagtcag

SEQ ID NO: 131239 - DNA, 508 bp, Homo Sapiens
ttttttttaagacatattttcattttattgcaacatactgaaattttagttttctgtacaaatcagaatctgcagtccctcccttaccccaaatgcccagctaatccaagagcacaaccagatttttctgattgactttctatctgcgacaggatgctcaagatcaggctctgtagctgacagcagtggcacaggcctctcccagctctgagcagcctctgcaggtgcctggacagctgctggcccctcccctaccttggccagttccaagtgaggaccagtggtgatgtgtggctgcaactgttgtggtcacttaggcaagctcttgtgtctttgatgcaggagtttgagcagcagcaactgaaggcttctattttgtggggcagacatcttagctactgagcaagtgcacagtgagtctcatgtggatatgcctgaatgtccagcgtcagttcatggagctactccctttccctcccaacttttcgttgttgttgagacagggtct

SEQ ID NO: 131240 - DNA, 730 bp, Homo Sapiens
  misc_feature (668)..(668): n is a, c, g, or t
  misc_feature (700)..(700): n is a, c, g, or t
  misc_feature (711)..(711): n is a, c, g, or t
ttttaaattttacattgatttattagaatatgaaaaagattcagtttcttctgtacaggcagcagagtggcagcagctgcggtggcttggtacgtggttgtcgatgtcacccttgcatggtgactcctgcccaaacagcacttgcatggagaggaggatggacagatgggccgaggacccatggcccagtcccctgcaaaaagggacactctgactattgcacaatcctgggggagtgccccagggacaaggggaaggagtgtgtgtgggcaaaggtctctgggggcccaggattctgcccaatccaccagccccaggggacaggggatcctcaggggaggccttcttccccccaccgcctccacaatgggctccacagcaggcagggtgtggtacacacaatggaaaggttccaggggccaaacccagggtgggggaagtaagagcatgccagcaggactggaggtcaggcccaagagctaggcaggtgccaagaggccagcatctgtgaggctggagagactcttgattaggagtgggagttacttctgatgtcacagtcttcgagcaacagttaatagcccagacaggcagagagacgtgggggaggggttggacagacaggcacagatgaggaagggtattctggagtgtgaggagggagttanaggcagagcactgttcagccaggggttttcanaatgttttaanaacaggagcgccctcgtgc

SEQ ID NO: 131241 - DNA, 487 bp, Homo Sapiens
  misc_feature (70)..(79): n is a, c, g, or t
gcaatgtccacatcttcatatttatttccacagtgttaacatggaatagacttagcaaccattgcagagnnnnnnnnnntctctcattggtttatgagttaaatcctgtaacaatgaatttcaaccattcgaagtcttctgctgcttaacatttactgaatcaaaggctgaagtaaatggactctcatctaggtctcagaaatcacacagctggcctcgtgatgtatttacgatgggatttaacttctaatacaaggcaagtttgacagttacagccaatgaagtgcacgactctgtacatggatttcttgacctaacattcaaaaggacatttcatagtactagtttaattctgatctctctctagaaggcagaaaccacatcccacactcctatgcaatttgttattttggtattgtaaagtaaatgaataagaaggggtggaggcataaagaaaatctagtttctggctgggcagggtggttca

SEQ ID NO: 131242 - DNA, 1120 bp, Homo Sapiens
  misc_feature (17)..(17): n is a, c, g, or t
  misc_feature (69)..(69): n is a, c, g, or t
  misc_feature (88)..(88): n is a, c, g, or t
  misc_feature (139)..(139): n is a, c, g, or t
  misc_feature (197)..(197): n is a, c, g, or t
  misc_feature (202)..(363): n is a, c, g, or t
  misc_feature (550)..(559): n is a, c, g, or t
  misc_feature (1030)..(1053): n is a, c, g, or t
ccttgccacatgtttcntgctatccctgatcttgatacgtataccccctgatgactgtacgcttcccanccgacgaccgacgcaggantcatgacgaggagcgagagcgcccatagcaaacccctctcaccggcgtgcncgatcattatgcagctgcacgacagtttccgactggaagcggcagttagcgcacgcanattannnnnnnnnnnnnnnnnnnnnnnnnnnnnnnnnnnnnnnnnnnnnnnnnnnnnnnnnnnnnnnnnnnnnnnnnnnnnnnnnnnnnnnnnnnnnnnnnnnnnnnnnnnnnnnnnnnnnnnnnnnnnnnnnnnnnnnnnnnnnnnnnnnnnnnnnnnnnnnnnnaagaattcggcacgagggcagaaacaaaacgtgatttaaaagctgagctttttatcagaaagcttttttgatgttttaagtgttatgtgacttgttgaactttttaaaaagtgctacttttaaaatcccagatactctgaattttagaaaacaaactaattctgattgtgtcgtgcccaagtacccnnnnnnnnnnaatgaatagggaccaatgccgcattgctttttatatttctttcttttttaatgttgccaaaaccaaaagtagctttgttttcctttgtattttgctactttgcagtatttgtgtgtgtggttttttttccttaatttgaaagggacagcactgtgtatgtttataaactaaatgaagataagatattattttgtataaacattcatctgagaacaatcaaagcagtagccacatggtgctggctcctttgcagcacaaacctggtcattttgatgactgtacaacaggaagacttgaaaaatcacgtggattcatattaccaccgctctcatttcatggagtcttctgatcaaaaaagctcacgtcgtatttcttcttttcctttctcttttctagaaattgggtgtttgtaccagaatggaattttgcttctcggttatcctgtgcttcagatgattataatctaacccnnnnnnnnnnnnnnnnnnnnnnnngcctacagccgcggccgcaagcttatttcctttagtgagggttaattttagcttggcactgcccgtc

SEQ ID NO: 131243 - DNA, 3715 bp, Homo Sapiens
  misc_feature (467)..(477): n is a, c, g, or t
  misc_feature (1004)..(1022): n is a, c, g, or t
cccgtggaggatgtcttctcgctcagcgcattattctcccgcacaaaatgatatgccacacacaatagggttgtgggtttgtgcgatgacgaaatacaccaggcccccaatatttccccccaaaaaggggtgttagtgagaagagaaaagtggtgttttgtatgtgagaaaacagatatcaatggggtggggtagttccccacccgatggttggttttgaaagcggcgcggcgcaaaaaggggagaaaattttgttttttccccccgcgttttgttccccccgggggcgaatatattttatattccacacaaggcgcgccaaaggggggttggagaaaccgcaccggcggggatttcgaggggtctcaccacgcagccattgtgtgagaggggtttccccactttgcggccgaaaaatgttttaaaggaaatttttccacccctttcctcccaataaggggcccacnnnnnnnnnnncgcttaaatttagtattaaagggcttcgcctgggggccccccgtgggaagaatcccccggaaagggccccaccagaaccccctctggggattttttttaagaaaacctcgtgtttgccccccggggggggtttttttatttggtggggaataccaacgtccttgtgtcttggcccaggttcttctttggagaacagttttgggcccagtttccgcttcccttttgggggccgcgggcgccaaaaaaaattgttttaagaaaatttttttgaggggggagggggcgccacaaaagaattcttattttgaggatcgcgctacgtggttgttcgggtgggtcgcggtgtgattcggaggcgtccgccgagtgatgacgggtctgctttgttgtcttggtgtttgtttttttgtaatcaatgatttttatctctgaaaatggaagcaagtgttttgacagaacactatggccactctataagagccgacctaggagtaattcactgtcctcttctgggatgtcatggcttnnnnnnnnnnnnnnnnnnngacaaaacaggaaaataatccacaatgctttgggcgcctactctgagcttggctgggcatccattcattaaataagtcataagctacaaactaagatcagggtaactttcccttgccctcctgcttctctttgaaccacatgccctacggtgtttcaccaccatcaacaactttacttcattaattcgatatcagaaccttaaaacactactgaatcttagacaaaaggtcctcagcagattacattgataaagaaacaaatacagatttgaatataagtcattgccattattgttttctttacatctcatgatccacttcaatattaaacacatacatacacacacacaaaaccacatcaaacattcagatgccctgaaattgtggagacagcactcccagtattggctggataagaacatggtcctttttctacacggacattactccaagttcggctgtcaccacactctgccctcaccctggctccctgcatacagacgtttccagccagtcccatgcccacaccagcacgagcatgtgcaagaattcccttcgtggtcccaatggcactacacatttcacgttcaatcacagacagcccttccaaaacagaggctccttaaatcttgtttcccaagcatgcactattagaaactggaaacggggcaaagttccagctaaccgaggaatgaacaggtgaccagagctcagtctctggccccctccgagtccggggagcctctgtgctttgacgcagccttggtgagagatggagaggcagggcaggttagttgtgcggagggacatgtttgtatgcattaaagctacagcagaggtctgtgctcctgtttctgcttcactctctatcattctcctcagtctcaatactcattcaatcgcaccctctggccttgtcttagcttaatgtggttagagctaaaaggcaggaaggaaagaaggaatggctgggggagccctgagagaggtcgcagcacatgtgaggaagagggtagagcaggagctttgttggtggaaggagagccacttcctcctccaacacagcatggggacagcacagggaaacaggatcacccagggcaatacccctctccacatgcccacatttttagtccccaccactgtactcaagagctgggcaagctgctgaaaagggcaagaaggaccactcagcagtacacgtcttcctgtcctgggcacccttgtcaagtattgcccaaaacctgaaacatgctgtttaaagtgatgaatgcaatatgatcctaaggtgtgtaacaaactgcagaaacacatgctagtttgggttagcttctaatcatctgaagcacaggataaccgagaagcaaattccattctggtacaaacacccaatttctagaaaagagaaaggaaaagaagaaatacgacgtgagcttttttgatcagaagactccatgaaatgagagcggtggtaatatgaatccacgtgatttttcaagtcttcctgttgtacagtcatcaaaatgaccaggtttgtgctgcaaaggagccagcaccatgtggctactgctttgagttgttctcagatgaatgtttatacaaaataatatcttatcttcatttagtttataaacatacacagtgctgtccctttcaaattaaggaaataaaagaccacacacacaaatactgcaaagtagcacaatacaagaggaaaacaaagctacttttggttttggcaacattaaaaaagaaagaaatataaaaagcaatgtggcattggtccctattcattacaagaccagggtacttgggcacgacacaatcagaattagtttgttttctaaaattcagagtatctgggattttaaaagtagcactttttaaaaagttcaacaagtcacataacacttaaaacatcaaaaaagctttctgataaaaagctcagcttttaaatcacgttttgtttctgcaaatttgggagacaaattgagttcttactggaatgtggcctatcgctggttgacaaatctgaaatggaatgtctccaaatggcagtgcctccctttccgccctccctaggaccacaccaataaccagctcccaagcacaagttcttgctcccattttttctgtaggggtgggggtgggaccttcaggctgctatctttgccatctgctgttctaacttggaaatacgctcatcttgattgcagattgtgtcttttatagatttgatctcttttaaaatctcatccaacttggcttcattttgcacactggccgtgtctgtggttttcttggggatgctgatcaggtcgcacttcttgtttgcagtgggcttgctatccagaatgttcttcttgaccaccttgagatccctgtttttgcctggaatgtacccgtgcttcaaggagatgaggattgggtctgcattcttgccttcgaaccactcttctgcctccagcgcggcctctggccccgctgtgtcaggatacaggtcatcttggaaaaggtcagacttcctgggaacagtcataataataggttcacactttctctcatgaagtttgaagaatctggcaatctcacatttgttaacatcaagtcccctcttgggcatgtaacccatccctctctgaggctccggacgcggggtcgacgatatcccgggaattccggaccggtaccag

SEQ ID NO: 131244 - DNA, 1191 bp, Homo Sapiens
  misc_feature (957)..(958): n is a, c, g, or t
  misc_feature (966)..(967): n is a, c, g, or t
  misc_feature (976)..(976): n is a, c, g, or t
  misc_feature (979)..(979): n is a, c, g, or t
  misc_feature (1009)..(1108): n is a, c, g, or t
  misc_feature (1145)..(1145): n is a, c, g, or t
tttttaaaattaaattattttattttcttaaagtaggaaaaatcaaaatgcatacaatgtttaaatagttgatccaaaggcaggtgtattcatcttaagaacatttcaataaaacacataaaatttaaagaacaaatcatgttattaaaatagtctgtgcaatgtttgtacaaataacatttttattaatacaagtatacatataatctagataagggctgtaatgtttcctaatattaattactgtacttaaaaatttacaggacatgaacataaataaagctgtttaaaactggcaaacgtagtaatagtctgtcattcagtacaaggtatatttatgttatttccaaagccatcaccctaaaatcctaagttgccactcttaaaacctaaaaataatgtcgaaaactaaagtcataaatacatgtatacatacatttgcatatttacacttatgcagaaatcatcaatatactagagcccagctttaacactgtccttcagtttcacactgcaggaccatctgtcacatttaagaaaggtccttctgttactttcagttaaaaaaacaaaacagaacaactttggtcaagtcccagatgcatttgccttatattacattctgtgttgctgcaagactctagtctacagagatccatatataagtactcatttggtttgaaaatgcattttaccatgaactgcaaaacttaaaagagaccacaatcttttagattattttttatgatgacatctgttacagcatcaaaaacaaactgcacattcttagtatctgtggcacatgtgaagtgggtgtatatttcctttgtgtcctttcttttattgaggtcttcaaactgacattgaatatatgcagctgcctcttcatatgtgtttgatcctgcatattctggatagcatatagtgagagggctctttttgattttttccctcgtnngcgattcnntggctcganggncaaatttcctatagtgagtcggtataaatnnnnnnnnnnnnnnnnnnnnnnnnnnnnnnnnnnnnnnnnnnnnnnnnnnnnnnnnnnnnnnnnnnnnnnnnnnnnnnnnnnnnnnnnnnnnnnnnnnnntgatgagctactcacatattgcgtgcgccactgcgcntcagtcggaactgtctgcagtgcatatgatctgcaccgcgggaagg

SEQ ID NO: 131245 - DNA, 1273 bp, Homo Sapiens
catggtacacgcactggcttgtttattagaaaaagtcttagagactcagtaaggcacgaagtccaggaagggggcagggtcccctgggggacgtgaccaggaacaccagggcttcagtgccggatgccccactgtggtgggagttccccgctctctccagcagccccgctcccgtggagcctgaggacaagggagccctttcatccgagatgctgagtatgggcaacagggaggaggggaaggaagaggcagctccaccgtgtgggtgtggcggggggatggggctctgcaggagcctgatgctcctcggaccctgaaggcactacgactagaaggcccggctcaggggcaggtcctggagctggggcaggggtgggggctcagcctggctgattggtgtggggagggggcaggttggctgtcaccgagccgagaggcaccaggtggcaggaggcaccagatggcaggctgtgaggctgcctcagctgaagtcgcggttgcgcaggaggagtggggctaccagggtccacaggtagaggagcagccctgcccagctggcacagatcttcacccacacggcggtccacgtgctgatcatcttccgggtctcaccgggcttgtaccagttggtgagcgtcatcatgacgtgcagtgaggccagcaccaggcagaagtggaagaaggagtagctgtaggtgacgccgtcctgctcgttgtcaaaggcccggccctcacaggctgccacctgctgctgctgctgctgtgtggcgtctagcataggtgggcactcctcggtctgcatcaggctgttcacctgccggtggtctgaggagcgcagactgatgaagagggtgcacaggaggaagatgatgaggcccacaatgctcggggcatcccaccactgggtctcatagccctcggggcctgccacaactgtctcgttgcccagctgggttggcaaatgggggttgcatttctgttcagggatactggatagggctgaccaggtgacaaacatggtgtagagggtgatgaccgaggcctgcagcagacccgagttgggctgggcgtcctggaccttgggcaggacagcagcgatggacacgcagacacagaaggtgaggttgaggctgatgaagaccttgccctcgtggcagccgctgggctcagtgtagtacatgaacatcagcgccacggccgcgatcgacagcaagtagaagaggagagtgaagaagaagaggcctgcgtaccaggcacgggaatcgcactcctc

SEQ ID NO: 131246 - DNA, 736 bp, Homo Sapiens
ccaggagtgcgcaaagtcgatgagcagcaccagctggatgaggatgaagaggaaggagcccacgacgccgaagtagaaccagatgttggtgaaggagccgtcagggatgtagaaggcacccacggtgaggcccaccaggatcaggaacttaaagaaccaaaacccattctggatggcagcccgggggtcccggctgctgctcacgcagagcatgagcagggtgaaaaagaagaagaaggccgccgtggcgaagcacatgcggtagacagcgcggtagccaagcagggagccacagtcgatgtggccctgcaggacggtggggatcccggccccctcctcacacacccagggcagcttgtagagctgactctccacgcccgggctcagcataatgatggacaccagcacccccaggaagaggaagaacgtgaagatgaggcggctcacggtggagttgcggctggcggggcagcagctgcacaggatgcagggggcagagccgcagaggcaggacgctgtgtggctgggtccgggtgactcctcctctctcagcctcatgcttctcatctgtaaaataaagataagtttttttaccccagctatctgaggggactactgaggagatgaagtgaggacatggataaagagcttcatttcttggtgtcctggccagcccatcagcctttactcccagatttgaacctcctgcatggggccagagtagctctgtctcttc

SEQ ID NO: 131247 - DNA, 1017 bp, Homo Sapiens
cccaagcttggggtttggccaaaattgggggttgccaattttctgtttcaggggataccgggataggggctgaaccagggggccaaaccatggttgtagaggggtgatgaccggagggcttgcaggcagacccggagttggggctgggcgtccctggaccttgggcaggacagcagcgatggacacgcagacccagaaggtgaggttgaggctgatgaagacctttgccctcgtggcagccgctgggctcagtgtagtacatgaacatcagcgccacggccgcgatcgacagcaagtagaagaggagagtgaagaagaagaggcctgcgtaccaggcacgggaatcgcactcctcggccttgcccagccaccgctggttccaggagtgcgcaaagtcgatgagcagcaccagctggatgaggatgaagaggaaggagcccacgacgccgaagtagaaccagatgttggtgaaggagccgtcaggaatgtagaaggcacccacggtgaggcccaccaggatcaggaacttaaagaaccaaaacccattctggatggcagcccgggggtcccggctgctgctcacgcagagcatgagcagggtgaaaaagaagaagaaggccgccgtggcgaagcacatgcggtagacagcgcggtagccaagcagggagccacagtcgatgtggccctgcaggacggtggggatcccggccccctcctcacacacccagggcagcttgtagagctgactctccacgcccgggctcagcataatgatggacaccagcacccccaggaagaggaagaacgtgaagatgaggcggctcacggtggagttgcggctggcggggcagcagctgcacaggatgcagggggcagagccgcagaggcaggacgcgcagctgagcagggagcaggctcccaggcaggcccccatggcggcggctcccggcttcgggcgcccggcgccgggcgcggggcgccctcgtgccgaattcgccacccaggcctcgctacctt

SEQ ID NO: 131248 - DNA, 1432 bp, Homo Sapiens
  misc_feature (142)..(142): n is a, c, g, or t
cccccagattggcaggcttgtaaggcttccttcagctgaagttcgcgggttgcgccaggagggagtgggggttaccagggtcccccaggtagagggggcaggccttgcccagcttgggcacagatttttcacccaccccggncggtcccacgtgctgatcatcttcccgggtcttcaccgggcttgtaccagttggtgagcgtcatcatgacgtgcagtgaggccagcaccaggcagaagtggaagaaggagtagctgtaggtgacgccgtcctgctcgttgtcaaaggcccggccctcacaggctgccacctgctgctgctgctgctgtgtggcgtctagcataggtgggcactcctcggtctgcatcaggctgttcacctgccggtggtctgaggagcgcagactgatgaagagggtgcacaggaggaagatgatgaggcccacaatgctcggggcatcccaccactgggtctcatagccctcggggcctgccacaactgtctcgttgcccagctgggttggcaaatgggggttgcatttctgttcagggatactggatagggctgaccaggtgacaaacatggtgtagagggtgatgaccgaggcctgcagcagacccgagttgggctgggcgtcctggaccttgggcaggacagcagcgatggacacgcagacacagaaggtgaggttgaggctgatgaagaccttgccctcgtggcagccgctgggctcagtgtagtacatgaacatcagcgccacggccgcgatcgacagcaagtagaagaggagagtgaagaagaagaggcctgcgtaccaggcacgggaatcgcactcctcggccttgcccagccaccgctggttccaggagtgcgcaaagtcgatgagcagcaccagctggatgaggatgaagaggaaggagcccacgacgccgaagtagaaccagatgttggtgaaggagccgtcagggatgtagaaggcacccacggtgaggcccaccaggatcaggaacttaaagaaccaaaacccattctggatggcagcccgggggtcccggctgctgctcacgcagagcatgagcagggtgaaaaagaagaagaaggccgccgtggcgaagcacatgcggtagacagcgcggtagccaagcagggagccacagtcgatgtggccctgcaggacggtggggatcccggccccctcctcacacacccagggcagcttgtagagctgactctccacgcccgggctcagcataatgatggacaccagcacccccaggaagaggaagaacgtgaagatgaggcggctcacggtggagttgcggctggcggggcagcagctgcacaggatgcagggggcagagccgcagaggcaggacgcgcagctgagcagggagcaggctcccaggcaggcccccatggcggcggctcgcg

SEQ ID NO: 131249 - DNA, 827 bp, Homo Sapiens
ggggaagcaggctcaatcccccactgaggacttgtgtctgcacccctatctggcaccccactttcctggcctaggcccaagggacacagcaggagaagcagtgtgataggagagagctagggtaaattcatctttacacagcgccggatggatgaaatcttggctcacataaaagacagactcagggaggattttatgacaaaagtccctcctttgagggcaggattcccccaggaatcctggacactttagtgagaactggaccagcccttggcacaaaaccctgcctgccctgtcccccactcccaccccctgtgtgcaaaatggggctagtccaggctcttcccacctcactgggacaattgcaagggtcataggagaggtgggtatgataggtggtcatatgaggtggtgagtatgagaggtgggtgcctcacaaactcggggtatggtcctgacctgcatggcagatgagcagagcacttgggaacgagcataggaagtgccatcttcccgggcatctctgctcagtgttaaggtctagccacagacactgtgggacctgcctcttcctatggaatgggggcctgcatgggttgtgtcctggggcaggagtgagggatggctgggaagaatctccaggtctgtggcccttgtgttgagtgattattttgtgacactctcattcctggaccacctgccaggtttatctgttatacctgtggcattcttattatgtcagacaagttattatagttcattcaactctaacaaatgaacaaaagaacaataaataggaggccattaaaggtcttttgtggcagagg

SEQ ID NO: 131250 - DNA, 377 bp, Homo Sapiens
cagagctgatgaaatgctggagcaatgcatggcaaacatatgccctccagtgtcttctgaaacctttggggctgacacaagatcctttagtgtttgggatgacctctttcctgcagacttcttccccaccagtcttcatcgcttgccctgcttctcacttaggcaggagtgagggatggctgggaagaatctccaggtctgtggcccttgtgttgagtgattattttgtgacactctcattcctggaccacctgccaggtttatctgttatacctgtggcattcttattatgtcagacaagttattatagttcattcaactctaacaaatgaacaaaagaacaataaataggaggccattaaaggtcttttgtggct

SEQ ID NO: 131251 - DNA, 1287 bp, Homo Sapiens
  misc_feature (81)..(81): n is a, c, g, or t
aattcacatttattttttaaataaatactctgctcttcactttcagactggagggtgaagctggacagtcgggcgggaggnccccccccgcccgataggcagcattgagagctctgcggccccaaaacactcccctcaacgatgcctgaaatgcctcctgcacggctgctccttctggcctgacagctgcgcttggctgctgacgacaaaaattccctaactgcagtgtcagagttgggggcagggcccagagtgactccctgggctcctggctgacccccactgaccacagctccctgccagcggccggccccccctcgagccagagagaactagacgcaggtgatcagcacagccatggcactgggcaccttgatctcctcgaagagcacgcggccccgaggggcctccgcacccgccgccccggccgcagctctcagcaggtcttgagtgtgctgcaagagatgctggttccgccggcggcccagtcggcgcagcgccagaatggccagtatgtggtcccgcctgatgtcggggtagctccggataagagtctccaggtgccgctggatgtcatctttgtaggtctcgcccaggatctcagccacgcactggatggcttggtccaaccatgtggcctcggaacccaggccctggaaggtgtcgctgatggcctgggcatccaggctcatcttctgggagccatgcatgcgctccatgccccggaaccgctcccgtggcctcagcgcccgcgccaggtactcgcggaccacgaaccggtgcacctcctgcagagtctccctgtgcccgcggccgggccacacgctggagatgaccggcgaaggtcaccaccttgtccatgaggggatgcagccagtcctgcgtcagccagtccctggtgcacacaaccctgaagagcggctgcaactcacgctgcaagccctgaagcaagtgcttctggaagctgcaggtggccgtcaccaggggcttctccagctcctcttgggttcctgggaacctggagagaagactggtcctgagctcctcgcaggcgttgatgtaggcgcccaggtgcggctcgctcaccgcctccgacgccagaaaagccttttcaaacctgggcacgaagaggccgagcgcccgcgtgcagattcgcagggtggtggcctccagctccgcggagatggcgccggccgccttcacgtgctcggccacgagcatatggacgtccatggacagcggcgcctggtagaggccctgcagcacatcggggccctcggcggccgc

SEQ ID NO: 131252 - DNA, 1353 bp, Homo Sapiens
ttttttttaaagtttatagaaattctttattattagacaaaaatagactctcttttttcccctattcatgtgatcctactctgaatctctgctcagaggaggcagtgactcgctccccacccctctcccatccctgccgtgctggcacctgcagctgggtggaactggcaggggctgatcccctggagggctgacgttctcctgcaggtggggctgcctgatctccttcggggctcaactgctgatgcctcctcacccctcacacacccatctctgccatctgctcacatgcaaggtcatcttgtgggcctgtccacttaacttagcaggctgggggcggggaaggagagcagtgtcccaggcctgatgcccactcctcattcctaagggagggtgctttctcctgggtctcctgggtccaggccaggggatgtgagggctgtggggtgctgggaggggggcagtgttgatgtgggctctgagcttgtggccttccttcattttctctggcccagtagaactttggtgatgaaggtgacaatggcgccagcaggctgatctgggtcaagctctgcaaagaggtgacacacattctcccaggggcttcccggcttcttggccacgaaaccaaagatcttggaggtggtcccgtctgggttggtccatctccggtcttgagggtcagtgctggagaaggtgatgctgttcactggataatggcggcgaaagaagagcttcctttggttgtccgtcagtgtaatgccctgggctgacaccttgaagtggacaacagctggtgtcgggcgggggctacagctcagagctgcagagctggcccgggccacagcttgggggcccgtcagtgactctgtctccactgaggtcaagtagagcacgctgcaggcagcaccctgacgcaggaggtctgccgctgtgctcatgttggtgggcactggagcctctggggtctcttccagaggatctttgctgggaatgcgcaggcagcagggcagggagatgggggagatggagtgctgggagaccaaggcggacaggctgccaaagtagggctcactggggcagcccttgatcttcacccctttgggcccagtctcgatgaggaaatggcggaccagctgttccacggggtcccctttccagggctgggcactgggtggcggtgtggccaccttgagggccagcccataagctccttggaatgaatgactgtccctgatcaggaaggccccagggtccttgtccttcagcagggcaatggcttggtcacgggacaggtgtggcttgtaccagaacttggatgtatcctggacaaacttgacattgctttggctc

SEQ ID NO: 131253 - DNA, 1798 bp, Homo Sapiens
tatttaattatatcaacttagggcccgccaaagtactaagtagcgaggcctgggtggcgatttcggcacgaggggagtgctgggagaccaaggcggacaggctgccaaagtagggctcactggggcagcccttgatcttcacccctttgggcccagtctcgatgaggaaatggcggaccagctgttccacggggtcccctttccagggctgggcactgggtggcggtgtggccaccttgagggccagcccataagctccttggaatgaatgactgtccctgatcaggaaggccccagggtccttgtccttcagcagggcaatggcttggtcacgggacaggtgtggcttgtaccagaacttggatgtatcctggacaaacttgacattgctttggctctcttgtgtaggaggctctggggtttgggggacattatctgagagcagaggtgcgaaggtgacatggtgactgatgcctctggctggcgatgatgcctgctctgggccccagggtcctggctgttgccccggcccgggcaggtggcgtttctcaggaagtgggggctggctaaggccattggtgtcataggaggcagccagggggaaagcaggtgtaggtgagctctgaggcggctctgggctggccacaagccagggcatcctgggaaggcacaggagtgaggggagacccatctgggctgtcgggggggcctcgagggccttgccagggggcgtggcggaggccaggaagtgtggtgggcacagggctccgaggactggcgccatctgagtggcccccttggactcctttcctgaggccagtcactgggcgagctgggagggaaggtcggagagactgggctaggggccagaggctcaggcccacttcccgacggcagctcaggggcctttccggtgcctgcctgggaaacagggggcaaggcctcgccaggactcagtctctgagtgggcgctgaggtgggggacctggtgtcctgtcgccgggtgctttccttgccctggactggactgctggtgtgcaggggcgtggagggaccagacaactctgacgaagcactgcatggggcatctcggggagaccgaggcagtgtgctgtgcccactggggccctccctccaggacaccggctccagcgactctgcagatgccaaaggtcctgctgaggccaggtgcccaggcaatgggtacctgtcccctccctcctccgtagggatctcgtagctcagcttcctagattgtggatagggcgggctgcccggggaaatggagccagcccgtggggagtgggcaccagggctgggataccctctgccctctcctggagagccacagctatgaggcacacggccatatgctgggcagtaactgggaactgctcctccatagctgtatgtcaccagggcagggtaccctggatgcccatacctgccttcggggcacatggtgtaggagcagccctcgtgcccttcctcgcctgccttgggtggcttcaggcagctgtagtcaggcatcggggcatggtgatgcccacaggcaggcaagagcagaggcagcgggtgcccaggccgcactgggtgcaggagaggcttgccagcctcacttgcccacccttctccagcctccctctccagccgcagtccatacaaggctgctgtaggcagcgccagcttctcctcgcaggctgggcatgggtatagggcaggcagcccagggtcctccaggatgaccacctcccggtagccctcgtgccgaattcggcgcgccgtcgacttcatactc

SEQ ID NO: 131254 - DNA, 665 bp, Homo Sapiens
tttttcattcaacaagtctttattgagcacctactctgtgcccagcactgcactaggtgccatgagaatacaagagtagtataagatgttatccgccctccaggagcttacaaaactagaggcagaaataagatgtacatgtgactcaggcagcatgtgacacacacaaagtgggcagctctgagacaatggtggtcaagtgaccactgaggcccagagccgttggaacagtctcttagaacagggtggaggacttaaaacttggatgaacaggggctggcagagcacttggaatgggtaaggacaagactgggagatcaatttggctggagcaggggagcttgtgttaaactgtgatgatgaggggcacctggacagaggttgggtccgtgggcaatgagaagacatgttactccctctcttgacatgaagacctggtgggcttgtggcctcctgctgccttcctttccctgtcttcccatctccactctctcctaggaaagtggaacctggatgctggtagggccagagacagaggcttaacaccctgctggggaacctggtcagaactcccgaggcaggagaggttctgctccactggatgtttgtcttggtgtttttggatgtgctgatcaagagcaagatgttctggattccgtactccc

SEQ ID NO: 131255 - DNA, 1037 bp, Homo Sapiens
ttgatctattcatttattttactttctaaggaattgatagaaatataaatgtacatatacctaaaaagtggctatcctacatatgacagcccagaatttactaactccataggttttctggatatttcaagcacacattaaaacaattacagagaggacatacatttatgatttatgcaaattaaggcacatcaattacaatctatttttttaagttagtcagtttaaaaatcttcacttacaaaaattcaaaatatgtccaagctcaactttttagtaggaatgttagtttgttgggtttggccattttcttttttcaccttaaaggtcaaacatgaaacaatgaggaatgtaggtctttgtaaaacacataaatacctgtgatgttttgaatcatttggcccttaaaaatattgcttaacaagttaaacccagcttaattgtaggtaaatgcaagtatacccaaggctggactattttagtctgcttttggctgcagattgtacttctgtggctggaaaaaatgttcttcaatagcactgaccagttcattcagttccttcttcagctgctcaggatcactgttcccaggtggggcacacagctctgcatagtacttgattttgggctctgtcccactggtgcgcatggtggccacgcctccattagcaaaggtgaaggtgatcatttggctgcttttactagtgggaagaacagcttttttatcaggttggctatcatcatagccagttgtaaggtccctaatggcagaaatttcaaatttgccacaagcttttggataattattttttccatcgtagtttctgaggttttcaaataatttcttaatggtttcttgatcatggcagataaaataggaagctttagtaatatggtagccatactccacataaatggcctttagttgctgagacaaagacaaattcttggttgctaggaagctagccaactctgcacttatgacagcggcactgactccatctttgtccagaacaaaagggcagcacatgtatcca

SEQ ID NO: 131256 - DNA, 884 bp, Homo Sapiens
ggacagtttaactctttattctccttcacagcccagcagaccccaaggcgggcagagggtgcaggccgtccccaggatgctggtcatgggccagggtcatccttgcacctgcggcagtaggggcagcagccatgctgaagcaccagcaactcatagtcctcagaatggaacatctggaagcaggaggggcacatggtaatggaggcgtcaggcagcagtgagcggaagtattgccacctcaggggtgggggccatcgcttgatgaggacatcccggcggctcatggagcgcagcaccagccggctcaccaccactggcacgaactctgagccaccttgctcaaagctcagcttagctgtgaacgggtcctcatctccgatggagtccttggtctccactagccgcagaatctgggagctgttgtttgcaatctctagctgtctgtcatcccgcttgggtctcagcacctccaggtcgatgagggagatggcttcttcatcagtgatcccttcctccaggtagaactcaaccaggtgtagcacgtcgtaggaagaggcggagaagatgaagggctggcggcagttgatgcagacgttgcccaggttgttgagcagcgggttgttggtggagcagcggtagcacaagggcaccaactcctcactgtcgtggaagggcttggcgcggatggtcagggtacccagctcaatggacttttggaatctggcagggatgtacaggccacgcagcttgtcataggcgtgccgggccagcctgtaggcaccgagggccttgctctgcttggccaaggtgaagagtattttcactttagagatgcccgagggggtgtccttgggcaggctgtgcagcaggaacctggagatgtt

SEQ ID NO: 131257 - DNA, 1340 bp, Homo Sapiens
catggtaaccccttgtcctggggcagcttcattttactttggcaaggaccgcagtgttcgcttttctcattaaacgaggggctttcaaggatgtgttaaagtacgtgagagacgggcctggtgccggctggtcctgttttcttaaggcggaagttggggaaccgcgtcagcactccggggttcggattcctggaacctggggcagagtctgaaataaagcagcaccggccctgtgtggcgcggacccatgggaagccttgaaaggaaagtctcttcagaaagaaacaatgggttcagtgacttgtaccctgaaaagaatagatggccagttttaaagtttctcctgcgtttaaacacgggcagcaggcggggttgacggtacaggcaccaagttctgacataaaagtctttccttaaatcatgtaaaaaaaccgagacgtgggcactgccaacttacactcatcgacacaaacttacaatatttataaataagtcgcaagcaaacactgagttacatttaccacgaagtcactggacagagaccaaaatcccatgaaagcggattgatgtgaaaccacgttagatctgagacgcagacgtgagaaacgccactgataagagacacggaagatcggagcccagccccgtgagccggtcggggacagcacgggggtcagcgtgcggccgggcccggctcaagctcgctgaggtccaggaacgggcacctccacctggacacggcgcgctgccccggcaacccccaggggtctcccaaacgcagaccgggacgcagcgaccacaagcgtggctgcgggacgggggccttggggcccgggcgtagtgcgcccgctcggcacctgccccaaggcgccgccgggtgaagcaggtgtcccggagggccgggccgcggcggctcaggggatgccctcccttctctggcagcactgcgagggcggcgcggaccagtcgtacacgtaggacaggcgcagctgcacctcgcgcttgcacaggcggccctcgcgcgccagcgtcgcgtgcttctccagcatgtcctccaggctctgcttgtgcgtcaccaggtactggttgctgcagccgcgggaccggtattcggtgtcgaagcgcgggtcgtgctcccgctggacgtccaccggcgccagccaggcgcccagagacacgtcctcgctgtgccaggcgcgcaggtagtcgcggctgaggcgcaggtagtgcaccaggtcggccgagagcacgtagccgccgcccagcgcgtagggcaggtagtagtcgcagagttgccaggcggcctcgcgccagcgcccccccggcttgacgcggccgca

SEQ ID NO: 131258 - DNA, 1014 bp, Homo Sapiens
tataaaatattcacgaggaaaagtcaaagttatcctgcaattaccatgttagaaccagattttgcaggttaaaaaagatgttgcttaaatatattcataagccctgttgtaagattttcacttatgcagtttcagaaaatttagctgcttaacatatgacagaactgtattttaacaaatgcccttaaaagtcaggaggagctactcagtttaattgataaagtagaggcaacgtgggggagccctcccccacgtttattgaagaatttgtggctcccccaagccccgtttgcctgcatcaggctaacaaccttcattccttcccatagagcctggcccaaatcacaggcggtgtcccccttatggttccgatgccccaacattgctggccgtgtgcttcaccaggaactccaccacccggaggtggccttctttggcagccaagtgcaagggcaggttcccttcattatcctcgatgttaacatcagcttgaaactccagcaaagtctgtaaagtgtccaggaaacctgctctggccgcatcatgaatgacagcgaaaccagttcggtctttcaaatcgggattagcacctctaagtagcagtctcctggcaatctcgggatttccaagtttcataacctgcagcgcagtccttccaaatccattttgtgcattgacgtttacattattttgcaacaaactagtaagttgctctaggtcccccctggcagctgcggacgccaactcgttcccccaaggctcggccattctttagggtcccttgttcacggtggtgacttgagccgtgtgaggcagaactgcaggggcaggtcctccagggggctcggtttccatccgtctcgccgaagggatagtcctgggtcctccgctgctgggagagcgccgcggtggctggatgctgacgtgctccggagggttaaaagatgatcgccaaaggcgaacgggagtagcagttcggtggccctcaagttacaggtcgtaacgattgccccc

SEQ ID NO: 131259 - DNA, 998 bp, Homo Sapiens
cctgttttgaaagtgttttaattagacaaaagcatcaggacaaaccattttaaaaacaaagtcttcaacttgggtgttgagattggcaaaaggggaagcaagggaaaagccaaggaaagataaaatattcagaagaaagtcaaagttatctgcaattacatgttagaacagattttgcaggttaaaaagatgttgcttaaatatattcataagcctgttgtaagattttcacttatgcagtttcagaaaatttagctgcttaacatatgacagaactgtattttaacaaatgacattaaaagtcaggagagctactcagttaattgataaagtagaggcaacgtgggggagccctcccccacgtttattgaagatttgtggctcccccagccccgtttgcctgcatcaggctaacaacctcattcctcccatagagcctggccaaatcacaggcggtgtcccccttatggttccgatgccccacattgctggccgtgtgcttcaccaggaactccaccacccggaggtggccttctttggcagccaagtgcaagggcaggttcccttcattatcctcgatgttaacatcagcttgaaactccagcaaagtctgtaaagtgtccaggaaacctgctctggccgcatcatgaatgacagcgaaaccagttcggtctttcaaatcgggattagcacctctaagtagcagtctcctggcaatctcgggatttccaagtttcataacctgcagcgcagtccttccaaatccattttgtgcattgacgtttacattattttgcaacaaactagtaagttgctctaggtcccccctggcagctgcggacgccaactcgttcccccaaggctcggccattctttagggtcctgacgatcaggaaaagatgaattagtcgtttttctttttcccctttcctttgctcctaaccaggctgcatgatggcatcggagactgacagaaggactgggatggttaatctccc

SEQ ID NO: 131260 - DNA, 762 bp, Homo Sapiens
  misc_feature (216)..(229): n is a, c, g, or t
  misc_feature (242)..(368): n is a, c, g, or t
  misc_feature (380)..(402): n is a, c, g, or t
  misc_feature (464)..(497): n is a, c, g, or t
gtgttatgactcagtttatttctggctgctgacgggagatgggctggatgggtggaaggcggggcagaggcggaagatgaattgcgaggtcactcactgtggttgtccagtggaaagggctgaggccccactgggagtgggggtggcggcaggtagcagaagaggtggatgggagagacacttgtgagttacaaagtataggacctggtgcttacnnnnnnnnnnnnnngagacagggtctnnnnnnnnnnnnnnnnnnnnnnnnnnnnnnnnnnnnnnnnnnnnnnnnnnnnnnnnnnnnnnnnnnnnnnnnnnnnnnnnnnnnnnnnnnnnnnnnnnnnnnnnnnnnnnnnnnnnnnnnnnnnnnnatccagctacannnnnnnnnnnnnnnnnnnnnnnagagatgaggtttccctatgttggcgaggctggcctcaaactcctgggttcaagtaatcctnnnnnnnnnnnnnnnnnnnnnnnnnnnnnnnnnnatgagagccactgcacctggcctagcgcccagttttaattgagggaagagtgacagtggggagaggaaggagggtttgtggcttgggctactgactagatggtggtgtcaggcacggaacggggcgcaggttgcagggaggctgaatttggggtgtggcttgcatgactctgacagtgcccatgtgctaatccctgggatctgtgaatatgttcccctacctggcaaagaaattctgcagatgtgtttaaattgagtcataacac

SEQ ID NO: 131261 - DNA, 787 bp, Homo Sapiens
ggcgtagagaaaatatagagccactttactattaaaaatgtattttccaaaagcaaggtagttgctgtcccaaaaagccgaaagcctctagtccctgcggaacgggctggatggggcttcagtctgacacagccaggcggggcagccctcggcgggctcggattctctgggagatttgatagagctccatcgttgccctcgcatcttccaccgagctgtgtccaagcaggctgttctggatgctcttgtgcaggaggcgctcactcagcacccgcagggagacacgcctgcagtggtccagcttggcctcacgccacaacagcctgtcagtggacgtgtcgtagattgtgtagccgctcatgtcctctttcagtgcctggaagtcgtgcttcaggtcatgacccaccaccagcttgcctttcaggagctgcaggatctctagcctggcccacggcaaatggtgtggcccccaccatgtgctgaggggtgaccccgctgacccgggttctgtaatcggtgatctctccctcaggccggatgaacttgtcgtacagcacagcaccgtggacgttcacgaggctgcaacgagccaggccactctcccggtggggccccagccccaccatctcgcagtccatggccaccacctcacggctcccagccatgttccttggggaccctcagagatgctgcctgcctctgcgccctcagctcacgtctgcctctctgctgccactgctcagctactgcagctgcttctcagcggtgactcatctctaactccccc

SEQ ID NO: 131262 - DNA, 1052 bp, Homo Sapiens
  misc_feature (541)..(541): n is a, c, g, or t
ggaagagccttactgcacactggaggtgcttagccaagatttattgaactggatgaatgaatcaatggcttgtggaggggtggggagtgggggggcagtgagagaccacacagcacacagaatgtctaactaacttgaggaattccagttgctgaggaggatgtaagcagattgtttcagagatggataaggaaagagatgactgggacagggtaggaatcatggctattcatgggtactcattctatcctctcagtcaccctccacatccaataatcagtcattaagttatcatcttaccttaacagttcacaccttaacacctccaatctattcctactggcctttgccctagtgcaggcctcctggtctttttccagtctcctagctaatcttgtcatctccattcgctctctcacaaatggattcactcatgcattcattcattcaaaaactttactgggtgcctgttttgtgtcaggcactgtgcttttttgcaggggctatactggtaagcaaaatatccccaggcccacccttngtggtgcctaaagcttattcagagacaaaataagcaaatatagtagtgtaagaagctgattaacagggaagctacaggcacgggcacatacagcatgaacatctaacctaatctgttttccatgctggttggctagccagccagaaacaggttaagttcacatctgatctggagtccccctattaaaaaccatttcatggctccctcactgccttcaagctatggtttccaaatctggctgtaccctagtcatgtggtaacctttataagcattcaagattccaaatcttcaccccagacttaatgaatgttttaggggccggggcccagaatgccgtacctgtttgtggtatacagccagtttgggaaccacactgtcctacaaaacaaatctgaattctgtagccatgcatttacgaccctcttccaatctggttcctctctaccttttcttgctgctttcccccggacgcgtgggtcgacgatatcccgggaattccggaccggtcca

SEQ ID NO: 131263 - DNA, 1831 bp, Homo Sapiens
cccagaaaatatccccatattaagtgatgcataactatataatcatgggggatatggcttcaacataaaattttcagttcggtccataataccaccaattccttgctactataatgtgaaaaaattctcacctctgagtcacacatggaaacaaatcaatgtgaagagactttaatggcaaagtgcactggagagttaaaatggttacatgggtaatttaagaaaaaatttagtgggaaaaagggaaagggctgaactgccaaaataattttcttatccagttttacatttgctttctccatgtgctacaattatagacacctgatagttcctagccttagacataacttgcagcatcagccactctgctgcactttagatcacattagtcagggctagagcccagccccatttacacggcatctgatgaatggttagctgtggcagttctaccataatgccattttgctccaaagaaatccagttaagtggctgtccatggcccagtagtttcacctctgttgcccccagaatagctttgggatggccaaggaacagctgtcctgatgtgggccatttaagaaaaatggcatagactaatttttctttaggcttggatgtgtaccacacatctggggtgacagtgtcattctgggatcgccaggtatgggtttcataaatagcttctccattgacttttagccaggaccccatttgcctcagtcgctcctcaaaaactacagaaatggtgccatctagtgtgggcccaatattcatcaaaagatttcctccacatgaaactgtctctacaagttgcttcaccaattcttcaattgtaagatagtcagagattccagcttccctcctatagccccaggacagtttgtctattgtcatgcagttttcccatttatgtggcaaaagatgtcctgggttataacgatcactgcaggtatagaagccaccatgcttacagatgctaccagctccccaacgatcattggtgactactgtgccccgaactgggctttcattatataaccaggccaagaagcctgtgctgttccagtattgatccggtgctcctccgtcaccatccgaccacagaacctcaggctgatagttgttcactaactcatagagctctggcaatgtcttagaaactggaaattgccgcttatggaatgaactggattcatcctcaaggaagagcggatgaaaccattcaaaaagggaatagtacagtccaaaacgcaggtcagttctgttcctaatggctacctcaagttccttgacaatgtccctcttgggcccctcatctatggcattccagttccacgaatattctgacccccacaaggtaaagccttcatgatgtttggaagttaagacaatgtatttggcaccagaggcctgaaaaatatctgcccactggttggcattaaaaaattttgctgtaaatagtggtccaaaatcttcatatttgaaactaggagggtaattatctttcataaattccacatacttcggtatcttttccttttgccaataccaccagaaccactcgctaccgaagctgggcacggaaaacactccccagtggatgaagatgccgaacttggcctggtcaaaccacgcgggcagctggcgggcgtccagggactcccaggtggggtcgaagcgcgtggcgctgtgggcagggcacggcggcggcggcagcagcagcaacagcaacagcagcaacgggaacgcgagcctggggagctcctggggccgcatgtcccggcgcaggcccctcgtgccgaattcgccacccaggcctcgctacctt

SEQ ID NO: 131264 - DNA, 944 bp, Homo Sapiens
gggtaatagaaagcccacccatgcttaccaagatggttaccagctttccccaacggattcaattggtgattacctgtgccccggaaactgggcttttcattatataaccaggcccaagaagccctgtgctgttcccagtattgatcccggtgctcctccgtcaccatccgacccacagaacttcaggctgatagttgttcactaactcatagagctctggcaatgtcttagaaactggaaattgccgcttatggaatgaactggattcatcctcaaggaagagcggatgaaaccattcaaaaagggaatagtacagtccaaaacgcaggtcagttctgttcctaatggctacctcaagttccttgacaatgtccctcttgggcccctcatctatggcattccagttccacgaatattctgacccccacaaggtaaagccttcatgatgtttggaagttaagacaatgtatttggcaccagaggcctgaaaaatatctgcccactggttggcattaaaaaattttgctgtaaatagtggtccaaaatcttcatatttgaaactaggagggtaattatctttcataaattccacatacttcggtatcttttccttttgccaataccaccagaaccactcgctaccgaagctgggcacggaaaacactccccagtggatgaagatgccgaacttggcctggtcaaaccacgcgggcagctggcgggcgtccagggactcccaggtggggtcgaagcgcgtggcgctgtgggcagggcacggcggcggcggcagcagcagcaacagcaacagcagcaacgggaacgcgagcctggggagctcctggggccgcatgtcccggcgcaggccggctgtcctctctgcaggctcccgcggcctcgggagcgctgttcttccgtctctgccgctgagtatgccggacgcgtga

SEQ ID NO: 131265 - DNA, 969 bp, Homo Sapiens
gtgccagttagtgggcaaaagaggtcctggggtagaacgaatcactgcaggtatagaagccacaatgcttacagagctaccagctcccccacgatcagtggtgaattctgtggccccgaactgggctttcattatataaccaggccaagaagcctgtgctgttccagtattgatccggtgctcctccgtcaccatccgaccacagaacctcaggctgatagttgttcactaactcatagagctctggcaatgtcttagaaactggaaattgccgcttatggaatgaactggattcatcctcaaggaagagcggatgaaaccattcaaaaagggaatagtacagtccaaaacgcaggtcagttctgttcctaatggctacctcaagttccttgacaatgtccctcttgggcccctcatctatggcattccagttccacgaatattctgacccccacaaggtaaagccttcatgatgtttggaagttaagacaatgtatttggcaccagaggcctgaaaaatatctgcccactggttggcattaaaaaattttgctgtaaatagtggtccaaaatcttcatatttgaaactaggagggtaattatctttcataaattccacatacttcggtatcttttccttttgccaataccaccagaaccactcgctaccgaagctgggcacggaaaacactccccagtggatgaagatgccgaacttggcctggtcaaaccacgcgggcagctggcgggcgtccagggactcccaggtggggtcgaagcgcgtggcgctgtgggcagggcacggcggcggcggcagcagcagcaacagcaacagcagcaacgggaacgcgagcctggggagctcctggggccgcatgtcccggcgcaggccggctgtcctctctgcaggctcccgcggcctcgggagcgctgttcttccgatcccgggaatccggaccggtccagcct

SEQ ID NO: 131266 - DNA, 868 bp, Homo Sapiens
  misc_feature (25)..(25): n is a, c, g, or t
  misc_feature (50)..(50): n is a, c, g, or t
  misc_feature (257)..(257): n is a, c, g, or t
  misc_feature (548)..(548): n is a, c, g, or t
tgcatagtcccccccttgggggggnccccctgattgcagatgcattaccnaaggctctctataggtccaaagtccccacatggattactgaagctcaagtacttgcccagcccataaccttggcggagttgctgaactgcatgtacctggtgctgtgacatctgagacagaagaaaatcctgtagctcctgctcctgataagacaggtgtaattactcttccatctctatgtacaactcgaatctgctcaactccanatattcaattgcagttgaatggacttgcatatttgttcatagccttgtgatgtgattaaaactttcacactagattcataaacatcattgatatttgaccaatgagcctgtatctgaggatcctcaattcggcttgctaagctgtcaatggttgcagcagctctactccttagaaaaatatgctttgcttgtttaattattttttccagaagcccttcactggactgtaatgaattaatttcatttttatcaaaagcttgaggacccgaaagtctcattctcttgtggccnaaaaggtgcacttgcctggatgaggcatcatgatggaactcaaggtctgtttatgaaactctctaatcagtagatgcaaattatgctctaggacataaagggttgtcctccggacattgcttctcagtagcaaatttttgggatttcttatcatttgaggaatggcacaaagaaatagataactgcaagctcggaaagggctgagagataatctggtttttcaccacaatgtgagggacttgtgatttaatttgaacagcttcccgagagagctgtgcaaaaatttctttacataagagaacattctgtgccgcttctaa

SEQ ID NO: 131267 - DNA, 1059 bp, Homo Sapiens
  misc_feature (923)..(957): n is a, c, g, or t
ttttaaaccacatactttatttgatgtcaacatcaaagaaggaatattttaaaaagcacatagaaacccttaagttagtaatattttaaactgcatgaaaaacatattattttacatcttgtcatactgtatatacaactgtacataaacttctgcatttcaaagcacttgtcatttataaagtgaaaagtttgaaagtgctaaataaacatttcctaattattatttttaaaaacagcactcttttggaagttatctcttctttgtgcttatagttgatctgcaaacatttcaagtcaaagtttctggaaacttctttaggaaacatctggaaaaaatcatagtagacaagggctaagtgcagacataagcagctccattttataaacaaaatttcgaccttccattttattccactgaacttctttgaatggcccacgaagatgactccatttgttatcttgtaaaacatcactttttggaaggtctttacattggttacgaggaaactgaaccataatcttgctgccactttcaggtccattacgaactgaaatagcatagtcaccacttggggaggccaccgtgatggcagatgcattaccaatgctctctataggtccaagtcccacatgattactgaagctcagtacttgccagcccataaccttggcgagttgctgaactgcatgtacctggtgctgtgacatctgagacagaagaaaatcctgtagctcctgctcctgataagacagtgtaattactcttccatctctatgtacaactcgaatctgctcaactccaatattcaattgcagttgaatggacttgcatatttgttcatagccttgtgatgtgattaaaactttcaccccggccgtaatggccgaattcccgggcatatgtccggtaccgtcgactgnnnnnnnnnnnnnnnnnnnnnnnnnnnnnnnnnnncgccgcttcctcgctcaatactcgctgcgctcgtgttctgggacaataaataaacagggcgggagtggggcgcccccgaattaattgatgcgtcagtatacc

SEQ ID NO: 131268 - DNA, 933 bp, Homo Sapiens
  misc_feature (734)..(734): n is a, c, g, or t
  misc_feature (792)..(792): n is a, c, g, or t
  misc_feature (872)..(888): n is a, c, g, or t
tttctttaaaggctttatttgcattcttgtaaattttattatttcaagtcaatgtgttaagaattactgcgcatatagttatttcttttataaatttgttttccgtgattccttcaaaagctttcttattgttggcctttattttctgcagagaagactacagttttacagcttatgctaccatttcgtatttgaaaataggacctaaagctaatcttctgaacaatgaggcacatgctattactatgcaagtgacaaagtccacgcagaactctttcagggtaaatggctattaattttcagttttatatattttaaaaagtatattaaagcctatgggatgcttttctgtcatattcccctaggtccagttgaacatgagaaaagtcagttttctgattagatttctgggtatggaagagagaaaatatagttttctgtaaagatgtaagtgaaagaatttagactggccttttaacataaactaggggtttccagtttcttggaatgggaggactccgtttgaatatctaattttgttatgcactctgctcttatttggttgtgattactaatagttgagaagtctgtttctgctgttccagtggttagaaaccactgttttaaaccaaatactatcaagtctgcaaaagcatgtcaagtcaagtgccattgtgtctaaggacatttgaggtctttagaacttctctcacaacgtagccccttttattcanaatagagctcatatttgaatagaaattttgtagataaaactagaccctgtatacttanaagccactgatacagaaagatattttgaatatttatctcatgagaaactgatagctggattttacaaggtgctgctttgnnnnnnnnnnnnnnnnnttgagtgatcgtccaactgtcatctgacaggtgataaagatgggg

SEQ ID NO: 131269 - DNA, 718 bp, Homo Sapiens
  misc_feature (152)..(161): n is a, c, g, or t
  misc_feature (650)..(650): n is a, c, g, or t
aggtggttcaacagaatttacttgtatattttccattttctatactatttgaaggcataggatagttttgtattagctttctacaatactgtgttttaaatttatccagtaaactaagatgcagtacaacttttatacaactcaggagattnnnnnnnnnntctccacaagaagaagcaactcagcaggccctggcattaaaacatttcccagaataaacagatatgcattgcattaaaggtaattttcaaatatttaagttacaccaagatttccctccaatatgtgcctttctcaaaccaatgcaactaattcattgctaatactggggcatgaatttttggcaaatgtttatggttttactttcttcattaatcaaaaaattttttaaagtgctaccaagcagcaaaacaagtcgcatcagttctctgctcatggcagaagtgccaactgtgaaatcgcaaaaggtacagttttaacagtaagtaatgcatgaagaaactggtacaaatggcctaaatacagagttggacagagtcaaaccagttatgtcttagaattactcaattgaaactaatagaggtacattcaaaataaagttggagattataatcgctatttagaatcaaatttgaagacttccttgatanaatataagaatgttcttttgaaattgtaaatgaaactatcaatagatggagagctagagacttattaa

SEQ ID NO: 131270 - DNA, 1128 bp, Homo Sapiens
  misc_feature (394)..(394): n is a, c, g, or t
  misc_feature (400)..(419): n is a, c, g, or t
  misc_feature (440)..(465): n is a, c, g, or t
gaaaggggccaaaggttggtgaagccccgtgggcggattcggggtttatccaccccccttgggagagggttccctgttcggccggaaagggtttaaggattttcccccctcttttcaaagaagtggcaggggcggggcggtatttttaatttgaggcctccctggacttccctgtggtaaagaccccgtaagggcccctggactcccattttggaatttttcaaacccctcggtttccccccgggcgtttttatttgtgtggatcccagcccttgtccttgcccgggtttccttgggaaccggtttggccacgttccctttccttctggggccccgcccccaacgaaaggttttaaaaacttcttcagggccggggcgggcgcccaggacaatntaatgnnnnnnnnnnnnnnnnnnnngtcttgaggcggtttccatgnnnnnnnnnnnnnnnnnnnnnnnnnngatgattgtatattttgtttaatacttgcattgtttctatagcgcaattatagcaatctttaaatttactttcattacaaatatttgtcaagttttgtttcagaaacatttttcctactctcttgcatcatgcacccagacacactacaaaaaactcattcataacacagtaagggcaaacattattcatgtaaacatctttcattaatttcccataatttaaaaaaatcatagaattatagatattgaataaggctcatagttttagttcaaattccacaagagaccaaagatgctcgttaaccgtgatggggttaacttttggttgcaataaatgctgaaagcatacccctggcttctacttcttcaacatacctcacaacctaataaatgtatttcaggataaagagagaacatagaacacccaggaggaaacttttgaagaagggagctcagaatcatggacataattttcctatgtgataagcaggtattacgtagtccctgtagcttcccaatacatgaatcaaggttaattatcataaaccaaaatgtaaccaagtagatatgttgatacattggcatgtgtgttcgtattgctactatacacagtgaaaatttatcctaatatgtatcatttcattatatccaggaccaaagtgg

SEQ ID NO: 131271 - DNA, 1344 bp, Homo Sapiens
  misc_feature (691)..(691): n is a, c, g, or t
catacttttactccatatgtataacacaacaatgtagtaaaaccaataactcttggttctctattcaaagtgtttggaatctttattctgtttaaaacactgatgacatttgccaatttttgagtgttcttcatgttactgatttgtaggagctctttatatattgcagatttagtctcttactggttatgtatgctgcacctgaggagtagcagcactgccaaggacactgagtgtcttgtctgtgcagagcttcacatgaagctggagagaagggactggggcaagagggaaagataaaaaggggcaagtaagtaacagaatgaatccttgttgctaatctcctggcccccatcccagacccttcaggggatcctggcgattcgaagcagcatagcctgataggcctctggtgagggtgttgggagggttttcttggccgcctgttccaggatgctcaagatgatgctgtgggcctcctggcatagctcagcaacccaggaaagcctccacttcgtccaccgccatgctgccagtcgtggccgtccctcaaacagttcatagccgagagccaccggctgcatcagctcctccagggccatgagatcagccagtgtcacctgctggccagcgaggaagggcctgtcccccaggaacttgtcctccagccattgcagggcctggtccatgncagtcctgttgcgttccaccttctcctcgggcacctggaccccaatgagtggccccaacacctggacccacaggggtataccaaaggtgccacggatgcagtcggcatgccagcccaggtactcatgaacacgggcacgagcctgcaggtcagatggataccagtggtccggcgtctggtacttacagctcaggtaaatcaggatgccgagcttgggcaccgactcttggctggaccttctgctttgcattttgagaacctcatctctgtgatatgccagcagccgccctttcggtcaagatgaaatcaccatccttgagcgtcggcagtttccccaggctgttgatctgcaagaactccttgctcttgtgctgccaacagcatgtccttcttcccgaggtcttctgggctttgtgaatttatatgcgtgcattccacgcaagaactctgtcaactccattcagtattttctttccatccctttgaccaatccacggtgcgcagctctaaggggatgccattcttcttggcgaagatgtagacggcgcggctgggctgggacaccaggtcaagaaacagctctaggcccatggcggggcggcaggacagcgcctcgtgccgaattcaccacccagctccgtactagcctaagt

SEQ ID NO: 131272 - DNA, 925 bp, Homo Sapiens
accaagccaggtgtcaccctgtttgcccagggagggaaaggggcctgtccccccaggaacctggtcttccagccattgcaaggcctgggtccatggcagtccctgtgcgtttccacttcctcctcgggcacctggaccccaatgagtggccccaacacctggacccacaggggtataccaaaggtgccacggatgcagtcggcatgccagcccaggtactcatgaacactggcacgagcctgcaggtcagatggataccagtggtccggcgtctggtacttacagctcaggtaaatcaggatggccgagctgggaacaaatgggcagtggctataaggacactggcaccaggcatttacccctaactgctcccatctgccagtggggcccgggggcttctctgcatttgaaggactgccctccagcctcgccctccatctccagctccccaacaccacccccctcctcctacgagtctcctcctgtctttgttgccttgggcaccgactcttggctggaccttctgctttgcattttgagaacctcatctctgtgatatgccagcagccgccctttcggtcaagatgaaatcaccatccttgagcgtcggcagtttccccaggctgttgatctgcaagaactccttgctcttgtgctgccaacagcatgtccttcttcccaaggtcttctgggctttgtgaatttatatgcgtgcattccacgcaagaactctgtcaactccattcagtattttctttccatccctttgaccaaatccacggtgcgcagctctaaggggatgccattcttcttggcgaagatgtagacggcgcggctgggctgggacaccaggtcaagaaacagctctaggcccatggcgggggcggcaaggacagcggggatggcagtgaaggcgctgagcgcg

SEQ ID NO: 131273 - DNA, 661 bp, Homo Sapiens
ctgatttgtttacttttattatcattttttaaatgtggtcaggggttttatagtattttttgtttaatctttttggttattgaaaaaaatagaacagtccactgtccagcagaggctgcttcaactctattgctcgcagggctcattctgcatggatctgtgtttcaggatgctgcaaggacaactctgcgggcaggaaggccccttgacccaacgctgtagcataggtcctgctctgtggatggggaaagccagggggcacatacgtccccatgccgccccctccaaagactcctcgctggtgctgaggcagggagtggtaatcttccaggttatcatactgggacacaacagtcacactgctctggcgcttgccgtgtggttggtactggtacagcacactggggtccctctccacgttctgggtatgatggagtttgaggctatgactcctctctggtttagggggtgggacgattgactgagtgaggtgttcttcctccttgtagcagtctctggagtgtttctctggggcagaaggctgcctaacccagggtcgctccatctctttggagagccttacctctttgtggttcagtcttaaagattcttgcccggatgcagcatattttactccagagttgtggtagctgactggctc

SEQ ID NO: 131274 - DNA, 783 bp, Homo Sapiens
  misc_feature (599)..(628): n is a, c, g, or t
  misc_feature (718)..(718): n is a, c, g, or t
ttagtcaaagtagcttccatttattcacagttttaaaaacatttttcaagtttagtcaacttcccaatataatcaaaggacaaaatggcaataaaaaatatacttcatcagatcttagagttatacaatcagttaaaaaatagatattgggttttaaacaactgacatatgctttccttttccccctttaaaggttttcagtagtctatctgaaatcactgaatcacttttcttctcctccacagaattcagaactttttcacccggaactggagaaggagcactccgtcattagctgaggggaatggcaaggatccaggggtcctccatgactacacaaccatcctcctgagcacctttaggaaatccaatgctgtctgagaagcagcagggccagatccagatctatggaaaattaatatctgcagtgcttcctgaaggtcacctcagtctttatgccatttcaaaagctagcccggggcttgagaagaaaagggaagtggcattccagccatatttggggtgcaatttaattttcattgcgtacctcatgaacaggggcaataacacattctaggacattcttccagcccacccannnnnnnnnnnnnnnnnnnnnnnnnnnnnnaacgagtggtagtgacaggatgcaagtctgcgctcttgggtagataacggagaagcaggagaaagactattccataatcagttaaacggngagttttcagaatcctgtcttgtcatttaagtgacttactgaagtcctactaagttattgagact

SEQ ID NO: 131275 - DNA, 430 bp, Homo Sapiens
  misc_feature (339)..(374): n is a, c, g, or t
ctcaaaacaaataaacatttattaagcacttatccctgtgtttggcacctggaatctcatgaaaattgtgtgaattacagatgatccctattttacaggtggaaaaatggaagctcagagaggttaatcaactcacccaggaatacagcaggcacatggacgtggcaaagccgattcaaacccagattactgactttaatgttggtccttgcaccttaccaccacctgtctggtcaccctggccctctctgctgtcgaactgctgtgtgaccatgggcaagacacttccctctgtgatcctgtctgacccctagtctcctctttaggaggatgaggacnnnnnnnnnnnnnnnnnnnnnnnnnnnnnnnnnnnngagacggagtcttgctctgtagcccaagctggggtgcaatgggaagactccgtctc

SEQ ID NO: 131276 - DNA, 1029 bp, Homo Sapiens
  misc_feature (757)..(757): n is a, c, g, or t
  misc_feature (875)..(876): n is a, c, g, or t
  misc_feature (897)..(897): n is a, c, g, or t
  misc_feature (949)..(949): n is a, c, g, or t
  misc_feature (957)..(958): n is a, c, g, or t
  misc_feature (960)..(961): n is a, c, g, or t
  misc_feature (964)..(964): n is a, c, g, or t
  misc_feature (971)..(971): n is a, c, g, or t
  misc_feature (978)..(978): n is a, c, g, or t
  misc_feature (980)..(981): n is a, c, g, or t
  misc_feature (988)..(988): n is a, c, g, or t
  misc_feature (1002)..(1002): n is a, c, g, or t
gaaaactttttcaattttctaatttaatagaaataaccaaaacaatgtggctttcaaacaagggtttaaaactaatctaatacaacttctacaacacattccagagcattataacaagaattatttacaggcagctaatgtattaaataaccatgaaaagaaaaaacttgcttttattacacaccagcaaaaacacaggaacgaaacaattagaaactgcaaccttgttttaaaaaattaaatatgattatttagagaatacgataccacagaaacagcactttttaagaatcatattgaagggcagttaactatgtgcaaaaataatagtactagtagtaataataataatgaggggaggagaccaattgaaatactggaagcaaggaactagtaaggctgtgaatttaaccctttcgtgtgtaggtatgtctacataaaaaattaacaggctttcaaattgcacaaatctttttttataggcttatgtatatgtttcactgtgttttaaaatgtagtagatgcctacatttttcagaacaaggagcagacatgcattccatccttaagattgaaatttaggccacacttgaaagggaatattgcagtggcacttacaaaatcattttggtgccttcccacacataaatttggtgaatttaaaagaggagcatttttaattttaaagatcactttctagaaaagggctaaacttaactttgtacactttgtagtttgatatgacaaatatatccanattaacttattttttgagatagttttgtttcttcgataccataaaaaatatattaaggaccacataggcaacacaaggaactaagatgaaagaaatgctatacatgcatttttgacanngtaaagaaacattatattcangagtacgtgtttgatcctgaatgtctatgtaaactgtgggcatataattttntttccttnnannaangtacttncattttntnntactcancacttactttttanaaaatatgcaacttcccccatttttaa

SEQ ID NO: 131277 - DNA, 2263 bp, Homo Sapiens
  misc_feature (1088)..(1138): n is a, c, g, or t
aacagtaaaataaatcagtgtgtactttattttgagccaatgttttacataagaccaacaaactaagtgtgggcaaactgttcaatcacttttgagaaattacatggttcctatttaggtttgaaaaagtagtttgttgccataacatcagaccttaaggtgttttaaagtgtatcctaagggtactgacagaagaaaaatacagtgttatggaagtatacacaactcatgaccacacagtatagatccattcatggtgaataatgttcatctgttctccaaaggtagtgaaaaatattaagtcatcaaataaatgctcagaattaccaaggaacagttaaaaaggaccaggatccaaacaggttatttatatatttatctataaacaagtgacaacactaaaaaacacattgaaaaccagtgttttaaactctgaatgtgggatttaaaaatattccattaacttgagattgcaataatttttttaaaccaaatagcatttgactggcaagtctcatataatttacagctgtaatattcctaaaaggaatatctacatactatagcctatcaaatataatctgcattttgcaaatcaatacaaaaatctatccatcatttatacattttatatttatatactttttaaaaattagattttattgctaggtgaatttggaattcaaattaaatttggaaacttaataatgctcttctcataaccttctccccattctttttttaatttttaaacactggaagcaaatgattatcaaaatgagactgcaacttaaggcattttaaaagaaaaaataattaggtgccatatagcattttatttcaaaagtatattttgtcccacttttctcactagcaagagtaaaacacaaaccttttttcataaatatgactacagtaatcataacacaaaaaagggttgataggcattgcttagatatttaaaacaagggtaatactttcccactcacctaaaagaaaaaacctttttgattaccagtttataaacatcggatttgctatgttaaaaagtccagcagaattttaattcagcaacactggagaatgannnnnnnnnnnnnnnnnnnnnnnnnnnnnnnnnnnnnnnnnnnnnnnnnnntcaatgtatttattaggcattcccccacaaaagtaatttatatttaattgccatttttaataaacacttatgttcacagatcatccatctgtcttatatgaagttaggcaatatcaaatgtcctgttatggtctccgtcttcttcggaatcatcctctgaagtttcgagatcttccatatgtgcctgaagagttcttgcaaggttaataaatcggacacgtgtgcttggttcatttgtatttcccatcatatcagaaaagctttgttcgcacaagtgcaataacaccactgggtggagaccagagctgataaactcatactcaggcttgttcatttgcatggggctctatgtagttcaatgaatatcaaaatcctccaggttaagctccaacttctctttacatagttcacaggtggttacagcttctaatgaagaaccagagttaattttggcctgtaaccactttttcatacagtcttggtggacatactgcaaacttcctgtgcacttgcatggctctatcagccaattagatgatgatgcagctgccatttgacaaattctacataagtcaccttcttcttcttctgagtcctctaaaaggaggctctcttttattttctgcaatctttcttgatctcttgaaggcgcacttttagttttatcacttttaccatcagctgaattccaacctgaaggaataatatctactgtgatcatgacattgtcggtcaaattactcccaagtgctggggggactgcaaaccggaataaggaaccaggaagaatccctgatattcctgtatttcttccaccttgagccgaatctgatgtagagccacctgttgtggcactgcttgatgctgcagatgcttgtggtctgttggcagcagctccaagaggatcattctgtgcttcaaggtgaaccacttcatttgattctcttctaaaaatatgagatctagatgatgtatcagaggtaggtatccttgaagattcatctcttccctctcgcctccttctagagaacaaaggtgtgcatctatttctaagtgaggaagataaccatggtcccccggccgtaatggccgaattcccgggcatatgtccggtaccgtcgactg

SEQ ID NO: 131278 - DNA, 895 bp, Homo Sapiens
  misc_feature (47)..(56): n is a, c, g, or t
  misc_feature (325)..(334): n is a, c, g, or t
  misc_feature (503)..(577): n is a, c, g, or t
cctcccaaaaatgtgggggttgggggcgggttttttggtctccgggnnnnnnnnnntgtgaggggacttgggggggccctaaaaataagccctctggggggccgtgggatttttaaaaatccccccaacccaatttggaaaccccctaggcccccggggataaaaatttttcacaaaaacccaaactccaggaagcccaaaatttttttaggccggccaaggcttttggcgggtaggttttaccccctttttacccctttaaaaaatttttaatttcccttaggggccttaaaaattccgggaggggggttgtgcccaatatgtnnnnnnnnnngaagtaaggtttccttccaaaaattcccaagttacaggttttcccatcccggaggtgttaaaaggcggcccgggcccaagttttaaatcggccccctataggggccccttttttcaaaaaaaatggggtccggtaaacttgggccccctggggggtatttttaggcggnnnnnnnnnnnnnnnnnnnnnnnnnnnnnnnnnnnnnnnnnnnnnnnnnnnnnnnnnnnnnnnnnnnnnnnnnnncaaaaattctccttttattctctagttataaacatgtactcactttcaaataaaattctatattagaaggaaaggtctctttgtaaggcatagtattgactttttcttatgagaaaacaggaaatatcattagtgcttttaaaaaactgaaagcgtgagagaaaaatcagggctctatctagagaagtctaattgtttctctacaaaaaccaactggaatacaggatagctctgtcctatagcaacctaaaccagcacctcccttgatgtgcatatagaaaatctatgtcttgtggccgggcatggtagctcatgcct

SEQ ID NO: 131279 - DNA, 670 bp, Homo Sapiens
  misc_feature (631)..(631): n is a, c, g, or t
cttctatacaacggtttttaatgaataagatatcattaagaatttgtattctaaacaagcactttaaataaattttggtatttactaacttaagtattcaagaacctggtttgaagagtccaacagactgaaagtctgcttttcaagagaactatgctcgtctatcaatggagagattttcgtatttctatattctaatagttcacgatccttgcttgatgtcagtaaattctttatcgactataccaatagttgcatcttccaccagaatatttgcttgatatgctccaatcggaatttcaggcaatccaatgtagtcatgatctgccactactgaaccttgcaagagataaagactttcttgttcactggattctcttatgtagggcttaaggtgggacattttgataggtcttttcagtctaaccccagtgttgtctgtcaggacagcacatccactttctgtaatatagtctatgacacaaggaccaacccattcagactgaaaacgaccatccttccaccaatttttcctttgtcttaaaacttcatgacccacttttaaatgaaatggatttaattgtttgggtttctttttaacaatgatcttgcttttatttagttcatccanattgttgttctccatctggcccagtgaagttgtcttatt

SEQ ID NO: 131280 - DNA, 2123 bp, Homo Sapiens
  misc_feature (932)..(970): n is a, c, g, or t
tttttattttataatcctgtatattaagttctacacaaatttcacttaaggaatgttacaaaccaatcatttacataacagcataattaatattatgacttatatcccagttcccaattcttgctatagcaactacttcgcatttccattggaaggcaccttgtccctgagcaaccatctgtttgtcaccagctatggctagtgcacagaagagtgctcagttttgtgatgtttcctatttgacagatgctttttccccaggatcatttatttatgatctaattaaaggaagaaaaaaagaagtttggtgctaggctttgtgggattcagaaagaaaagaaaatttgctctctcagcaaattatgacatcatgaggtaacactgccaggccatggatgcagtattggaaaataaaaaatacaacaccactgagcttggcaaaccttttttattttgtgataaaaatgctttcatataaatttcatcttaactacctttagaatgaaacggaaaagtaaaaacaaagtgtgcattttccttactacgtttagtcaggaatatgcggtcattttattggttactgggtttctcatacaaacagatataatatcacttttaagagaaatgtacacaaggaagtaaccatagtaccacttattagtgggggcctctgggtacataaatgtgtcctcccaaatagtcatcatacattcaatgtattggttagggccaaaatccctaaaccacctctcaacaaaacattacacctttggttctttattatgcaaaaattacaaattggcaaattcaataagaggatgcaatggatttgagcatcacagccaattgcttatactaaaatattttaattctcagactctctttccctcatacctttcccttccccacctcacataagaaaatgatgcttnnnnnnnnnnnnnnnnnnnnnnnnnnnnnnnnnnnnnnnctatccccaaaggcaggcagaagaggagtcaaagaaagaaagcatttataacaataaaaataaaccaaaaatagcaggggaggatctatacatggcataaaagatgtgtctcataaaaactgagtctccaattcagaacccaaatgagaaagtgattatccatcttaccttcccttttattagataccacacaattcaagagttcttaaaatctaagagatcagtaaaaagtttgaaaggcagtgttgtcctcctcatcactggaaacctgttgtctgtaatgacagctttcacattccctttctccaaacccaaaggatccaaattaaagtagtccaagaaaaagaaacaagcaatttggtctgacattgtgcttaaggaaaagggaggatataaaatatccagtggctggatcagtagctgatactttcagaagtgggtctggagcatggagggcagaaaggggcagcgtacgctgtggtccacagaggtccatgcagataggttctccccatctgtgaataataaatgggtccaagggcagagagtcaccatttagaatgataaaatgtttgcacactatgaaagaggctgacagaatgttgccacatggagagaataaagcagagaatgaacaaacttaatctgcttatctcagggcagaagtaattatttttgttggttcaataaatttggataggactgaaaaaaccatttgtaaactattatgccaacagacacgcagggtttccatatggggccaccgacagacaaatcaggtaagtgggaagcactgatgcatacttgcagccatagaaggaatgagaactgtcattcaaaccaaaagagtcgggaattcacctgttaatatctacaaatgcccaggcagaacttattttgcaggtgtcatgggcatcacagcactggacggaagttgcagtgtagccatggaccaattattaactggcccaaggagaagaggaagaaaactattctttatctacaattaactaaaatgcttctgcccttaaaagaaagtcaaagaaattgccaagagcatgaatacagagagtggattcaggcgacgcgtgggtcgacgatatcccgggattccgaccggaccaccctgcttttttacccctggtatattcca

SEQ ID NO: 131281 - DNA, 881 bp, Homo Sapiens
tgacagttgtcttccgtttgtcagatgatcagtctctactgattatcttgctgcttaaaggcctgctcaccaatctttctttcacaccgtgtggtccgtgttactggtatacccagtatgttctcactgaagacatggactttatatgttcaagtgcaggaattggaaagttggacttgttttctatgatccaaaacagccctataagaaggttggaaaaggaggaactatatagcagcctttgctattttctgctaccatttcttttcctctgaagcggccatgacattccctttggcaactaacgtagaaactcaacagaacattttcctttcctagagtcaccttttagatgataatggacaactatagacttgctcattgttcagactgattgcccctcacctgaatccactctctgtattcatgctcttggcaatttctttgactttcttttaagggcagaagcattttagttaattgtagataaagaatagttttcttcctcttctccttgggccagttaataattggtccatggctacactgcaacttccgtccagtgctgtgatgcccatgacacctgcaaaataagttctgcctgggcattttgtagatattaacaggtgaattcccgactcttttggtttgaatgacagttctcattccttctatggctgcaagtatgcatcagtgcttcccacttacctgatttgtctgtcggtggcccatatggaaaccctgcgtgtctgttggcataatagtttacaaatggttttttcagtcctatccaaatttattgaaaccaacaaaaaataattacttctgccctgagataagcagattaagtttgtcattctctgctttatccttctccatgt

SEQ ID NO: 131282 - DNA, 1558 bp, Homo Sapiens
  misc_feature (1443)..(1477): n is a, c, g, or t
ctaattctatgaagaatctcaatagtagtttaatgggaacagcattgaatccataaattgctttgagcaacatggccattttcatgatattgattcttcctatccatgagcatggaatgctttcccacttgtttgtgtcctctcagatttctctgagcagtggtttgtagttcttctcaaaaaggtccttcacttccattgttagatgtattcctagatattctattcttttgtggcagttgtgaatggtagttcattcatgatttggctcttagcttgccactggaagaagtccctggtccccctaggatctcgcggacctcctctttacaacgatgctggtgctcagggtacagggccatgcagtagagaaaccaggagataccactggtggtggtgtcatggccttcaaacatgaatgtgtccacttcagcccggaggtctgcatctgacagtttgatgtcatcttcatcccgggcacccaggagaatgtccaggaagtccaggtgcctccggttctggatcttcttccgcaccttctcatcctgcagggctgccttccgctccctgatgacctggtctgtatggtcatgggccacctggcaggcccgcaggaagcggcggccatgtggggtgagccagtagatgaagtcattatggtactggaaggacacaaggcgctgctgcatcaacagagtgagatcgctgactgcaaggtagtagctgctgtccctgctgtggcccaggccggtgtctcctcttccaaaggtgcacttcatgagtgtgttcagcgccatgtgacccacatcgcagaagatgtcaaaggacttaccctcccgagctttctcttcccacttgtccagcatgatacgtgtagactcagtgaacacggccacatagggcttcagcacatcataatgaaagccaggtgtgagcagcttgcggtgctgcaaccacttgggcccctcaagaaccagcaggcctctcccaatccactggaggaagaagtcatacacatcaggggccttagggtccccacggctgtacacagctttggcatagtcaggctcatagatgttcaggaagccaatgaactgtccgaaccagagtgggtgggcatacgggaactggtgggcccaggacaccactttgtccaggctccccgtctcctggatctcgagggcatgtccaaaaagccagtgggtgggaggccctgggaatttgtccatagccttagccaacgtctgcctccgcagcagcaggtggatgagcttgagaaagcctaagaccaagatcagcccagaagcccacaggcccaaggaggagaagctcagggagaggaagctgggcaccatggttgcagttccagccacctagccttcatctgacctccccggccgtaatggccgaattcccgggcatatgtccggtaccgtcgactgnnnnnnnnnnnnnnnnnnnnnnnnnnnnnnnnnnncggccgcttcctcgctaactacttcgctgcgctcggtcgttcggcataatacagcgaggcgccatatgaggtagatagttg

SEQ ID NO: 131283 - DNA, 1138 bp, Homo Sapiens
  misc_feature (841)..(869): n is a, c, g, or t
tttttggccattaatccagtggtgtttattcaagcagtattcacacttgctgttgaataacaagggaatcaaggctcccctagatggggctcccgcagttccagcttcacagcagccccaggtctttgagaactccagatgagttttgtggttgaaaagcctttcagttcttcctccatccctctgtcaggcagagcctattataccccgattaccagaacagactcagcagggtggcagaagcacacggcaaagccggtagaactacgtaagctcagaagaggccacactgttccatgttttcatacaaaaaaatttaataaatattacttttcaaaatttattgccaagaacaacacatcaaagatgcatttgtatgttcatataacactaataggacaatacaaagtatcttcacggtctcaatggtgaaccaacaagattactctgttttataagcctttttgatcttgaacttcgtaatagcactttgatttcctcacttaaggcaggcagtgtactctatggcaaatctaaacagtgatcttactggacattttatggttcaagtattcaactagcttattagaatactccctaaatgcagtagattaacccccaaaatcaaatctacaagtggttcagtattatgtacgaatggtgaaaagaaatcagaatttacaaagtaagattggtgtgcttccaagttcacacaattaatttgatatttttaatcatattcaaccactcacattttggctatgttaagtcatagctcaacttgttcccttactgctctgcagcagatcacctgcctgtctcttttcaagtctaaagcagnnnnnnnnnnnnnnnnnnnnnnnnnnnnnctgttctaaactaatcctcaaactgcctcagtcagtccttaaaacgtgttttaagtgatgctatagaaggtgttttaaacatctgacgtcgtacaaaaaaattccatcagtattctgggcacagaagcccatcctattgttttaaaataaactattttcaaacaccttaattttggcttataggcaacaagtaatgagaagagttcaaaaaaataaagccatacgcttacaatgctatcaaaaaccttcaattctaaacacatacatat

SEQ ID NO: 131284 - DNA, 1758 bp, Homo Sapiens
  misc_feature (1686)..(1700): n is a, c, g, or t
aaaaaaagattgcacaatttattttcctttaatttgaaggttgtcatgttctgtttaagacaaaaagatggaaacaccaaaagtttaagtgtgatccatttattattgctgccatttgtgggtacattctctcaattctccttaaatcccagtgatgcttttatacttgcaacacgtgtatccacctctagcttccctgtgcagaaatgtttggcattggaatgtgaggtatctctcaggaaacagagtggcaatgggtaggatgaaacctacccattgagagttcatgatattcattgtgaaataccactagatatagtccttcattttatttagagagcttgaagtttctgattttatgtagaacagaaaaagaaacacaaattatacaaaatttaagtgcaatcaaaaataaaaatatatgttaaataaacggttatggtacaaattttgcaaagccttcaggtgagccacaaataatcttggaaattattttaataaagtcattttggttctttttcttcattttccttaaagtcacctctaaaggtatttctctgtttatatcatatgtaatcagcttttggctaaagaacaagtggtagtaaatgaagactgccaaagcctcaaaaatgatattgaagaaatggggataattagaaaaaacagaagttcaaacattaaaattctggcactattagatgacatcaacctaaacctggtaaatcagttttcagaaaactaggtgcttattgcgctttcattttatatccaataactgcatcaaacttaacactgatttttcgttttaaaactgccaggaaacgctcaggaaggatcctttccaatgttgttaaaaaagctatagaagatggaataaaaatcatcttctgctcagtcagaatcccatgcatcagcctgtttaccacttcctcaggttccagagtgggtcccaaacttgtacttggatttttgatgaagccagtgtttacgaaattaggacacagacatgttgttttgactccagttatttgtaaggcagccagttcatctgtcaaagttttatgaaatccaacagcagcaaacttgcttgaacagtaagccagtaagaaggggaccgagacatgtccagctgccgaagccacagtgacaatatggccatggttattcttcgtcattgcaggaagaaatgcctttgtagtccagaaatgtgcaagtacattaacttcaaaagtcttttccaatctgaggatcttgtgtagcaaacaaatctgatgtatagactacaccagcattatttactaaaatactaacatctccaatttctgccttcaccttctttgcagagctgtaaatatcttctcggttgctgcagtctaccacaaaggtatgaaccttggcacccagtcccttgcatttggcagctgtttcctccagtccatgcttatttatatccccagagaaccagcttgcttttaagtttagccaattcataggcagtcagtctccccattccatgcccagctcctgtaatcagcacgatttcgccggtgactgattttctcctcttaggaataaaaagcttcacgaaggacttctagggagcagacgatcagtaacgggagaagccaggaggatgtccagaagaaatttcatcccttttgtggctgcgagcgtttggtgtgnnnnnnnnnnnnnnnaccactctaaactgcttttagagggtagctcgatctaacaccagaaagagtaggggcg

SEQ ID NO: 131285 - DNA, 556 bp, Homo Sapiens
gtgaaaaagaggtgctttttactctagtattccttgttctgggatcacttaatcactatttcgatgatgaaggaactctgaactcctaagcaaaccatgccatgacatactttatatatatgcacaaaagttgggtaaaacacaaaaccagcattttgacaaattcactttaaaatgttttccacatcaactacttaaaagaagttacagcaatatgatcttccactgctcaggaagacagagtgaacttggatatgatgaatattaaaaacaaacatacagagcacctgggtctggacttgtgggctaaagaaatgcttcctgaatttgtccgaggtgatgtgttgagcaaccgtgccacagttcaccagcagtgacactctagttcttcagtatattcctgttgtgaacctatttctttgaatttaatcatctgggatgattgctgcagtgtgagtctttagcattttgaaaatcccacagaagagattaagaaggttcctcttcccagaagacactcatataaagcatgcttctatagggttaactgttcaga

SEQ ID NO: 131286 - DNA, 1574 bp, Homo Sapiens
  misc_feature (48)..(82): n is a, c, g, or t
aaattaccctcaactaaagggaataagcttgcggccgcctgctcaggnnnnnnnnnnnnnnnnnnnnnnnnnnnnnnnnnnngggagacacttcttttatttaggaaggaggtctttcctactggcgccggctcctgccagaggtcggggtgacagcaggatcagaagcactgctctcacacacagtgggagtggaggatggcttcccgcagcctctttagaaagcccaggagttctctttatttcagagaagggcatttctatacaagacatcattccattacagtcgtcacttccaactacaggctcagggagacgactcttgatattcataggtatatatttactttaatcatattttagaaatcagctcttccacactaagatttacaataaaaataaaataatttgttctgtaaactatagtagaaagtttcaaatgtcttaaaaactatcttccatacaatggaaaaaggcttttgtgttcttttgggcaaagaagacccaaatacgctgagagaagacgcatgggcgtgttgctggagtgatgctggaagcacttctttgctacagacggttgctaagagaacagagtcactttctccccttcagcctggaagtccaactcttctcttgcttaagaatctaacctcgggatcttccaagatgcttaaggctgctctgctgttgcctggtccttggcagcagcaacaagctctgcgagagctgagaagctttttatgtcacttgcttgtagtccaacttttgtatctgctctcccaagtactcaacatctagggccaactgcagcctgattttgtcgtcgtcgctcatgccaccactgggaccgacggggttggcgggagtggtttttctggcttgtttcagccttttcaggctctcttccatcttcttcacagagtttaatacatctgacacggtttcatagtacttatgagtgctttcactgagagtgccttctagccactgctgaattattgcttgtttgagcttatccttgtgtccgctctgaagctggaataagggcttcagagcactgtccacataggaggaagctgtggttgggacctccttattggttcttcggtaaagcctgggaacctccagggcgctttttaggaaaccgaagcaagagtcacttaaatcctggatgatcttgctactcaaggagggcacacaggctgaaaaagagctctgggagtcctccagggctgctgagatagaagaaaaattcttaaagccaatcatttcaagttttggcttgattatttccaagagttctggaagctgctcctgaagcttgtccaggtctgcaaccacatacacgagctgagtgcgggaaatggaaaccacaggctttgtttccgaaggaccacttccttggtcttcagtgtttccttgggtgatggaaggttctttgctaccagttaccaaggtttcttgatctccttgggactttcattagaaatgggcctgagtgaaagctcagtgacaaacacagagtatcgtgacaaatcgtgcagagcctcgtgccgattcacaccgggcctatc

SEQ ID NO: 131287 - DNA, 558 bp, Homo Sapiens
  misc_feature (470)..(486): n is a, c, g, or t
  misc_feature (548)..(548): n is a, c, g, or t
agaaatcagctcttccacactaagatttacaataaaaataaaataatttgttctgtaaactatagtagaaagtttcaaatgtcttaaaaactatcttccatacaatggaaaaaggcttttgtgttcttttgggcaaagaagacccaaatacgctgagagaagacgcatgggcgtgttgctggagtgatgctggaagcacttctttgctacagacggttgctaagagaacagagtcactttctccccttcagcctggaagtccaactcttctcttgcttaagaatctaacctcgggatcttccaagatgcctaaggctgctctgctgttgcctggtccttggcagcagcaacaagctctgcgagagctgagaagctttttatgtcacttgcttgtagtcccaacttttgtatctgcaaaggccatgagaatgaattatgttactgcaattcaagctgaatattgggggggnnnnnnnnnnnnnnnnntcttcatcctctactaaaccagaagacagttccctgaagacttgtaggatattttttccctngttccgaaat

SEQ ID NO: 131288 - DNA, 1091 bp, Homo Sapiens
  misc_feature (609)..(839): n is a, c, g, or t
  misc_feature (862)..(875): n is a, c, g, or t
  misc_feature (1013)..(1021): n is a, c, g, or t
ttttatgaacacattttgcccatgacattgcctacaggatttccagatgtgacttgcactcagaagatcagtggtcaacttcagaagttcttccatgcttagatcatgtcttcagaacttagatgtgaaaatctacacactgggagatgctgtgagccccaaggttttgatggagtttgcttggaatcctcttgacttcatgccacattgacgtgaactttgatgtataataagcagcagcaacttcatgtgaaaatatggtcaggtagttatatgtaaggttacgtggtccagtaatgtcttagattgataaattaggtatggaatccatcagtgttacgtgatgagaataggtgaacacaccttgtcagtgatgatgtaaacttctctccttggcaggacatgggcaaacatgctgattggtgcaaatgtggtgccgagctgtccatagctgcagtgaaagatgaagagcaagaccttctctaggttttctagctttcattaaatgtatttttttccccagagctaatttgaaagttgattggaccactgtggatggggtgtcattaagaatgtgggaaataggggccgagtgcggtggctcacacnnnnnnnnnnnnnnnnnnnnnnnnnnnnnnnnnnnnnnnnnnnnnnnnnnnnnnnnnnnnnnnnnnnnnnnnnnnnnnnnnnnnnnnnnnnnnnnnnnnnnnnnnnnnnnnnnnnnnnnnnnnnnnnnnnnnnnnnnnnnnnnnnnnnnnnnnnnnnnnnnnnnnnnnnnnnnnnnnnnnnnnnnnnnnnnnnnnnnnnnnnnnnnnnnnnnnnnnnnnnnnnnnnnnnnnagacagagcgagaccctgtctcnnnnnnnnnnnnnngaacgtgggaaatatgaacctttgaaagttaatctgtgaattgaaagtttaacaataaaagtagttgtttgtttcctttggaagagttttgttccagatgtttgtaatttggttgtttgtaatttggaatgagagaannnnnnnnncttaggagtgattgcaagaaattaacatgaacaacagtggtcataactgattaaaagctgacacgtcagt

SEQ ID NO: 131289 - DNA, 415 bp, Homo Sapiens
  misc_feature (45)..(45): n is a, c, g, or t
  misc_feature (55)..(55): n is a, c, g, or t
  misc_feature (64)..(65): n is a, c, g, or t
  misc_feature (73)..(73): n is a, c, g, or t
aaaggtaccaggagcaaatccataaattttattataaaaacaaanaagatgaaancagagcacnnaatgaagnctccatactgcccataacacatcagccatatgatcagaaaacccatttctaaagagcaatggttgctggtgtcacagagttttattgcattcatcgggggaaagggagatggttggaatgaaaaagatccatcagtcttctgacaggaagatgttatatgggggctccaacccctaactgggtactcctcttgctaccacctttggagcagaagatgaaggggagagggagcttctccctatggcctcatggcttcttgtgagacagatcagtccagccagatacagagcaaagcagctttgcatcaccacaggccagttgctgatgcccagctttatgtct

SEQ ID NO: 131290 - DNA, 745 bp, Homo Sapiens
tttttatttgtggttccaaatgtcgcctttactgctgagacaatggtggtgcaggaaggggagcctgcagtctgggcggggggccaaggaaggggagcgtgtgcttggcccagtgccgccaccactggggagtgggaggctcaggcagacctagggccctgggaccgtggcccttggctttgttctagggagggcacaagacagcctgcaggtctttgggcagggagccgatgaccgtctcgatgtacagctgtgcccgctgcagcgtagcctccttcacagggagctggtggccctgagcccgcaccagcttctcacgaagtttcaggaccaggtccacgacctccacctcggacttgtctttcatccaggtctcgatgttcgcctcacagatagcctccaggtgcagggcctccagcttcagggccatctccttgtgccgctgccggtaccagccatcaaaatggggggacttgaaaaaccgcctgtagagacccagccagtcgcccttgaggatgcaggtgagctggggcccagcatgctccaggctacgcaggaagtcatcctggctgaagggctggatctgcgggggagtcttccagggcgtgatgctcttctgcaggggcatgaggctggccatgtagtgctccagggggatgatgaagctctgggtgagctccaggaggtgccgccgcagcagggcgctctgcacatctgacggccgcttcttctgcatgcccttgag

SEQ ID NO: 131291 - DNA, 367 bp, Homo Sapiens
cacccaggcgcacttctggccccacatcctccgagtcggggagcccaaagatgtcacggagacctgcctaagcatgtcaacgctgacaaatgccttcaaggttgaagaccctggacaccaagccaggcctctacaccgcttacacggcccacctccaccgcgataaggcgctgctcacacgggtgctcccgggcgtgcacgaataagcggccgtcagatgtgcagagcgccctgctgcggtggcccctcctggagctcacccagagcttcatcatccccctggagcactagcattgccagcctcatgcgcctgcagaagtgcgcctgggtgcagaagtgcgcctgggtgcagaattgcgcctcggta

SEQ ID NO: 131292 - DNA, 602 bp, Homo Sapiens
  misc_feature (1)..(1): n is a, c, g, or t
nttttatttgacaaaagacaaaaaagttatttacagtagtttttgctcaaataattcaatgggacaactgtgcttctcctccaggtttatcttacaaccaaacccaagcagagtctgccctacccaacaccccattttacataatggggaaatgccaaccagaattcagcagcatggctccctcaccaccctccattgctcagtgcactgtggggagggaaaatcccacctcagcccaatacacttccagagttccctactacaggcatcctgcagcagttgcaccagacctgggctcactgacagggctgggatggaagaggctgggcaaatggcagcatcagttaacctgggatgaagccatgttcattcttccccactggggcctcaggagggtgaggatccctgattccccctggggcacacggggagagggcacgggaggaagaagccagagggaggcaacacagagagcccaggaaacttgcccacctagagagagcaaagctccctctccttcagcgatccgttcacactcccacagcaacagatgggcgactcagaagttggggagcctctgtgatggcttcagggatcttccc

SEQ ID NO: 131293 - DNA, 397 bp, Homo Sapiens
  misc_feature (354)..(354): n is a, c, g, or t
  misc_feature (356)..(356): n is a, c, g, or t
tgagccaccacgcccagcctcttttgctgtttcattgctgacagtgttcaacaatatgccccatctttatatatcctaagaaacactaatcctaggttattgctagccaaaatatttttgtcctgagtagtgtcactgggccaaaagatagatcaggacgacagcctttagttttcctgaaatcaccaggtcaggcacaaggagaaaaggttcctggatactgactaacttgggtgggtctagccaggagaaagacagtaacatgtgttctgtactttctgggaagatccctgaagccatcacagaggctccccaacttctgagtcgcccatctgttgctgtgggagtgtattncngctgaggtgggattttcccctccccacagtgcactgagcaa

SEQ ID NO: 131294 - DNA, 2873 bp, Homo Sapiens
agattgcaggggctgccacctacaaggtgggaccacaggctgcctcaccgggattgtctgccactaaatagctggagtcacagattgagataaatgccaccttcaaggttgcagtgaaaagcataatcctatgtgatgaatttatatgtgttattttttaaaaagctattttattactgcatgttcccgtcccgtcttgtgaatgtgagtccccgccaccacgtgaggtgcagtcgttgcagcggctggtgcaggagtgcagctggcgcgtgtgtgatagcatctcgtaggtgttgctgcacaagagttaaccagagtcaatgccaaacacatagtatgagaagtgtactttttaagaaattaatttatttgagttcaaatatttttgaaatataaaaattggttgtattttttaaagctataattcttgtagacattctgtggttaaaaatttgattgtgcttattaaaaatggtcatctatgttttgcacttcagctacgtgaaaataaaatttctttgggaaggtgacatttggcttcctgattacgggagggagttggttatctcaggtggagcaggaaagcctggttgattctcacaccaggatgggactgggacttcccaggatggagggaggaggccatttctacaccatactttgagctactgacagcaaaaccctcccaccatactgggtgcatcttgtttactcttgactaacatacacttctgatttacagcagaagcctcagaagctaattcagttctcctttggcatgccactggataacaagatagtgagggggcagtgtgtacaagctgtggacatgggcatttcctctctgttgcagcaaggcggaggaaagcccagggagagtaaaacgctacaatctttctaacagctttgccctacaccaccatctaaatgattatgaccaagtggcgacatagtattttattttcctagaattatgtccagctgtgagaaagccaggttcaaatttaaatcctttaataacctgtcccagaattactaacaatgagacttaaacaaattttgatttgtgaagaaaacatgaaaaaagtccaaaagaaaccccctcaaagggcccgagtgtcaacagttcccctttggagcagctcatccatctctcaggtgggggtcctccggcaggcagcttcctctgtggcgccaggtgggtccagagtgggcccgctcctttagaagtcaggcaggccaggcagagggaagagagaggcgaagctctcaacctcctcccggagagcctgcacggccgcctggtacttatcccctgccagtctctccttgaactctttcagggtggctctgacaccagtgtcgctctggatctgcagggtcagctctatccctctgtgaataaagtgggctactttttggaagtctttttccaaaagtccacgggacgtcagtgctggggtccccagccgcagtccactgggccgcagagcgcttctgtcacctggacaggtgttcttgttgcaggcaatagaacaggcttctagcaccttctcagcccttccaccatctgtgcctttggaacggagatccacaaggatcaaatggttgtcagaaccacctgtgactattttgtagcccagctccgtcagggcctcagacagagccctgcagttggccaccacctggtgttgataaactttaaattccagagtcatagcttgcttcagtgccacagcaaccccagcaatggcgtggttgtggggacctccctgcaggccagggaacacagcagaattgataagagactccaggttgtacagaatctctttgccagtcttgggatccacacttttcactcctttcctgtagaagatcatgccagctcggcagcctcgcagggtcttgtgagtggtggtggtcaccacatgtcagtgttcaatggggagggcaccacgccagccgccaccagcccgctgatgtgagccatgtccgccatgagatacgccccgttctcatctgcaatcttccgtagccgggcatattccaggtttcgggagtagcagctggttcctgcgatgatcagcttcgggtggaagaggcgtgcgttctcctccagctggtcatagttgatgtagccagtatctgggttcaccttgtagggcatagattcaaagaagatggacgtggcagagattttcttcttgtctgtcatgaacccatgggtcaggtggcccccatccggaaggtccaggcccatgatgcgcccatggggttccaccagggcagtgtacacagcaaagtttgcaggggagcctgagtagggctggacgttgaccccccagcactgtgggtccagcttataggcctgcagggctcgcttctgacagagggtctccagttcatcaataaactcagtcccgccatagtatctctggcccgggtacccctcagagtatttgttatttaagcaagagcctagggcctccaaaactgctcggctggcgaaattctccgaggcaatcagctccaatccaaccctctgccggttactctccttcttaatgatgttgtaaacctcaacatcactgtctttgaggggttgtgccagcatcttgtcatgtgaggaccacaggtcagcatccttgtgggccccgttgactggcatcgtcattgcactggttcgaagctgcctagcgacgcctccgtcctacgccgccgccggtgccaccagtcccagacccgctgacccaacgccccgcgcaccgccgcgggccagccacgtgaccagccgctccaaccccaaaccccgaacttggcgctggaccgctcgagcctcggccgaattcaccacccagcctcgtacctaagcc

SEQ ID NO: 131295 - DNA, 1041 bp, Homo Sapiens
ggtcagtcgacgagttcattttattgatgcccactccagggtgcatagggttgaggggtgtacaagaggagaaccagattcagtccatgcctggaggttagtctggggggtcggcgggatggacacacagacagacacatagatctggcatctgatagcagggcatacagtctcaatgtaggggcactctgggcacaggtagtcaggaaggacttcctagagaagtcctcacaggggggtgggggagccaaggagcaaggcagccatcagaaccttcgccttttgtacatttgtaggcaggtgacttttgagaccagtggaaccagggtgagcacaaagggctggggtctgggaatggcaggcagcaagggcttccctctcgcctcgatcgatccctatagttgggggaagccatctcgctcccatcgctcccaattcttggacctgtactttgccttctgtcctacatgggcccttatgctggtcatccatcctccagatggttattcaaggcttccctgagacaatccacgtggaccatggtgctctacccagtgcctggcacctcagtcatccacccccagtcaatgcacattcttgtcctaagtgctatctacggactatctaggatcttgggttccagctctgagtggttgtcagcagtgactgacaccaccaggtcaggtccccatagcaggcgcagaaggtccaaatgagccctaggtaccttcagtgcactgtgaaggtgcagagctgtggtcccagctctaccttcccgggggcttggccagcttcttgcactggcttgctctcacgtgttcggtgggccccattggacaatccacgcttcgctgtccgtgggcatgtgggcatcgcttctcggatatgccgccctgatcgaagagagcctggggctttagggcccacggttccagtcttgtagcccgcaggtgaagcttcttcgccgtccagacccttttttcctgtccgcgtctggggggggaccgtttttaggttgctctgctcgtgtcggcgggtctc

SEQ ID NO: 131296 - DNA, 635 bp, Homo Sapiens
  misc_feature (181)..(190): n is a, c, g, or t
cacgggagctaaaaaggacaactgatttgaactcgttgaggttgagaaccagaggagagaaaagggtaggcagcaagggaatcgtcaggaataaaatccacaagatgatcaatcccaaagccaaactgcaggtcccagataaaacctaatgggtgatcttagatgtgctcgagtgaccagnnnnnnnnnntcaaatccagcttttttttccttttgtggggaggggagaggagcagtgaccatgatagttccaatccatctgagtattaagtccttctccagtctgttttgtaaatgcatctccatccagtcaaagtgtgaacagcatccggttccctcattgaaagttaggccacaggagactccagtcttagctctgctggtgtgtgcaagcaaactgcatgtctttgcttgcatggacttccttcccctccagggcaggctatacccaaaaccctttgggaaaagttccagcttcagctttgtaaggtattcatgttcctaacaggtagcccacttggtgccaggctgcaccagccacacacaggtcaggtggccatgtcccagagaggcccagtgaggcttgaaaggcatcttccttgtttcttcagtgtgtgagtgcataggcccacaca

SEQ ID NO: 131297 - DNA, 722 bp, Homo Sapiens
tttacagctctaagtcaccactttatttctaagagaaaacctgcattttcacacacatggactcaggggtttcgaacacacggtttgtacatctgcccgcttaggttgctctgcaaaatgaggaagaagccgcatcgtgctcacaaataatacacattccacatagcagcacagccttttgggcatctttggagttttagacggagcttctggagtcacagagccattcccaacccaggcctggcatggtccctgcccttgcatcagagtggcctgggaggtacacacatctttacaggcccagaaacgccaaaggctgggaggctcttgttctctggtgaatccggattcaagacaggcttcgcaaaagcagctcttgggccgagctccaggcctagccctgaggacccctggcctcctggcgcccctccagagtctcacgcttctccaggcactggggggtggggaagggtggcctcagggacataaggaccagggagcgtgtgatggagagatttctcactgttcttctgagggggtgcagcctctctgaaggtcactgtggagggcgcaccaaggcctggagagccttggggagagatcaggccccacagacctggaagctctgccccagtatcccccagcctgggcggccgggctgtgctccctgagggacttactggcagcaccctgccctgctgacccctggagcagctgattga

SEQ ID NO: 131298 - DNA, 2090 bp, Homo Sapiens
  misc_feature (2049)..(2049): n is a, c, g, or t
aacagtatctccaacatacattttatttagtttaaaattccttaatacaagaaggtgttactccttaaccactgctgcagcctcaccggaccctcctgatgtggatgaagcaggcggggtggctgctggtcggctgtggaggcacctccaggcacagggcctagagggtgagaacactggtgacattaatgccatagctgtggcttgggacagggattgagaggcagctctcagggcacatgggcatcagctttcacaggatcctgttcccagtcaggctgcactgtttgttgttgtcccttgggcaaggggatcccaaacatctcacaatgacagcttcttctccaggatctcctttatcatgactggatctgctcggctttgagtcgctttccggaccaacccaatcagtttatttatagctctggggtttctgttcttcacatccattaccacttgaaggatgggcctccatcacagagtgggcagagctgctccagtgccccctggtcctgcatcagttcaagctgcttttctgaaacaatctgccctggagtcttgccttccctcttccacagttcctcaaacacctgtttagctgctgatgaagaaattgttctgctgtccagcaggtcaagaagctcagcgagtgcagagggtgtgacaggactctcactgacagcgaggttctgttgctttaaatagcccagaaaagtgttgaggacccaactagtcaccttttttggctctgccctagtttcttttatcacattttggaagaaactccagtaggccgacttcgttcagcaaagtgaagctgtgttccagcagcatcccatactgttggacaagcttctctcgggtcacactggggagctccgggagtgtctcccgaatctggtcaatattgatcacttgctgtgggtctgcacctgcgggcagagatgtggcgtcgtagagcaccaggggaggcaggttgggttctggcatgaacctgtagtcctgttttccttctttgtctctcattgacatggtgcaccccagcttgtgatgaaatgagcgtgtttcgttcagaatttcacctccattctcaagttcattgatttgcctctgaatttcatagtctatggctttggccaggaacctgatgctgttgagattcttcacttccgttcgaacgcccaaaggctccccagggtgatgcacggatatattggcttccactctcaactggccctctgccatgttcgcctggctggtccccagggcttgaaggatcagctgcagctccctgacagctgttgccgcctcttctccacaggacatgtcgggctccaggaccacctccagaaggcccactcctgccctgttcaaatcaatgagcgtctgagacctcaggttgtcgtggaggcttttgccactgtcttgctccaactggatctgcttgatcctcaccgtcttggggatcacctgactctgcttcttccctgcacagacgccatatatcaagctcccattcacagcaattgggagcctctgctgggtaatttggtagcctgcagggaggtctgcatagaagtagtgcttcctgtcaaacaaggacttcttgtttatgtggcagttcagagccaggcctgtcatcaccgccgcttctacacacctcctgttgagaaccggcaaagttccaggtagagatgcatcaaaaaaagaaaccaaagaatttggaggtgctgaaaagcgaacttgagatccagagaagagtttagagttggaggaaatctgggcatgaatttccaaacctaccacagcagcccatttgtgttcacctttcctcgtcttctgggccgtgtggaggggctgctgagccactgagctctctcccctaatctggttggatgtggacccagtcggagcccctcttcggtggcaagaaccaccgtcaacccgggcgaaagcccaacgtcttccacggcagccccagcgcagcatgggcgccgccattgtaactccaggatcccgggaattccggaccggtaccatccgtgtttnagatcgagcggggagtgtgggggtaaaatagattaaaaata

SEQ ID NO: 131299 - DNA, 1147 bp, Homo Sapiens
  misc_feature (901)..(909): n is a, c, g, or t
aatgtaaaactatttttttctttattgaaaatacatctacaaagtaatgcttcccagtccacactgagtgcatgtgtatgcagagcctgtgatggcttggcgagaggatgggctccccacaggacctttccataagaaatggttagtatattaaaaaacacatattgtgtaacagaattaagttgatatgattaagtctttgctctactagtgtcttaagaggacagccacgtactttaacatttgtagtgtatttccgaaatagagcctcgacattaaatggttactgcaccacagcctaatgttaacttttatgcacagaatgcttggggtctatataaaaatatctctaattgtatatcagaggatctatgtctagatttttcagtttgttagcataattaagtccattcttcaccattttcagccagaaactcaaacacagctgctactgcctgacagctcccactcagcgtctttgactggatattccttagggggtaaaaattaatctctaaacctgggagctgccttgcctgaaactaatgcccctgctgtttttttctcataacctcattaacagtgtcttcatactgattcatcttctaccatttctcttatggacacttactaaacctaagcaaaccccactccagctgaaagttttgaatgatttgataagtgggattcccagaactaataaatattttgtttccctcattctaaggacttttgattaaagaaaaacactttcaaataagaaatacccactcaactcatggacttctattagagagctcattcatttgacttctttcaaatatataagtcgtcttatgttttggtaagcagacttcacggggggaatgattttggactcgagaaaaagtgtttcaggtgnnnnnnnnngccagaaaaatgaacctcttcttttttattcttccttaaagaagacctgtactcttggtgttttcaaatcctttgtttgtaatgttgcctgtgctcaactctttcctagctctttagtgttccacagtgtgaccacaagcacccttgctagctgctagtcttctcatctgttttcgaagtctatcatccccggccgtaatggccgaattcccgggcatatgtccggtaccgtcgactg

SEQ ID NO: 131300 - DNA, 1110 bp, Homo Sapiens
gaagtaaactcaatttttattcttctatataatacatggatatatggataaattttcctttaaagagtttgcaaccctgaggcaatgtccttgggtacgtaacgtataaagcaacagcaaatgaaatctgaatgcgggaatgacaactggacttcgaaacataatttaatattcatgaaattgcacacataccaatagtattctatgtctcgtctagcctcttaatccaactatctcaactgccttgcagtttgcctaccagacaccccaactctctacatacattctgtcatgtaaatgctgaccttctgactgaaatttaataaattaacatgggatttacatcaagggatttttgtctggtgagtgcattgccagaaagcatgcctagttcctgaccacagcatctgcccacataaaaactttggcccccacaggggatgagatggcatctgactgcagtaacctcgaggtccttgagggtcccttgggatccaccaggagcaagtttttcatctaatctgagggccgcattaagggtatggcagaggaggggaaggccatggctggttagaagagatggaacgtcacagctactgggttacagaaccagtgaatctgatgtcctgttttcaggacgcatggcccatccacggagaagatggggcgacagtagggtctaaaggtggactgtggtacccgggggcaggaagagggacagttaggcctagatgtaaggagaccactatgctgcttcttcatctacctcacagatggccacagacctttcagtacatggcggaaacctatttctgaatattccgttttcccaaagttttataaaccatggtgagggcaaatgcttatgagaaactaagggtgtgttcattatattatttatatattatcatcttccctctgaggataacatacagggtaaataaaaagcagacaatagctaaaaggtgactcgagctgtaagctctttcaactagagggtgatttttgctttaaaatcatcaggcccgaaaagcaaatcttgaaagcaaatctaacttggcccactgataacaatgatcctgagtccccctcgtccgactcaccccagag

SEQ ID NO: 131301 - DNA, 779 bp, Homo Sapiens
  misc_feature (699)..(699): n is a, c, g, or t
ggggattttaaaatcagtttattttactcattattcttaatatttaaggaaaacaatgtaaaatgggaaaaaatgtatcttctgctacatcaaaaaagcattttaatccaaaccccactaaaaattataacaagctctgcatgatttcataaaaatgaaaacatgaaagttaacaagcattgaaaatgccaaattatcacaaaatcatagggaggtggtggtggtgatattgcttcttgacttacactgggatttacaacatgattactaatacacttaacactcaaggaaatatctgatacagagaattacttctacattgtggccttccagagggcaaagactattattcatcttcgaatagtcaaattctaacacagtatttggagtaacagtaggtgttaaataaacatttgttgtattgacatgttccttttataattaatgtaatgatttcttggtaatttattatacaatattttctggttagattattgttcaaaagcatattacatattatctaactttaattagatatcaaatattagaaaaggctagttttaaaaacacaagaaatagttctttcagttttactttcctatttcataaaaaaggacagtaagaatacattgttagagtaacatgaactaattcacgtgcatattgaaattagatagaactaaatgcttttctcttcanaatgtccaaggtttttattcagtttactctggttggaatctttccaagcatattaaatagttttctgctttcctaacatg

SEQ ID NO: 131302 - DNA, 712 bp, Homo Sapiens
  misc_feature (562)..(562): n is a, c, g, or t
  misc_feature (666)..(666): n is a, c, g, or t
cttaaacaatttggtcacgatgcacctttgatataaaagcatttttaaactttattattaatactcaggacattaggaatttccagatttttttcagtagcatttgtagaaccacttttggtaacaaatacagtagttaggaatatgcatccaattcagaatgcataataatgtttatcctgaatcctttccggctaaaaacagggctggcgctgtgatgagatatagaacgagaatctacaaaaaacactgtaacatgtttgttttttcccagaggctacatcctcttttgctggaatactttataaatacatattaaaaagtaaggcaacaactccaaacagtccaagctgtttgctcaactcttttcccaattagatttgcaatcccggtgatcaatttcatggttgtattgtttagtgtttgtctttcttatttgaaatggtgcaaaaggatgtttttctcacatttctaaaacatctctggtatgtgtgttcaatgatatatgcaactaatactggtcaggtactgaagcctgtgatgtcccagtgcctgttttcanaggattcaagacattgatttggattcaccataaactgatgcatgaatccgatattcccttccctactatgtttatcacctcttctctcttaactcctaattttnaaactaaaggagtaccaggactacctggttactgggaagatgttca

SEQ ID NO: 131303 - DNA, 1451 bp, Homo Sapiens
atttgttagttttaattttattctgcagacattatgcagttctataatataaaatgaatacaatactaaaatctatttcctttatttacatggtgtaacatttccaataacaaacatttctaatcatgaaagatggtgttaaagcagaaatattgtcatgattgagtcaatgggagaacataaaatatgctgtatttcataatttttccgtaagaaaatgtctagtttgtttaaatgcaacaaatactgtattagattcactttataagccatacactccttcttgtctttcttttgaacacattctggaaggcagctgtgaagaacggagtagcgagtccacgccattcaacatccatcagaaaccctattttaatcatcttgggatcgattatcttcaatgataatagttcttctaggataagattcaatttctacaaatatatatcgaaaatcatattcaccacttcctgggttctctttcacttgcgcatacaccgttccttgcttccctggctcagagccctcaatgtagaatttcacacacgtgtgtttcagcccatcttttacatattcagtgaacctgacatgctgccggcgaccccgccttgtcacctccccatagcctttaacagactcaccaaagacaccgatcacctcaggatgtgatctgcatttttctaaggctctcccatatatcttgctaggactggatgaagaaaaaagttctttgaaaatcgtgtaaaacaagccacctgtaatgctgattccaaaaagcaccactattaaataggtaaaatctcttccggcttctttcactttttgtgatgttgggacggcggttccccctctctgactcctgtgcacagacacttgtttgctgccatcctcctttgcttttcgggggctcggtccctgcgtccagatggttttctgggtgactccaagaatacatctaggtcgcagcgttttcttttgatattgaagcccacatctcaaactgggctcagtcttcaagcacgctttgttaagcacgatgtatggcaaaagcaatcgctttgccgaggacctgtgcagcttctccgtatactgtacggctcgtagaaaagtacaaatcatgttcacggaaaatcgttccgcttagggacgatgctaactacaattaggaaagctttagggttcactacacatgcggccggacacgtactcaagcctatacgtttacattacatggggtgttaggcaaaaacgtcagtttccgcagcgtaaatgaaaacgaaaagtctccagggagaacctgatgtctaccttcccttctgtcttctttccattttaattaacaggctctgatcaccttctgggctgacattcacagtgtccccgccatgccttcgcaaagtccccggccgtaatggccgaattcccgggcatatgtccggtaccgtcgactg

SEQ ID NO: 131304 - DNA, 942 bp, Homo Sapiens
ttattagacatatttgttagttttaattttattctgcagacattatgcagttctataatataaaatgaatacaatactaaaatctatttcctttatttacatggtgtaacatttccaataacaaacatttctaatcatgaaagatggtgttaaagcagaaatattgtcatgattgagtcaatgggagaacataaaatatgctgtatttcataatttttccgtaagaaaatgtctagtttgtttaaatgcaacaaatactgtattagattcactttataagccatacactccttcttgtctttcttttgaacacattctggaaggcagctgtgaagaacggagtagcgagtccacgccattcaacatccatcagaaaccctattttaatcatcttgggatcgattatcttcaatgataatagttcttctaggataagattcaatttctacaaatatatatcgaaaatcatattcaccacttcctgggttctgaaaaaaatgtcatcttgggatcgattatcttcaatgataatagttcttctaggataacattcaatttctacaaatatatatcgaaaatcatattcaccacttcctgggttctctttcacttgcgcatacaccgttccttgcttccctggctcagagccctcaatgtagaatttcacacacgtgtgtttcagcccatcttttacatattcagtgaacctgacatgctgccggcgaccccgccttgtcacctccccatagcctttaacagactcaccaaagacaccgatcacctcaggatgtgatctgcatttttctaaggctctcccatatatcttgctaggactggatgaagaaaaaagttctttgaaaatcgtgtaaaacaagccacctgaaatcacagaaaacaaagatgaagcgaagcaagggcaacataaaaagtccagtttaaaaa

SEQ ID NO: 131305 - DNA, 369 bp, Homo Sapiens
tttttcaggttttgaggtttattaaagtaaagaattagcaaacaatatgcaaaaacaaagttcttaagagttatggctttcaaaagcacaatatagtaaaacctaatacattttcataagtatcaaaataacagaattgaagcatgttgctagaatttcagcttctacaacataaacagaagcacaacaaatacaaataagcagcagacctacagtgcagccactagcttggtcttcattatctgtatatgaaatatctttttaagaaaatgtgggcaggtagatacaaacattctatttccatgattacaatcctcttcgattttaaaataagtgaatttcaaaatacaacttacgccaaccatattt

SEQ ID NO: 131306 - DNA, 950 bp, Homo Sapiens
  misc_feature (129)..(137): n is a, c, g, or t
  misc_feature (140)..(195): n is a, c, g, or t
  misc_feature (776)..(820): n is a, c, g, or t
cggcgcccctacggttctttaaattatgggcccccctctattggggggccccctttttgttcaaaaaagaaaatggggtaccgggtaaaactgtgggccccccgtgagggggattttcttagaagcggnnnnnnnnnatnnnnnnnnnnnnnnnnnnnnnnnnnnnnnnnnnnnnnnnnnnnnnnnnnnnnnnnnctttagcaaataaaagtgaatgttttaataaagattccactatatttacacatttatttttctgataaaaaattacaaatttaaaaattggaaactatggacaagtataaagaaaagcttaaattccccatatgcctgtcttagcattgtgatatacttatttttatcccccagacatatttatataaatttatttatgcaagcaaacatccattctgtatacacggtttattctgccaagctttactgtctcttaaaccctttctaaatatcattacatatccctaaaaacctatggtttcttttttaacagacacacagcagtgctccaccagatggatatacagcaattcaatcacgttcctctggacggccactggcttccagtgccgggaggaacactcaggtgggaggctctggcagtgactggggtgggcagcctgatgccaacctctaaggccctggcagccacacctccctgccactgccaggcaagcctgggctactattttaatttactctttgcttgtctggtagggaaaacagcatgtattttaattcgcattttaactactaacaannnnnnnnnnnnnnnnnnnnnnnnnnnnnnnnnnnnnnnnnnnnngcggtttgcctgttcacatgattgggctgcattccatctggctagtcatctctttctaattgattccaagacctgacagcacgtgatttctctaattacttgtttgcttttacatcgtgttttgctgatt

SEQ ID NO: 131307 - DNA, 859 bp, Homo Sapiens
  misc_feature (73)..(134): n is a, c, g, or t
  misc_feature (807)..(807): n is a, c, g, or t
taagttgtagtctggcccatgagggaaattctttatttggatgcttcagtgaccaagagacagagcattaggnnnnnnnnnnnnnnnnnnnnnnnnnnnnnnnnnnnnnnnnnnnnnnnnnnnnnnnnnnnnnnatatgcaaagcaaaggcatttcacaggtgaagggatagggagtgggggaaggaggccacgagagcagctaggggcttctttgacacaatgaagagaagcctctgatggtgacactccttggaattctcgtctcaaggttacaaggaaaaatctatccgtgtggactcagtcccaggccataaaacacagcaaagatagagaaatctgggtgtggggcctgggaaacgcctgttcctcactgtagaaacctgcatcagctctctctttctttccctgggacccagaaatcacctggtggatgatggggaaggctagcaccacagcaaactgggcaagtggtccgctgcacaagggggaagagagggctagtagggccgagggtagcaatgaacctcacagctagcgggcatgaggcagtctgcctttaggggcagaaccctcagggagacttgcatgtggggcactttcccgtgtaacctagggtcagagcacctctgatggaggaggggaaaggtcccatccccattggagtgtcctatgatctcagtggacatggaggccgcccccagccccagctcgttgccaactgctgcagatccttagcaccattcaggaactgtggagggggcagcgggggtagcaatgctccgccaagattgtgtcactgctccanggaggatacttcacagttggcagaaacctgcgcaactggccatatctggtct

SEQ ID NO: 131308 - DNA, 896 bp, Homo Sapiens
ctaactttgaaatcagtcatgttctttccagatccctgagacccaagagctgagtcaatgaactgaggaggtcatcaagagagacaggtttggcctggccccacagcaggggaagcctggagccagggacctcctaacagaggaaggcagaggagccttctgaagtgcaaactggagaaaagcaattgagcactgattttaggatcttacttgtagtttttctcccagaatttcactggcctgacatatgatgtgatgaaaatgacactcccaagaaatgggctcaatggggtagaaaagattgatgtggcaatcgtctgaaagaaaagcatggcagaatgaggaatggcaaagagctgagcaaacacgtgaaacgaagaaccccaagccatctgccaaggagccacatatgtcaggacgaactgtaacttgtgaagcaggtccccgagcttgctaaatacaatggacaccatgaagaaatccagtaagaagctctctgaaatatctttgtagtccaagtggaccaagatgacagtgaagctcaagttaataaactggtaaaccgggttgcagaatgatgtccgcaacagcttcatgccagcaatgatcatcagaaaaatgtcccagtgggtaccaagtctccggtgattgcttattaaaaatgcatcaatagtgagggcattcaaaattagcgctgggtacaagatgtatttttcaaaacactgaagccaaacatagagtctttcgaaccacattaaatgggcaacattcgcaatgacaggaatacagtgctggcgctgactgcacatgataggacagcaaccactgcgcagacgatgagatcccattttgagacatccgtcactgaatctttcatcttcttggggagagggtca

SEQ ID NO: 131309 - DNA, 1618 bp, Homo Sapiens
ggtccggaattcctgggattttttaaaattttttatctttatatggtttcagaagtatgaaccagctttctttttattattgtgagatcattttgttttataacatagttgttgactgttaatatggacctgctagaatttggatcactttcaattgaagtcagggtattgtgcataatagaaagtattggactgagatatttggttaccatggaggccaatgcttttttcatcttattaaatgtgatgtgacttttttctttgtacagaagagtactgtatttttgaatagcctactcccaagtaagagcaaatctgtatgataacattttttcctctggacataagacataacagtaacacgatgtacatttacaagcggccttatgtacatttcccaacaatctttttaaggcaaaattgtgaccatatgtgtataattaaaatcgtttttaatcctttgcctatgaaaatattttggaaaaaaacttgctgtgtatattcagtttctgaaagataaagaaagtgctttgtattttgttgaagtcagtattttgtataaacatttatgttgacccacttatgttcagtgctgaaaactaaaatgaacatgctattctgtcagctgaatatggaagagatctttttttactagagatctgcagaagaaacgcaatcttctgagcacaatatggaatctaaaggttttatcacttagttgttcatattatgaacctaaaaataatggcataaagtttggggatgccaggcatactttttcatgtttggtgttgagttattttacttttctaacccaacattccttggtgagaccattaaatccaaacacttgtcaccgttccttctcatagtcactctgggtcatcagcatgtcccagtcactgcagcaactgccttggtgtttgtttcatttttttaaaaacccacacaaagccgctgtctcacttttttcttactttaccaacctcagagtatttcggcccgtatcgaacttttgttctcagtatcagcccatggtttcaggatcaaagctgtcatgttggagattggtaatggctttcctgtctttgtacagttgaattcctagtcttccttcatccttgccctctgttggcacaggcattatctctgcaattttagaaaatgacaagtagagaatactacattgagaaactaaaccctcttcttggggtcctgatactcattcccatttgtcccagtgctgacaacccaatcttcccaatactttcaggcctgctctacaaaagtacctgttcttgtagaaattttacagtctgccattttgggtgcccaccccaatttttaccttttagtaagttggcatgaaattttggtaaaatctgaaaatcacatttcagaataaaacaattgggcaaaactacctaggctttactcttgagtgtctccttttgatagggattgtttctggaccagtttgtctaagtcctggctcttattggttcatatgaaataatgttaacttcacttctttgtatattatgtataaattagaaaatgaaaaatgtgtgaataacattgtatgaaataaacctggtcttgtgtttttctctagata

SEQ ID NO: 131310 - DNA, 1042 bp, Homo Sapiens
  misc_feature (467)..(837): n is a, c, g, or t
  misc_feature (849)..(849): n is a, c, g, or t
  misc_feature (862)..(862): n is a, c, g, or t
  misc_feature (895)..(895): n is a, c, g, or t
  misc_feature (925)..(925): n is a, c, g, or t
ctccaatgcaacttgcaccaaagctttatttgctattttcatagtctgaatgcaacatctttgtacatgcaaaggtcatcttgttttattgcagtcgaccagatttccaactgctcttctgtgcatatgaaacttctttacagttacaaaatataaaagcacttgtagacgtccaatactctgtgaggtctggtaagccccatttgtttttacattaaaaatataagtttttctagatgacttctcagtcacacggttagagattctttctgggactggataaagtgcctctcgtctgccttccgttcagaactcctagagcttgtgaattcctaaggcaattgcaagaacaccgcaggcaggaagcttaactttcctacacaaagacctcgtgctccttttctatcgtgactcaaagatctgaggaaggacccagaagaaaggttaggaaaatatatactatactnnnnnnnnnnnnnnnnnnnnnnnnnnnnnnnnnnnnnnnnnnnnnnnnnnnnnnnnnnnnnnnnnnnnnnnnnnnnnnnnnnnnnnnnnnnnnnnnnnnnnnnnnnnnnnnnnnnnnnnnnnnnnnnnnnnnnnnnnnnnnnnnnnnnnnnnnnnnnnnnnnnnnnnnnnnnnnnnnnnnnnnnnnnnnnnnnnnnnnnnnnnnnnnnnnnnnnnnnnnnnnnnnnnnnnnnnnnnnnnnnnnnnnnnnnnnnnnnnnnnnnnnnnnnnnnnnnnnnnnnnnnnnnnnnnnnnnnnnnnnnnnnnnnnnnnnnnnnnnnnnnnnnnnnnnnnnnnnnnnnnnnnnnnnnnnnnnnnnnnnnnnnnnnnnnnggcgcggtgctngcgtttttcatangtccgccccctgacgagatcacaaatcgagctnagtcagaggtggggaaccgacagactaaanatacaagcgttcccctgggagctcttcgtcgctctctgttcggactgcgctaccggaactgtcggcttctcctccgggaaggtgggctttcaaactagcttaggctcatttgggtgg

SEQ ID NO: 131311 - DNA, 611 bp, Homo Sapiens
cagtaaaagataccacccagctagcagaaaggactcagcactgccttcagccttcacttactcagaaataactcatatctcaacctcagcaagccccaagcagtagaatgaggcttccctggaaagaggctgagactcacaggctggggatttaagaccctctcaccgtccaccttccttccttctttggtcttggaagatgaaaggctccatttttaaagggtggagaacagcagatcccctgctactgtgagacaagccagaaaagtgagtcaaggccagactcactatggggtcaccccaaacagcttcagatcaaaaagcctgccttgctgtgatgcccattgacagtggctgcaaatataaagggggggccacagggtctctggctttatttccacagggtagggagaagaccctgcagaaggctaggcagaggggccagccgggaatttcccagcttttctggttctcagcagaccaacgtggtctctaatcagaaagacaaagaggcaggagagcactggcctcagatatcccccatcttgtcctcttgcactgtgggccagggctgctgtgagctaggagaccaggttccagaggggctcact

SEQ ID NO: 131312 - DNA, 718 bp, Homo Sapiens
  misc_feature (95)..(300): n is a, c, g, or t
aaagcgtacacgtttatttgttttacatgtaatacaggagccttcgtgaggaaacaaagaccctaagaaacagttaaacttgtatgttttatgcnnnnnnnnnnnnnnnnnnnnnnnnnnnnnnnnnnnnnnnnnnnnnnnnnnnnnnnnnnnnnnnnnnnnnnnnnnnnnnnnnnnnnnnnnnnnnnnnnnnnnnnnnnnnnnnnnnnnnnnnnnnnnnnnnnnnnnnnnnnnnnnnnnnnnnnnnnnnnnnnnnnnnnnnnnnnnnnnnnnnnnnnnnnnnnnnnnnnnnnnnnnnnnctggttttatgacctacttcaggggagaaggtcgggggaaggtgagactgatcttcctgctgctttagtttcctcaaattccgtcaccttaaaatattttggggcagggtgtcctgaactccgtcaccatcaagtccaaaaccaaatgcttcctctccttccacctcgacatgcctgctcttcttcctctgttctttatcgatgaggtcacccaagctagaaacctggggtcctgcttgagcttatctccctcatttcaaaatcatttatatcagcctcgctagtacctcagttctgacttttatcagaactatggtagcagcctcctaatagatgctcacatcaactccacaagtcatcctctgacttgctgccaggatgtctctacacagagctcaactcagccattctactcctt

SEQ ID NO: 131313 - DNA, 1024 bp, Homo Sapiens
  misc_feature (787)..(787): n is a, c, g, or t
  misc_feature (847)..(847): n is a, c, g, or t
  misc_feature (915)..(915): n is a, c, g, or t
  misc_feature (960)..(960): n is a, c, g, or t
cttcaagctctcaaaactcagttttattgacttccagcatttccccctggatctgagctcagcccagctggttttggttcgtctctgaggctcagtgttacagcgactggctccaccactcccctccctggccactgggctccccaggcagggaggaggagaggcagttcatctgtgatgttggaaagaatgggcagcagggtcagaggccaaagaaagccatacaagcagcggcatgcctggagctgccatcacatgccaagccccaccacacacacgcccccgcgggtggccttgccctcgaagctctctgccagcccacactcctcagctttctggggccacaccctgctcaggcagacatgccactcgccctggcttgttcctgggaccccaggctgcccaagggaaaggtaccgctcccaggtgctgcgcggctctgccctgcccactctaaccctggggctagcaagacgtgtcaggggaaccaaggctcagatcattcccccttcatctacaaccctgccagccctacagggataaatcaaaagacaaaatctccccatctcacagcgagtgacaagccgacctgggctactacatgtcccaagatgcacagctccgtaaccatacaccacctcccccaagcgggatctatcagaaatgaggccgggcacaccgcactctgggatttgtagtccccaggagccagcaccatacacccaaggaagagagtgcacaggctaagattgggggcaaccttccatcgggcctcaaccgcaaccangccccggttctaactcgtgccgactcttggctcgaggtcaaattcctatagtgagtctantaattcgaatctgttctagctgtttctgtgtgaattgtatccgccacattcacacaaatacgagcggnagcaaaagtgtaagctggggtgctaatgattgagtactcaattantggcttgcgctattgccgctttcagtcggaaactgtcctgcattgtcatatgattcgctatggg

SEQ ID NO: 131314 - DNA, 1173 bp, Homo Sapiens
tttttctcaaaactcagttttattgacttccagcatttccccctggatctgagctcagcccagctggttttggttcgtctctgaggctcagtgttacagcgactggctccaccactcccctccctggccactgggctccccaggcagggaggaggagaggcagttcatctgcgggtttcttcccagctgcctccatctctgacaggctgtaggccatggccagctgcaggtcctcatcctcagagaggtcgctgtccaaggggcatgaggcaggggtctgctggacctgagtgcccccagacctggaagtgactgacggctgctgctcgcgacggctcagctccaagcccagtgccaggtcatctgggacaccattgattgtgactgacttcagctgcccatcctcctccacgttccacccgctcctgcccgttctccatgattctgcgtgtggtgatgcggcgtccttggacaaaggtggtagatgtagaaacagagcgaaaagcaccagccccaggactgaaggagaaagatgaggaggagaaatcggagtgcccagggaaggaggaagagaaggtaaagaaggggcctgagtgtcgggaaccccggttctgaagctctgagaaggggcccaggtcatcaaagagctctgcaaaagggtctccactcccaaagaattcccggaagacctcctcggggctgcggaaggtgaaggtgaagccaggcccaccactgccagcttctgcccgagatgggccagttcctgtccctgtcagcccttcccggccatagcggtcgtaaatctcccgcttgtgcttgtcagacagcacttcatatgcctcggccacctccttaaatttcttctcagcaaactctttattatctgggtttttgtctgggtgccactggagagccttgcgccgatacgccttcttgatgtcatcagcggacgcacttcgcggcacgtctaggatctcgtagtaggatgccatggcaactggtcagtcgtcaggcgggcctccttggggctcctccgccaggagtcccggcctcctgcggcgccccgcccctgccccccgccgggaaccgtctggcacccgcagcccggctcgcggctgctgcgtaggacgcgcccggcccagctgtgcgcgcaggcatgcgatcccgggaatc

SEQ ID NO: 131315 - DNA, 1364 bp, Homo Sapiens
  misc_feature (831)..(842): n is a, c, g, or t
ggaattaaaatacaatattttatttttgtcacctaaaaaacaagcaacccagaattaagatatacgtaagtttctcaaatttatcctaataaaattttgaatatttatacaatttctacagaaacatacagggtatcaaaatctgcataaatcaaatttataaaatgtgtagaaatgcatagtgatattaccaacttacaaagcaaggatatgggaattatttccaaagcagcctacagtagaaaatagtcattatggcagcagcttctgatgtttttgtttggtaggttttctgatttcaatatatagaatcatattcatagagtatcttcttttaacgaattgcacaaagtacccatttaaaatttacatgcacagttcattgccacctttcttaggcctatgcatagttaataaggttataatctactcaacatggaaaatggagcctatttgcaaaacccacaaggtaattaaagttccaattctctcttagtttctttttttatagttggtttattttgcaattataaatgttaaacatccctagagatgaaagttaaaatggttgatcacagatcagtagcaaaatacaaattgacaattcaaaattataaataaaactctgttgaggatgtttaactttgagtctccaaatttaagagctaagcttggaagaaacaaatttataggttatatttccctcttaaattaaaaaacaaacttcctctggcagtagtttgtgaattcctttcattgtaatgataccatgattacaggatcaaaaatgcttaacttacttgccattctgctcacatcatcacagttgcnnnnnnnnnnnnaagcactcaatgtaggcattttaatcttctggataacagagtatcttttgagaaattaaaatcgaattgaccatttgcaatatttggttttcctaataggtactgtcttagtaaatgtttaaatccaaacaaatcttctgttcaccggaaaaatactaataaaaatacactttctaaaaagaaattaagaaacactagggaacacctaatgtaacagaaagtagttcacgtttgttaataaactgtatttttaaatagtcctttgtttttaaattttaaaaacgtgcagataatgtcatttggatgaaaatataaatgaaacatcagttcactcttggcttcacaggttgcacagcttaggttataatgcacacaagttttataaggcctaatctaacaagggcttggaaagtcttacctcagtcagaatgaacctttgatgtgtttataacggtgttttgttgtttttgtcaccctcgctttcaagggataacaataacaactgataatagttttctgtat

SEQ ID NO: 131316 - DNA, 732 bp, Homo Sapiens
  misc_feature (580)..(580): n is a, c, g, or t
ttttgatgcattaggactttatttggggtgaagacggaaaagctacgtgcaggctaggcatgtccaggatgtcagggcggggctccgaggacacagacagcaggtctagagctgtgtgacaaggtagcaggtgcggtgggaggcggagagagtcttggtgacggcacagggaggggtgggaggtctggggcccaggctgaggtggggaacttgggttcgatggctgcccagcccttcctgaagcagattggtgctggagtgcctttgggagtgctgtcggttccagaaatatcccaggaccttgtctcggaacacctcacagaggtagtctaggatctcgaggatggtgagcaggctggccccgatgaacagccccatctggcccccaatgtcaccaagcagctctgacatctcataggccttcttctgctccacggtctcatagttgagggcctcaaagaagatgtccagggccagcacgttctccgcgatgtaggcctcgctgcggttgagcttccgggccaggaagcgcgcggcggcgcggctcgggatccgcaccatggagagctccttggcgtancgcgtgctggcgcacgggttggggcaggcgcacgagtccttgcgaagcatggcatctatggccgggtgggcacagttcttgtactgctgggggctgcacactggcacgtcgcctggcatgtacacattcggcagccgcactccgagcacgta

SEQ ID NO: 131317 - DNA, 554 bp, Homo Sapiens
atagcatgttaccattggcaacttataggtaaggtattgattatttgaacatgatcttcattgattttagattcttagatatggcagaggtattgcccccatctggatttctggtgaaaatattcctcaagaaaaggatattccagattgcccctgtggtgccaagagaatattggaattccaggtatgaccttaaataaggaccatttagtgtgtaatcaccatgattgtttttaaacattaaaaacttcaccaaggtaatttgtgcacatgggtcaacatggcagtatggaagggtaccctataatgaaaatcatcagtttcctgcctcaccttggggctagttccctggaaggaactgtcttgtttttttctgtttcctagttttcagacacggtctattgactgacttctgtgacaatgaggatatctacactgctctccacctccagtgtggttatgtcattattattagtgcctctgttaacttttgttattttaaataatgtataccttcctttcttgttctagtaattaaagtctttgactataaa

SEQ ID NO: 131318 - DNA, 1286 bp, Homo Sapiens
gtggatgtaccaaaatttatttaattccctgtcactggacacttttgtttcactaataagtagacactgtgtaagcaatctgtcaacatctctgcacctctatttttggtataagtatttccttaggataaaatcccagaaatggaattgcaaggtataaaagattattaacatttttcaaggctttaagatgcctttacggtgtatctgttacatcctgcttccacacaaattcttctgtatagccagtacccaagctgcagctctcagcacaggtgaagacagccaggatgccccagtcaatgctcttgcccagtctgtcagccttcaggtagtttaggagctgaggcatgacctggaattccaatattctcttggcaccacaggggcaatctggaatatccttttcttgaggaatattttcaccagaaatccagatgggggcaatacctctgccatatctaagaatctgttctggttcaagggctatctgagttttaaacttctgaaaaattttatcttccctggattcatgttttgccatggaatccagttcttcctcaagtgcttcacccatgctccctataatctctgagtaatcttccttttccacaacctcaggcataatctcatcttctgtttctattacaatttcaaattctggaaaaaggaagttgtggtctggaattatatggtccagatgatctggttgtgcacaagcctgcttatgtcccaatctccagtctagggtctgatgctccttgctgcagtaatatgctttgtggcatctggagcacgttttggggcctaaacagccacaaaccctgcagagatgagcaccagacttaagctggagacacactgattctcctgtttctgggggaggattctcagaaggtggctcatatgagtaaaaatcgtttttcctgggtagttgattcctaaaaactcgcaggccggcacagcacggctgctcgcggcagcagaagaggaagatgcagcggtggaaggcgtccgggcggccaggcagcggcgcatacacctgcagcaggaaggagagcgggcggccgcacagctggcaggccagggcctggggcgccggcagcccggccgcgcccagccatgccggccgcccgcccaccttgctggggaactgctcgctgcgcagtcgccacgccggcgccgactcggcgaagcccagctccacaggcctggccccggcggcagccatgcggggcgcgggctggcgtggggcgcagcccacagctgggtcggaaggcgggccc

SEQ ID NO: 131319 - DNA, 660 bp, Homo Sapiens
tatgcgccgctgcctggccgcccggacgccttccaccgctgcatcttcctcttctgctgccgcgagcagccgtgctgtgccggcctgcgagggtttgtggctgtttaggccccaaaacgtgctccagatgccacaaagcatattactgcagcaaggagcatcagaccctagactggagattgggacataagcaggcttgtgcacaaccagatcatctggaccatataattccagaccacaacttcctttttccagaatttgaaattgtaatagaaacagaagatgagattatgcctgaggttgtggaaaaggaagattactcagagattatagggagcatgggtgaagcacttgaggaagaactggattccatggcaaaacatgaatccagggaagataaaatttttcagaagtttaaaactcagatagcccttgaaccagaacagattcttagatatggcagaggtattgccgccaactggatttctggtgaaaatattcctcaagaaaaggatattccagattgcccctgttgtgccaagagaatattgaaattcagttttcagacacggtctattgactgacttctgtgacaatgaggatatctacagtgctctccacctcccagtgtgggtatgtcattattaatagttgccctgg

SEQ ID NO: 131320 - DNA, 556 bp, Homo Sapiens
gcggccgcccgctctccttcctgctgctggtgtatgcgccgctgcctgggcgctcggacgccttccaccgctgcatcttcctcttctgctgccgcgagcagccgtgctgtgccggcctgcgagtttttaggaatcaactacccaggaaaaacgatttttactcatatgagccaccttctgagaatcctcccccagaaacaggagaatcagtgtgtctccagcttaagtctggtgctcatctctgcagggtttgtggctgtttaggccccaaaacgtgctccagatgccacaaagcatattactgcagcaaggagcatcagaccctagactggagattgggacataagcaggcttgtgcacaaccagatcatctggaccatataattccagaccacaacttcctttttccagaatttgaaattgtaatagaaacagaagatgagattatgcctgaggttgtggaaaaggaagattactcagagattatagggagcatggggatataatgggaagcaacactccagtggtcagatgctcacagtcttatggaggagcc

SEQ ID NO: 131321 - DNA, 1008 bp, Homo Sapiens
  misc_feature (691)..(691): n is a, c, g, or t
  misc_feature (804)..(804): n is a, c, g, or t
  misc_feature (811)..(811): n is a, c, g, or t
  misc_feature (850)..(850): n is a, c, g, or t
  misc_feature (877)..(877): n is a, c, g, or t
  misc_feature (900)..(900): n is a, c, g, or t
  misc_feature (958)..(958): n is a, c, g, or t
  misc_feature (966)..(966): n is a, c, g, or t
tttttcgtatttcaagtgttttatttgctttctgtggtgtcaaatttggggtctcctagagcccagccccaggcagaatccggcatatccttctccgcctggggggcccgggacacaggagtttcagaaaaggcactggcaaaagttctagggcgggggtcagggagaagccacactgagcctggagggaccgggccctccttcggcggcagaaaacacagtcacctttggcagggaagggttttttcctagaaagaaatttaagacaagataaaaacctgagatgttagaggagcccccagaaccaagccggtgctcccctgggcaggcagagagtgaactcggcttccaaaggctcaggggaggcttgcccggccctcagccaggctcagatgccacaggccttggcaagcagaaagcctaattcaaatccctatgtggaatctccttgagacaaagtgtcacgacacaaaacccccaggccccagaccccacctctgaatggcttgggccagacgctggtctggatcgtcaggagccacggccactacccagtgaccaattcctgtccctttttgtgtgttctgtgagcgctggagaggcaggcacttctgtgggtaactgggggaggcacagcggggagaaagagcaggaggagaaagggaatttgggggagggggagcatttgggntggggactgggtcctcaagtctgggagtcccccccactgagcttggacactgtccctggaacaggggaagagctctcagcggtatgtcagcgtcacccgggaattactttcanacgtggnactgggcacgctgccctcacagcatctgcaaggtctaantgacccagctcggcggctctcactganacgggattttcctcccacagcanccgggctcatgagactgtgcaggaaagaattatcggataaaacagctctctgcctcantagagctngaggtggtgagggactggaaacgctctacaataaccaccgcg

SEQ ID NO: 131322 - DNA, 719 bp, Homo Sapiens
ccaagtcttcacaaaattttatattccccaaggctgccccatcacaatgcctgtgaagcttgactggcagacactgaggcctgaagctgggggctgcagggggtcactggctcacccggtccccccgtaatctgtaaaacatactgggtgagggaggctgctggaggacctgaatctctcccttctccaggcagtagtgaggcatatgcctgttggccttgggcccattaaagatcattccagccccagtgctgttctctgaattcttggggaacacagggatgggggctcctaatgaggaccccagaaactctgagctctcacaactttcaaagacacttgcctccctcctctgcccacacctccaccattacagcatttgatcccacaagtaaggaggacaggtgttgcgatggagcccgcacgccagacgttcggatgccgctgtgggaggcaggcttcagtccctcaagctccagacacatacccaggaagacatcatcaatggggaagatgtccaagacatgggcagcacaggcgcagggcagctggccgtgaagcgggacagcaagaagccaccacccccacaatagggtgggtaccgctcattctgagtcaccacctctggcacatagtacttgctccaaaaagcccggatggggcccacgttttggatcagttgccccacgaagaggtggcggccagggtcatggtcctgc

SEQ ID NO: 131323 - DNA, 1032 bp, Homo Sapiens
ggccgtttccacacctgccctttattggtctcttctagcagagtggctccaggcccttcacgcctctcagacaccacccatgagggtttaggaaggtgccatcattctgtgaaggcccagagcttacccaagtcttggagcccaagttgaatcaccaaccagagggttgggagaggaaaaggaaacaggcagaggggaaaggcaaggctctgcagtgaaggggactgatatcaagggaatgctgaggtccagcagtgtctcctgaaggcatgctgcatcctaaggctcctcaggactggatggagtaggagatctgtgtgttgagcagttcacatctatatggcaactttaaggaggcgcttgatgtcaggctcaatgttgatggttgggaaggtgcggctgtagcgtcggaagggctctccctccggccctatgaggaacttctcaaagttccaggccacatctgagcggcgcacagggctccaaatgatgagcttgggatcggtcatgagggaaaatgggtcatcataagggtaggggagcttgtccttcaggtaggcgaagacaggatgctcgttctgcccattcacctcacatttttggacaagggtgaaggtgggctggtatccacccccaggacggacatacttgagactgttcaggatctcctcattctgacagttctcctgatgtccaaattggttgcaagggaagccaaggaccaccaggcgcctgggaaagcggcattgcagctcgttgagctgggtgaagtcccgggtggttgtgcctcagagcgaagccacattctcaatcagcacggccctgccccggaacgtattgaaatctaccttctccccatccaggctgatggcactgaggtcatagaaggacttggcaatgaaagccatggtgaagcgcagagtgagccccgcagagaggcctgagcccacttatgagcctattagaggggtggggaggaaggaggagaccagaaggagaccctcgtgccgattaacaccggcctcgtacctg

SEQ ID NO: 131324 - DNA, 713 bp, Homo Sapiens
ctattccaaaatgtaaatcaatttacccatacttccttatagaatttacatggctttatgacacttaaatctttgacccaaatggaattgttttggttccatttttatgatccctctccaacaatattccaggcatcccaacaccattgattgaatattgtattttctccattgagttgagtggacatgtttgaatctttcactaaagttctggagccccttccctagcttaaggttccttttggctttaatgtgtcagggtggatgccgacccattggaagagacaggcatggatgtggagtaagggaaagaggtagagcagggagcagaggctctaacctctgtaccatcagcttgatgagtgatcttaacacatcatttctgctttctgggcctccgtttctctcacatccatagagcactcggcatggcgccgggcccacagtgggcacacaacaagtggtgtaaatactactgctaggttcatcttcaatgagcccaggagcttactgaggccagcatccaggtaggaccaggtaggacagggtgttcaggcatttgtgaacacttaagcgaccattacatcagctgcgtgccgccctttgcagtcaaggtcacgtccactagctggtacatccctcctttgaagaggtggcacatgacattgtggcgaggggacgtgcaggcactgctgagcctcctcagctcactg

SEQ ID NO: 131325 - DNA, 1086 bp, Homo Sapiens
tttttttcccagatgaattttaattttgtttcctctcagacaagccattcagaaataaaagggaaatgaggttcatttaagtacacaatttgtaaatgtggaaacagtagtaattgtcatgattattttatattctctcttaacagtggctctaaaaacagcccaatgattcacacaactagcaaagcaaaccaaactctataaatgtatgagaaattaagttgctagcactgaaacactgggtttggatatggacaaggatgttgtctctgacttgtatcttttgggtaccttggtttttgatattttgatgttcaagcagaaagcgcgtgactttgttttatgcaataaggtgatgtaagtgtagaaaatgtgtagggatgaaggaaattccaagttacatgtgtatacataaatggctttataaaatacatatatatagccattaagatagttacatagggacaatgcaatttaaaacatttatactcctgcttacagattgccaagtctaatcatcccttaagtctttttcaataatgacataatttatttgcttaaaggtaaaaacctcctgattgtattaaggacattaatatactacactgtattaaggatactataccaacatcaatctaggaggtaaaataaacgtttggcaaatattgaagtcagatggaatagattcaactctataaagttttgttttagattttataataaaattttgcttctgcctacgatcatgtttacttcagcatgagtgctacactaactagaatttaataagtgttatttttattgagttttcaaatttggaaggattttgatccaaatatatacctatgccttaaaaaacaaagtcaagataatcagtatgggctttagtaccattttactttccaatccattttcttccccagtatttcacttgtatccctcataacttcatagcaattatccagattatatcttccagactactcagtgaaggaacctaaatctcaaatcggacgcgtggtcgacgatatcccgggattccggaccgtaccagccgcttttttgtacaactgttcatatcacaaa

SEQ ID NO: 131326 - DNA, 1242 bp, Homo Sapiens
  misc_feature (51)..(177): n is a, c, g, or t
  misc_feature (1118)..(1152): n is a, c, g, or t
  misc_feature (1156)..(1202): n is a, c, g, or t
gctacatattttacctgtttatttcattttttgtgtgtctacccctgaatnnnnnnnnnnnnnnnnnnnnnnnnnnnnnnnnnnnnnnnnnnnnnnnnnnnnnnnnnnnnnnnnnnnnnnnnnnnnnnnnnnnnnnnnnnnnnnnnnnnnnnnnnnnnnnnnnnnnnnnnnnnnnnnagctgggcttcaagaatgtgtttcagaggttctggagatttctgtttattaactcattgaagaaaattatgggttttattcttatttctaattgtgagaatgcttaatgtcacaggctacataagggcctcagaagtcacattatttttgtacaatgtgaacaggagaatttacgagactgctgtggaagttggtacctaggggtatgctacagggcgtcatgagctggaactgaataagacatgcccaaacaggagagtcaggggagaataatgatctcaaactaacagaaaataatttttgtcagtactttgagcatgccagtctgctgtttgtgcaagaattctcatttgtaggagttggttcttcgggatggtaaatctgttcattgtgctgggcctagcagtaattgtgctaggccaaacactttccaggatgcagtatttccatcttcctgtttgcacatcttatagttcccacttcacagatgttcaatgttttctcacttgttgatgatcccattttgacacagtagagttggtttccacccttgaagcactgtgggggcaataggcagacacatttggaagtggaggctgaacatttttcccagtcatagcaggtgtcatagccacaggattctttctttgtgctgttggatgaaagtcttgtcctttcaagacccattctaactggcggccgtcttggcaggaaccaatatgtagaaaatggagttgctgattatttaaacatttctcagccaaaacttacaagcgggtgaagtaaagtaatcgttggagtctgtgtcaaacacacagagatcttctgaatgatggctacagtcttcttctggagacatacaaatgcattcagatcctgattgtttctgtcccggccgtaatggccgaattcccgggcatatgtccggtaccgtcgactgnnnnnnnnnnnnnnnnnnnnnnnnnnnnnnnnnnncggnnnnnnnnnnnnnnnnnnnnnnnnnnnnnnnnnnnnnnnnnnnnnnntaacgacgctagcgccctatagtgagtctatacaagtttt

SEQ ID NO: 131327 - DNA, 581 bp, Homo Sapiens
  misc_feature (63)..(63): n is a, c, g, or t
  misc_feature (78)..(78): n is a, c, g, or t
  misc_feature (164)..(164): n is a, c, g, or t
  misc_feature (211)..(211): n is a, c, g, or t
tcaccattatcttgtaccaatgtgaacaggagattttacgagactgctgtggaagtggtaccntaggggtatgctacngggcgtcatgagctggaactgaataagacatgcccaaacaggagagtcaggggagaataatgatctcaaactaacagaaaataatntttgtcagtaactttgagcatgccagtctgctgtttgtgcaagaatnctcaatttgtaggagttggttcttcgggatggtaaatctgttcattgtgctggcctagcagtaattgtgctaggccaaacactttccaggatgcagtatttccatcttcctgtttgcacatcttatagttcccacttcacagatgttcaatgttttctcacttgttgatgatcccattttgttagagtatctttttcacaggtgagagagtttgaaatgggtggtgtccaggaattcccctggcatgtgtaccttgatggcccagcaacaacaaagcctttggggcaagttagctcaatggattcaccaattctatacaatctctgaaatggtgtaattgtcaggacttcctgcacaactggcttgatgc

SEQ ID NO: 131328 - DNA, 1034 bp, Homo Sapiens
ggtatagattttattatggatgaaatttgatccccggttagtattccacacaaatttttaaaaaggcatcttggtgtttgctttcttctgctctaagtaggctccttacatttttcttgaattaatttgcaaagtatatgtttatctataagttagtattaagatagaaaaatgataaatacaaaatagtagaggtacataatctgaaagaacattaagacatgtctcccacaccataacagtggtataaaacatgaaggtgacgcctgataggatccacaataaagtaagaaaatgtctgttcatgattctttgctgaaggatagcacataccagcagaatcataagctgaaactttaaagacagaagaggtaatctgtattttcttggtttgaggattctttcgaacactcaccagatccttatagataagctttgttgtttccagatatgggctaatcacatcctcatattgacaaagggctccaccaaggcaaagatgtttgaaaagacaaaacaggaactcttctctatctggttggctgaatatttcatatttttctgagtcttccactagcaaaactcttcgtaactcatcagaaatgagaaatggatcacaaaaagaatctaaacatttaacaatatgtccactgtctcgtacaatatcttcatcatataaccgatgaaaaaatgacattgaaagctgtgtgcaaggaacatttatagcttcaatttttttcacttcagttcctaatatgatccattgtccagaagaatctgaaagtaacttcaaattgggaataacatttgggtctttgaaaaaagccataacgaaatcatccttccgataggactgaaaggtctggtcaaagccgaacgcctgcgccttgattctgcccagcatggaccactggcggagccggctggtgatctccttagagctcagagactggaaggttttctgaggcaagaacctgaagtagtagccacccaagtccccgagctccccagtagccatcgtgctctcggctccc

SEQ ID NO: 131329 - DNA, 1112 bp, Homo Sapiens
cacttgcctcatcttttattaagaataaaatacttttaagatgtaaacaaagggaaccatgaccaaggattaagtcaacgtatctatttttattatgaaacattaaattttgacacattgcctcatttgcttttttaaaatctattatctgacttaaacctattcagcaaaaatgccaataaattatattaatcatactttgggtctttttaaaactaggaacataatatgttttatgataaacaataatactaaatctgagttgtatgaactgttaacttgaaatttgttttagatgtttagcttaaaacaaaaagaaaaccaatcacattaatacactgttgcaaaagtttctccggaatgccctccacatcactgtgtgtcagcatccttcggcttcttcactgaggtatggaatgcagccatatgtaggtgtcaaggcactcattctaagctgtcctatcctgcacatcttagcaatcacattagatggagggctgatgatatgcactaactcccaacccaggctatcttgcttttaaataaactaatttctttaaaagaaaatcatcaactaaggactcaaatgctgaatttagaaataataattccaattcaatacacattcaatcaaatgtgttagtacttaaaagtcacaaattttgcaaagtaaacaacgaatgaactaaggcaaatagcattgtcaccacatgccttaaaatggtatatttttggtgtttgaagctctttgcaaattacattttgggacagttcagatggatttaaataaaagatgtgtgttctacataaattcagttttaaggttttcaacatgggtggcaacattacaaaaatatatcaatagtcttaatagtgaatgttttccacctggtttctaaatctttattttccatggaggtaaaccaaagtttagagtccatcttcagagttatgatataatctctattgttcctagagatttgaaaactagatatgatctagatccttgccaggatcttcactttcatcatcctcatcctcttggtctccagattcaagttccccggccgtaatggccgaattcccgggcatatgtccggtaccgtcgactg

SEQ ID NO: 131330 - DNA, 1289 bp, Homo Sapiens
aatcttaaaagaagttttatgggtatagatttaagaaaaacaaatggcaacttccagcaactggtatcagattaaactatagcttacattctgtgtttaaagacataaatctgtctgttcatatgttggttatgacttttacattaaaatatcatttaaacgaatgagcaatcagtagtataaacagagttacaactaaatttggataaaaatgttcaataattaactctagcacgtatacaaaattagaaagcctatccaagcacttagtaaaacacagaatatttgtcatatccataaagtttattttaaaaaactgttaaaaactaaccatacaggtttattaatatacttaaaaagtttgttccctatgttgaagtaaaatacattagcaacatcttccggacaccatctttataaaagtaaaacttctagatcctgaaatgtactacagtagagtctatagtttacacttttaatcacagattggaattcattctccttactcccctacttcccacatgtggcagttattacttcaaaattaatgacattcactcatgttatactaccacagatccttaaatagagtacatactgcataattactaacagagccagtcttctctatttgttgtcacatatttcatataagcatttgacttaaagtacaaatagaaatactacatcccataattgtaaacattcaccaggagcttccatagtacagtaagtaacagaggtggcccaagagtcagtcaagtgttcttcactcactggatactgctgagattaggaaaactgttttgaaggcaaattatcctaagtcttacttgtatttctataaggatgcagttctggatatatactttcagttgaaaacacctgaaagtcattctatagtctacattaagcaccactttcacttacctgaaatattttgagttaaattcagcagtatgtacggttgttaatatcagaaattaagaataactgtgggtctcaagttcccttttgtggatacatacagagtactgagttcccactgatgctaataggaaccgctcatgcataccaagggtagtaactcccccagggccacatgcaacccccaagtctgaggcacaactattacttctgccagtggatgctatacaagcatatttaaggctgtatttggctataaagagttcaacctactctttaatattctttctatgtagatcacatacacaattcaaaattttataggacaggtgaaaagtctccaaacactttttaaatacccc

SEQ ID NO: 131331 - DNA, 1360 bp, Homo Sapiens
  misc_feature (106)..(232): n is a, c, g, or t
  misc_feature (285)..(352): n is a, c, g, or t
  misc_feature (504)..(565): n is a, c, g, or t
agaaaagaacttggcattatttattcaagtttatgatacatattacactcccaggtatatgttatacagaaactgacgtagatgtgatggaatacatatatgaagnnnnnnnnnnnnnnnnnnnnnnnnnnnnnnnnnnnnnnnnnnnnnnnnnnnnnnnnnnnnnnnnnnnnnnnnnnnnnnnnnnnnnnnnnnnnnnnnnnnnnnnnnnnnnnnnnnnnnnnnnnnnnnntgcacaaattacagctataggaacaacctgaacaacatatgaattaaaaacannnnnnnnnnnnnnnnnnnnnnnnnnnnnnnnnnnnnnnnnnnnnnnnnnnnnnnnnnnnnnnnnnnngaaagagtgagactaaacaatatattgtttagggatgcatgcttgcgacaaagcgacaaagaaaagcagggaaatgattatcacaaatgttagaataatgactacacttaggagggagggaaagagttgtgttcgggaaggtcatggcaggnnnnnnnnnnnnnnnnnnnnnnnnnnnnnnnnnnnnnnnnnnnnnnnnnnnnnnnnnnnnnntggtttcctttataatcacttatactatataattgctttatgtatttacactatagtgttcacaataataaaatgcttaaaattaaatatagatagtatttctggaaagcaaattttgccagataatttagcttacacaatctttgacagtaaaagccactgatatggaataacgaaacactgattagtttcttgtaagagctcactttcaagtgtagaggtcaaaaaccttataagagtctccgtttttctatattttaacacagtatttagatccttatcttaaattgatgaaccagggaagtaactattagctaaaacttcagattttttggaatttttaattaactagctgttttctcctctggattaataagcaatacaaggaactaaagagatgcagaccaagttggaaatgtatgaacttccttctctccagtctccagttccagctgtttcctcctgttatcaagctgggtgctgaggtgggtatctagcccagtaagcttagtgtgctgttattaaatactttctaagtaagtggctcaggctctcctgagtgcccttctgttcctcagcactgaggttgtaaggtggagccactgacaatgaaaacagaagatcacgctgctgaaaaaccctatgtggtacacacttaactggaggtgttctctgctgggctgcagaactctgatgtttgcactcttttccttcaaagcctacaaaggttaaactctctgaggtgtttagcttcacaaaatcccctaaatctgtgtgtttactcctttaatttcc

SEQ ID NO: 131332 - DNA, 1999 bp, Homo Sapiens
gtgttccgttgaaactttatttatggacactagaatttaaacttcatataatcttcaaacagatggtgggctgaacttgacaagtgggcagtaatttcctgacccagggtctgaatacagattcttttgacacgtatttatttgctggcaattaagtaacttctacttcattattaataataagtgagaacaataatacaaaatttgcttaaggctttgtctaaattgctggtgtataaatttttaagacaaattttaaaagttacttatgtcaaaattaaatatactactagaggaacaaactggccaagtttcatttatttcttcacgtaacatttttacagctcacatacagcaggaagcacacctttgcacataattgtgacattagcttcacaacagcatctgctgactgcacttccaattataatataacaagtgcaagttcatttggaaatgtacatttatacacctgatataaattaaagatgggtacactatgattggtgatagcaaaagcatgacttgaggttcctttgactagaccacttaagagaagtgtacccaagcattttaaaatggccatttggggaacaggccaatagataaaatatctgtcatgtaaaatttaaccatttacctttttaaaaaataatcttcagactttaaacctttgttactgaattgttatatggatatacatcatggcagcaagaaacacatttactataggctgtatttttggcgacatggccaattaaaaaaaattgttcataaagtaataatattacttgtattaaaataaaaaagctaaatgaaatattttccttccacatttaatgtgttaggttgagtttagtccccctcctcccgcaagaaatcagtctgagacttaagtgttgaatcaaacctatatttgtagtttctaaaatgctgatccacagaccactttcttgttacacgtgtaccaatgaaaacaaaaggcaaacagaatcactgccatccctatgaaaggaatggttccttttctaacattctttaaaaatatacattttacactccttgcacctcaacaaaggcagcaatgtaataaatacacggtttattttgtcctcctcacaccaggcgcctgtccacaaactacctgttgtaagccctctcttttttggatttctccagggctttgtccatggtcttctcgttctccccccggcacttgggacagtaccacttgcccttgggtttatgattgagccccacgcacgagaagtggaaccactcgatggggcactcgtcgttgtcgcagccgatcatctccccataggagacctggttgcacagacagtacgtgggttcgttggggtcgatggggaggtcggcaggggacgcctctcgctccgccttggccttggagcgcttcttcttcttggaggtcttggccttcttctccttgggtgtgcccgaggcgccgtcgtcgtggtcgtggttgctggacgcgttctcacggttctcgttgttgcgctgccgccgtgagcgcttgctgttgggcttgtcagcctgcgctgccgcctcgcctttgggcctgtccgcgccagccttgccgctgttgcccgctgtgtcgcccagctcctgctgcgcctcgaacagctccacgtggctgtccacctgccgcgtgcggttctccaccagctccaccatctggctcacgatctggatcttctcgtcgcccagctcctggctgcggatcagcgcgcgctgcacacagtgcagcatccgccgcttctgcgccccgtctgtctcgcgactgaagcgctcgtagcactcgtctagctccttcaggatctgtttccacggccacgcgcggccccaccctcgggtcagcaaagatgcggccatgaaactgtctccgagccggccccgcgggtcgcgggaggcggtccgaactgcagccccaggccccgagcccacaggcccgggatcactgctactgctataaatc

SEQ ID NO: 131333 - DNA, 2365 bp, Homo Sapiens
ggctccagtcctcacttccttccccttttggctcctgctctcggagcgggcggacgcgggggggagcggaaagggcgggagggcccaggagcccggcgggggggttcaagggggtacggaaaagccggggaggggactcggtccggggccggagaccgacggcaacagcggctcaggacccacgctgcccccacccctcccgagcaggcgcccccatggcccgaccccgctgattccttcactcggccatgctcccgcggcccctgcggctgcttttggacacgagcccccccgggggagtcgtactgagcagcttccgaagccgggaccccgaagagggtgggggcccaggtggcctggtcgtgggcggggggcaggaggaagaggaggaggaagaagaagaggcccctgtgtccgtctgggatgaggaggaggatggtgccgtgtttaccgtcacaagccgccaatatcgacctcttgatcccttggtccctatgcctcccccacgttcctcccgacggctccgagctggcactctggaggccctggtcagacacctactggatacccggacatcagggactgatgtgagcttcatgtcagccttcctggctacccaccgggccttcacctccacgcctgccttgctagggcttatggctgacaggctggaagcccttgaatctcatcctaccgacgaactagagaggacaacagaggtagccatctctgtactgtcaacctggctggcctctcaccctgaggattttggctctgaggccaagggtcagcttgaccggcttgagagcttcttacttcagacagggtatgcagcagggaagggtgttggggggggcagcgctgacctcatccgcaatctccggtcccgggtggacccccaggcccccgaccttcctaagcccctggccctccccggcgatccccctgctgaccccacggatgtcctggtgttcctcgctgaccacttggccgaacagctgaccctgctagatgcggaactttttctcaatttgatcccctctcagtgcctgggaggcctgtggggtcacagagaccggccaggacattctcacctctgcccatctgtccgagctactgtcacacagtttaacaaggtggcaggggcagtggttagttctgtcctgggggctacttccactggagagggacctggggaggtgaccatacggccactccgtcccccacagagggcccggctcctggagaagtggatccgcgtggcagaggagtgccggctgctccgaaacttctcttcagtttatgccgtggtgtcagccctgcagtccagccccatccacaggcttcgggcagcctggggggaagcaaccagggacagcctcagagtcttttccagcctctgccagattttctccgaggaggataattattcccagagtcgggagctgctcgtgcaggaggtgaagctgcagtctcctctggagccacactccaagaaggccccgaggtctggctcccggggtgggggtgtggtcccataccttggcaccttcctgaaggaccttgtgatgctggatgcagcctccaaggatgagttggagaatggatacatcaattttgacaagcggaggaaggagtttgcagtcctttctgagttgcgacggctccagaatgaatgtcgtggctataacctccaacctgaccatgatatccagaggtggctacaggggctccggccactgacagaggctcagagccatcgtgtatcctgtgaggtggagccacctggttccagtgaccctcctgccccacgggtgcttcggccaacattggtcatctcgcagtggacagaggttttgggctctgttggggtccctaccccgcttgtgtcctgtgaccggcccagtactgggggagatgaggcgcctacaactcctgctcctctgctgactcggctggcccagcacatgaagtggccatctgtctcgtcactagactctgccttggaaagcagtccatccctgcacagtccagctgaccccagccacctctccccaccagcctcctcccctaggccttctcgaggtcaccgccgctcagcctcctgtggctccccgctgagtgggggtgcagaagaggcctccggggggactggatatgggggagagggatctgggccaggggcctctgattgccgtatcatccgagtccagatggagttgggggaagatggcagtgtctataagagcattttggtgagggagccttgggatggagttggggtgaaggatggtgtcttgttggactataaatgttgtctgaggtttgggcagcccaaatggaattgaatgtagttttaattttg

SEQ ID NO: 131334 - DNA, 716 bp, Homo Sapiens
  misc_feature (587)..(587): n is a, c, g, or t
tttttttccaaatcgaagcagctttattgcaccattaagtacatcactgcatcaaagacagtgccacaaatgcaaatccaatcggagaaggtagccctgagacatgtggtggctgcgagggagaaggacccccaacccttgaggagcagcgctggaagagaatcattccttaatatggctccaattccagaactgggctttatcatcacagaaggaatggccttgggctaaggctccaacataggtggagtcaagggcagttccccataggctgtggttcccctgctcctgtctcacagcctaagacagcttccagcaaaaggcagttcatccctttcaccttccatccaacctagcccacccttaataatgccggcagatgagaaattccattttaacagcgccaaagtttcctctcttggttctgctcagcacccatccctcacgtccatgagttgttcaaagggtgaacagcagtcagctctaccccagaccctgggctacagagaaatacggacctggaaataccaagtcagaggcagggaaaaggtaagggcaggctcataaaccacagaagggagaaacanaagacccacatgatgggtcacagcagaggtaggcttaaaagtaacaatcctgttcaccctctcagaagccacttaaatagaagatccctgggggagaagatatcctgccccaggtccttacagagtgta

SEQ ID NO: 131335 - DNA, 358 bp, Homo Sapiens
tttttttacaattattaagccaaatttatttcaccccctttttaaaggtactcctaagcggggaacaatgcaccaagacactcctgctccatggcatctttagttcaggcaacctggcagggactgtgcttctcccctcctgcctcaaagaggcaacttttaattgtagagatctgcaaagtgctcattgtccttaggttgtctgttatcactcaaatgcccaaattctgtttttgactgacccaggctcactctgtgtgaacagttttaataccaccctcaacgtgggataaggttagctgttagcagcaaaattaagcagatgctttctaggaatattcctagggaagatggtaaa

SEQ ID NO: 131336 - DNA, 682 bp, Homo Sapiens
  misc_feature (141)..(174): n is a, c, g, or t
gacagtgaccatttattacacacatcagactggggggaagaccattgacatagctgagcaccaggtagggtgtcctgggtattcgggcatgagagcagcaggggcctcctgacgcgggcaggagaaacatggcacccaccnnnnnnnnnnnnnnnnnnnnnnnnnnnnnnnnnnaggtcagaggctgcctggatgcaggatcgggggcccctggattcccctccagcctcacatcctggagatgaggagatgcttgcctcttcttgtcctgaggcttccggagcagggagtgtctttggtgacgtgctaagcgtttctggtggccgaggccagactccagcatgtcctgtcgggagtgagaggtgtctgcttcctcaaggccttgtcccctgccctggggccccctgtggccacacagctcacagggcactcctagtgtccgggctgtcttttgtcccaagggcccaaggcccccaatgtcccccgccggatcccactccaactctgtggaagtggggaggctactgggtgcccagggcccccagaccccaccaggtcctggccagtccgagtctccctcgacctccaagtcctggtccagcgtgttggcctcctcgaacaccaggctgtagctgaccagctgggcctgcagctgccagagccgccggaagatggagtctcg

SEQ ID NO: 131337 - DNA, 1181 bp, Homo Sapiens
  misc_feature (58)..(58): n is a, c, g, or t
  misc_feature (1069)..(1101): n is a, c, g, or t
acagccaccaccacacttccagtctcctggggcagccccccagggtgggggtggtggngacagcaatcccaaccctccaccccagtgttcctttgacctgaccccgtataagacggcggagcatcataaggacatctgcctcactgtcaccaccagcaccatccaggtggagcacctggccagctcttagagatccgtgctgccacccactgggaagaggaagaagtagtcctggtgtcttctttctccaactcttggtgggaaaagtccttttcttccttgacaggccttggctccatctccttgggcctctgtcacggctttccttcacaggataccatcctttttctgaactcttcttcaaaaggaacatcagccctcctgattgcaaaggaatactgagctgatggtgtcatccagcagcctcccctcccaagcaaagcttctaaaactgggggtcggtgctcaagggaaggatttgctatgacctcatagaaccttgtccagtgtggccacttaccctatccttaccctccttatcctcaaagtttgggctgatgtaagactagaggctggccctcccagataacagagaaaagggagccccaaatgcaaccagcctcttgttctattcttgcctgcaaaagaacagaggtttctcaaatgcctcagtccctgagagccatttcttcccctacatcgtctcactttgcttcctattgactgctggtagaaggagatttggggtaggggctagacctccttttatttgaagggggcaagggctgagatgtggtccccaaggggccagaaattcccaagttggtcacaggtggcttagaagtgtgtgttatggttttacggatttccttgaagcctctctccttctctgcctacaaagaccctatactctcagtctccccaacccacccccaaggagctgtgggaggctttgtgttatctgtgaaactccaaaacaggggtgttgcggagaagggagagttcaaggcaaacgcaaggactggacttagctccctaggtgccacagtcagatgccggacacggattnnnnnnnnnnnnnnnnnnnnnnnnnnnnnnnnnctcactcatcacggccatctttgttgtaaccatttctgtgtttataaatgcattatctctgagaattttcatatttgaaa

SEQ ID NO: 131338 - DNA, 702 bp, Homo Sapiens
  misc_feature (38)..(38): n is a, c, g, or t
tttatttttttctttctatggtagtggggtttacttcntgaggataaaatattttgaaaaagctctgtcccttgacatggtagttctcccgtgccttgtacttgttctctctccatatgcacagtgtgacaagatgctcacctttaatgaagaaggtgtagcttttcgttttaagctgtaattgtctttgtcttgatttggctatttttataactgaaatcctgagcaacagagataatttgggtggtaatgatcatcttttgtatatgttcttgatgttaagaaatattttttgctgccattcagctttgtggaatttatgtttacttttcaatattttcatatttcttaaccagattttaaagaaatttgttgttagttacgtgaaatcaaaggtcaggtcagtaagcccattatcctcaaacttgaagtttcgttggatgttcaaaatgctaatttttgcagagatataaggataaattagttttagtttgtgttcttaagggtttgcaaaataatttggctcccaaactcttgttggggtgtagtgtttgctaggagcccaggatacctgccctggacttaaattgtgattgaagtggagaggtactctaggaatttaaaaagacacaaaattatttttttccagactagtgtgccatggatttctgataagaattacattcttgaacaaggtatcag

SEQ ID NO: 131339 - DNA, 469 bp, Homo Sapiens
tttgctttgtgttatattaactttatttaatcctcacaatcactccatgaaacagataactagtattacacttgttctgtggattaggaaatggagacataatttaagcagcttgtccaaagtcacccaacaggcaagtggcaaagccagggttcaaatccaggcagtctagctccggagcccatgctctgaaccactaactagatatgagtcctgctctgccacttactggttctgcaaacttgaaggaaccactcccactctggtcttggcttcctcttttggaaacggactaccgttcggttcaacccactagaatccccaagttagaactggcagagacactctgatccattgtgtctctctccctgttcaagggaaaaagaacttactcaaggtcacacaaccgggcactggccctagtttctgtgctcttgctgtgaacctccctgtggcagggatgagtcag

SEQ ID NO: 131340 - DNA, 938 bp, Homo Sapiens
  misc_feature (65)..(67): n is a, c, g, or t
  misc_feature (134)..(134): n is a, c, g, or t
  misc_feature (175)..(175): n is a, c, g, or t
  misc_feature (229)..(229): n is a, c, g, or t
  misc_feature (232)..(232): n is a, c, g, or t
ccatttctcgctgtttgttgattgcgaacattcacccgtacgttgactgtacgattatcgatccnnnaggattgcctggagcaagattcgcacgagacagatttgtgcctcagcctgacagttggacagctctnttttcccaaattaggagctctggacagaagcagtttgatgntacatttgaatttgaggatcttctgactccactcaaagaggtgaggccttcttnagnatacaaatgtggaggatgctgccagagagtctggtcagagccacaggtctgcctccagccaaacggagcttttgtgagaaggtgtggacagggattggcgcccccctttggtttggcctccatcctcatctctcttgggccaagccagctgcctaggtcccccaagcatgggggacccccccttcccacatataagttgagaaggtgcctgccatagccaggagcgcatctcaatggaaacatcactggggtcacttgggaagaggacttcggggtagaggctgggaggagcccctggacatgcctgtcctgaaagcggctgcctccattatccattcccaagatgcctgatcagaaaccaaccatgaatgaacccctggctccttcaccacccccacgattggtatgatgctgccggcacagctgggatacacacggctcccccaggcctgagctgcttcactagggaatcctgcggcaggactgcagagcagatggcagatgcacatgttggaggagagagccttgggagccactgccactccagtcctgccaccaccctgtcttcctctgcaagtgctcagggaaatggccttcccgccggaggccagctatctgcctgacaggctgtgactcttctctcaaccttggccttctcccctcttctgagctagttggttgaattttttttaatgcttaagatttg

SEQ ID NO: 131341 - DNA, 917 bp, Homo Sapiens
  misc_feature (181)..(181): n is a, c, g, or t
accaaccatgggccttttggcccttttgtttttgcagtccctgccgcacggattcctctagtgaaagcagttccaggcctggggggaggccgggtgtatcccccggctgtgccggcaagcatcataccaattcgtggggggtggtgaaggagcccagggggttcattcatgggttggtttncgacccaggcatctggggaatgatcaatggaggcagccgctttcaggacaggcatgtccaggggctcctcccagcctctaccccgaagtcctcttcccaagtgaccccagtgatgtttccattgaagatgccgctcctggctatggcaggcaccttctcaacttatatgtgggaaggggtcccccatgcttgggggacctaggcagctggcttggcccaagagagatgaggatggaggccaaaccaaaggggggcgccaatcccctgtccaacaccttctcaccaaaagctcccgtttggctggaggcagaccctgtggctctgaccagacttctctggcagcaatcctccgccatttgtatcttaagaaggccctcaccctctttgagtggagtcagaggatgcctcagattccagatgtaagcatcagaactgctttctgtcaagagctccctaattttgggaaagaagagcctgtcccacactgtcaggccctgaggtcagcagatctgctcctccttcccgtgcggtacgtctaggtgctgatgagggcagtccagggcgctcttgttctgggacaggctccagtccccttgctccagcaggtctggggcaaggaggtcagaggtggtgggagggcccctgctctctgtttccacttcgtctggatccttgctgctgcaaagtggcactgattctagctctgtcacttcctccttgctttccggcatccgga

SEQ ID NO: 131342 - DNA, 1393 bp, Homo Sapiens
aagggataaattatttctttggatttatatttttccataaaatgcaaatgctgattcatcagtgagtcagtatatgaaaaagggcctcttaaatgtcttataaacactaattattcttccccagtcttcatttccttaaagtcacatcgctcacaagtaggctcatcttccacttctgccatctgaaggctggtccatgcccagcctgaaccaggggaaatgtgcagaactcaccaaaatttttccaacaccctgacaacatttcatttcaaactctgatccctgccctgtgattacaaagaggatgctgctggttgtctctcacagtccctgctgtgggaaaaactgatatccaatgttctctgaaacatactgtctttcatctagactcagaagctagacataaaatttaaaaaagaagagtgtccatggccatgttatacctgccacctgctagggcccagtcatcagtcatggttgctgatgatgagactgctgaaaagacctgagcaggatgggagagaacaaaggtagttctttttatagcatgaggggaatgggagacttcaaagcttccagcagcctcatcacccaggcttcaccctagaagtcatttttgtcatcaggctagctgaggcttctgggcctctccttgtgcctcttcatattcttcttctggtttcagctgagggccagggatcatcaccgtcttaaggatgggctgcttaggggtgcccatgggggaacgatcttggtatgcattctccagcttccataggggtttgtcaactgcttttcgaatacacatactccaggacatccttgggtacatcttcctgtccatacatcaaccggccaaaccggtcatagatggccagagttggaaaacagtgttcagttaccaaggtatgaagccggtcatggtctgagttatttagacaaaggtgagcttcaataaagatatccttagctttttcagggaagtcctttattttaaagttggcatcatagtcttttatcctccggattgacacttgtgatgccatagtcttcttcattcgttcagttctctctatcagtccctcctttgaaagagatgatatgcgtgcatcaccctcaggaggaacataggcatcaaatataccagctgtacaggccagatgtatggaacggtccgatttttctggaggaataaccaatcctgctttccgggcatgttgcataaactccttttctgttttaaatttaggttgataaataggaggtgtgaaacgttttttagttcttactggaactatagctgcggactgagtcaccagaactggctgccgaaaccaccagcccaataacctcgataaacaagagaacccttgaggtatgggggctgccatct

SEQ ID NO: 131343 - DNA, 1083 bp, Homo Sapiens
  misc_feature (444)..(623): n is a, c, g, or t
  misc_feature (632)..(731): n is a, c, g, or t
tttactcattcaaacattttaatattttttttactagaaagaatagcaaagatttttttaagggtaacacagtgtacctaacaaaatatagagttatgagcaatctcacatacagctaatacagtgtaagttctagaggacaatttcacacaatgtatttcttgaagcttccaaaatgttcacacacttttacacagatgctagcagtgtatactaaatgccagacaccaaactaggcccttcaaccacaaagggttgcttaattaaatttacagtttgttgaatctcatgatattctgtattacagaccaagtatctattaaaaatacagcagaaacacaatttattgacacacaaaagatgctgtgtaattttcaaaagcaaacaaaaaatataagcaaaacgattcaactttttcgtaagtatatactataagcaaaaatnnnnnnnnnnnnnnnnnnnnnnnnnnnnnnnnnnnnnnnnnnnnnnnnnnnnnnnnnnnnnnnnnnnnnnnnnnnnnnnnnnnnnnnnnnnnnnnnnnnnnnnnnnnnnnnnnnnnnnnnnnnnnnnnnnnnnnnnnnnnnnnnnnnnnnnnnnnnnnnnnnnnnnnnnnnnnnnnnnnntctgtctcnnnnnnnnnnnnnnnnnnnnnnnnnnnnnnnnnnnnnnnnnnnnnnnnnnnnnnnnnnnnnnnnnnnnnnnnnnnnnnnnnnnnnnnnnnnnnnnnnnnngctggctgcaatttcttccacagttggaatgtgtaccttcaattaagtggtaaaactgtatttaaaggcacattgggtaatggtgaaaccttattacaatgatcatgtggaacagactgtaaaacaattggttccattgtggaaacactggcaaattgtacctccggaatatacagagcacacatctcatgggcccaacttatttagacaaaggtgagcttcaataaagatatccttagctttttcagggaagtcctttattttaaagttggcatcatagtcttttatcctccggattgacacttgtgatgccatagtcttcttcattcgttcagttctctctatcagttcc

SEQ ID NO: 131344 - DNA, 1030 bp, Homo Sapiens
  misc_feature (238)..(238): n is a, c, g, or t
ttttccaggagccttattcacccagggtttcaccttagaagtccattttgtcatcaggctagctgggcttttgggcctctccttggtgcctctcataatctttttccggtttccagcgaggggccagggatcatcaccgtcttaagaatggctgcttagggggtgcccatgggggaacgatcttggtatgcattctccagcttccataggggttggtcaactgcttttcgaatacacnatactccaggacatccttgggtacatcttcctgtccatacatcaaccggccaaaccggtcatagatggccagagtctgccgggtgtgcatgcgtacggtgatctggccgtacacgttgccctggttcatcatacttgaacagcgaacttgaacaacatgagagggctctaaagattccacaaagctccagcggacggtcttatatttgatgtcccaagtcatgtctggaaaacagtgttcagttaccaaggtatgaagtcggtcatggtctgagttatttagacaaaggtgagcttcaataaagatatccttagctttttcagggaagtcctttattttaaagttggcatcatagtcttttatcctccggattgacacttgtgatgccatagtcttcttcattcgttcagttctctctatcagtccctcctttgaaagagatgatatgcgtgcatcaccctcaggaggaacataggcatcaaatataccagctgtacaggccagatgtatggaacggtccgatttttctggaggaataaccaatcctgctttccgggcatgttgcataaactccttttctgttttaaatttaggttgataaataggaggtgtgaaacgttttttagttcttactggaactatagctgcggactgagtcaccagaactggctgccgaaaccaccagcccaaaaacctcgataaacaagagaacccttgaggtatgggggctgccatcttgttcccgccgcacgcgtgggtcgacgatatcccgggaaatccggagcgtaccag

SEQ ID NO: 131345 - DNA, 897 bp, Homo Sapiens
  misc_feature (111)..(124): n is a, c, g, or t
  misc_feature (132)..(244): n is a, c, g, or t
gggggaaatccaaccctttttcttgccccgattttctttggaaaaaattaaggcccttttcctttccttttgggggcccggcccccaaaaaaaggttttaaaaattttttnnnnnnnnnnnnnnccgccaannnnnnnnnnnnnnnnnnnnnnnnnnnnnnnnnnnnnnnnnnnnnnnnnnnnnnnnnnnnnnnnnnnnnnnnnnnnnnnnnnnnnnnnnnnnnnnnnnnnnnnnnnnnnnnnnaaggataaatcactgcagttttatttaaaattttagacaaaatttaaatcatgtatataaatacaaagatgaacattggttctttaaacactgacaaaatcctgaaacaatataatgtatatattttaagccacatttcctatttttacaacatagtttacaaccttcccatttttacaacatagtctaaaactaagtttataaaaaaaagtacataggaaaatatgattgaagcattctcaaatacatggctctgagggtagattacttgttttttatcatttaatccatatacaatgcagcaaatagatacattaattataacattttccttcaattaatagtttattcactgtcatagaagctccatgaaggggcatcacttaagaagctctccaggttagagtcaagcaaattctgaacacttggtcaaaggcacatgaaaatgccaggtcctggcacaatgagtaaataacccagaaggtgatatatgtcagatcaagacaatcttaagcaccatagtaacttttgaggcaagtggcaccgtactcttattaaagaaaagtctttactgttgagggcactgggtctctggagtagatttagaagacacatatagaatagggtgtgctttcttacaattttctttttcc

SEQ ID NO: 131346 - DNA, 501 bp, Homo Sapiens
cttttttttaatagttgtatttgaatgattccagcttatcgtaaatactaaactgaatggcttttatatttttaactgctgttaaatgttattttagcatttattagttgtttattatttaattcttcaaatagtcatatgaaaacatatatttgataaaggtcaattgttagatgataatgtgccattcattatcataggaatgtccttgcccatatataaaacatgctggcatgtattttacttgttaataaagttgtatagatgtggaagtgtgaacctgtgatgcatccttttcaaaatcagtttaagattcgcatattatcatgactgtgacctcactaaactgtttatgtgacaaacctttcaagattggagatgaaaacaacacttgtgaaattaggttggggttgcaacatcttttaacttctcagttatttgtatgtcaggagacagattgtggtttaattttaataaacaaaatatcatctttttgaaaat

SEQ ID NO: 131347 - DNA, 865 bp, Homo Sapiens
  misc_feature (64)..(98): n is a, c, g, or t
tattggccaagcctgtcgcagacgaacgacgagcgcagcgaagtagtgagcgaggaagcggcgnnnnnnnnnnnnnnnnnnnnnnnnnnnnnnnnnnncagtcgacggtaccggacatatgcccgggaattcggccattacggccgggtaaaaactggaataatgaaggacactaaatgcctttattgtagatactatgtttgtaagtctatagctaagcaacttaagccaaaaaggtctttcaactgaagctttaatcaacttattttggagatgttctcttcccttatctcatgcgtcatccctaaaataataagatacatgggatcaaatagcccttgccttttcaacacaaatcagttggaaaattatggtttgagtcctgttgctgccatggcttctgtttctcagaaatgagtgtgtatgaacataccaatctatgtaataggctacctttttttgtcttctttggaactttgtacacaaaccaagacaatatcagggtgacaggtgaatgaacttaaattctcagtcttgtctattcaccaaaaaagtatactgcctgttttttctttaattattcaaggttgatgacttttaggaacatgttttatactgtattttttaattaaagcaagtgccttgatgtaattccatgtaaatcattgcttaaccctcttatgggatgaggatgagttattaatgtattgcagcctactggaaaggagggggagttggttaatagcagatacttttcttctagaagcttatgttttatgctgtttattatgtaagatcctgtatgtgtgttgagatttagaggtttcatttgttttgtctgctaataaattgttactctaataat

SEQ ID NO: 131348 - DNA, 792 bp, Homo Sapiens
tttttttccgggttcccagccctttgcatcacatgggcaggtgtccacttctgaaatggctttaatctctaaccaaacatcgtagcggcagcgcacagcatcccccagacatccctccatggtgggggcctctgaggaggtcaggttctggtgccggagggttgggccctgcacaggccgcctgccctgcacgtgtctgactccctcctgcccccagagcctcttcatctgaggccagggtggagaagcggatacgcccctcatttctctagttcaggccagacctccccgttccaggccctgctatgaccacatcgacgtctccagacgccccgcggacacagcacccaggtacagccgggcgacagcagtgtcagggatggggccccggccggctcctggcggctgtgctgatgcagaatccctggtcctggtcctcgtttcctcgtaactccgaaggccagccccagcccctgtgtgcttcagagtagaaagcgtttatagtgacctgctgaaaatagcatcttagaaacacttcgagacgcgagctccgtccacacccacaagtgttctgttgtcagtcatttgtgcaaaacaagcaaacggaggtgtagggaggaaactgtggggtgtactgaggaaactgaggcttatagaggaaactgtgaggcagacggaggaaactgaggcgtatggaggaaactggggcgtatggaggaaactggggcgtacaaaggaaattgaggcgtatggaggaaactggggcgtatggagggaactgaggcatatgga

SEQ ID NO: 131349 - DNA, 659 bp, Homo Sapiens
gtcataaattaaatttattctctggagaacatggttcttggtattgacgtgaatgggagcagggcatttggggactcaggaataggagatggggggcttgggtgccaaataccaaggaaagccttaaacggactccccagagattaccgatagcattagcatctcatggaggaccccccgcccccgaccaccagtccccctttacttcttcttcttcttcttgcgaccccaacactgggggcctccatcctctcttcggctcctccaggtgggcatgggaggctccagctcatttgggcggcccccccggtctggaacgttgcccataagcaccttgttgatggcacagcaggtccctctgcggacagccacgctggtggctgggacgagacaagacaggtcggctcgggcagccagaacgtgtgcaatggagatgtccgattctggggtcagaacctctcgaattgggatcagcactgccctcatggcctctccttgggcctctgcccggtcactccagtggaaagcagatgtagtgaggtcaaggcgcttgaggaggaggcagcggcggcagcggtactgatctctgaggctttgggacagagactccaacgcttcccatctgggtgcatctagcgagcagctgaggaggggctgca

SEQ ID NO: 131350 - DNA, 1325 bp, Homo Sapiens
ccaccgtcaatgaataaacatttattggagcaccggcaaatcccagacactacagaacacacagaaggcatggccccacgccgagggccccagccccttgcaaagctgccacgctgccaaaaatggtggcgcatgcagctcaggcgcaggctgaggctggggcttggccgggcagtgcacttggaacggggtcctaaggcctctgccaggttccagctggggcaggggtcacgtcgcttcctgagagcagagcaaataaataatggagaggcaggggctggggcctgaggtggaggggctctggcgttggcttatgtgactccataggagcaagacaggtggccgggagcccccaccccagggtggggaggcagagccaggggaccacagggtcctggggcctccctggcacctccactggtccctcgcctctggggccaaagcagggtgtggggggacaccccagaaggcactgctgaaatgcggctggactagaaatgagtgggcagagaagctggggctgggctgcagtccctagagcggggcgtcatcagtcctccacttgcgggggtaaccctgctggtggccatcgcagcgggggtctcccatgctgtccagaggcaccaccacctcgtccgggttcgagttcttgttcagttccaccacgcggggtaccaccgaggaccagcgatccctgcggaggcggcccacggtatgcgagaagccataatactggtaggtctcattcttgcccgggtcctcgttgatgatgcccaagttctggttccagtgagaccagttcacctcatccaccctgaagcaccacctgcggtcaggagtgccgtccgagctcttgcccacggtgaccatctccccagagcggaaggccttcctcaggaatacggggaaggagcgctcaatgtccaggatggtggtggcccactgcagcttccagatgtgcttgctctccttggagacctggcccactgtctcgcccatgagggcaatgagcatgttgaggagcagcacaaaggtgaggatgatgtaggtcaccagcaggatgatgaagaccacggggtacttggtgctgctcagcatctccaggtcgcccatgccaatggtcagcttaaacaggtccaggaggaaggtgctgaaggtctcgctgtcacggcacgaggggtaagtgggcactgtgcagttggtctggtcctcattgcacaccttcatgttggcacacgggttcaggagggagaccagggctgaagcgtagccgatcatgaagagccggacgcgtgggtcgacgatatcccgggaattccggaccc

SEQ ID NO: 131351 - DNA, 1149 bp, Homo Sapiens
  misc_feature (946)..(1021): n is a, c, g, or t
cgacggcaattcttgtggcaaatttaatagaagaatatgagactcacccttacttcccacacataaaacactgcaggcactccaaatccttacagacatatgcacttcggaatcaactcaggcatgcacagcatccctgtgctggagtttattttaaaaaacaacgccccagttatcacagtttctttttttgtccaccattttccataacaaaagaagctacacaaaatttggggggagatactctctttggagactgacacatttgcagaggggtcatgaataatgattccaaagctcctatttaacttctgaatcaggcaaagaataagtgacaatataagaatgaattttgtttacagcaatatcataatacagcattgaatcattacagtgcagtggttgtaattaagtccacaataaaatattcttagcccgaacaccagaccaactaaaatcaccaactgctcacgaaccaaaatgatcagtgcaagcagttgcggtctcaatagtgaaaaccaaaatgggtaaggcttttctggcagtgagtctctgacatgaacggctccctctctgctcagcgaggacttggccgccctcacttggagtcttggtctttcttttcatctaaaagggcggagtggatccccagctttttcagttcttccaccaagtccccattctggtgcatctgcagaagaatgtcacagccccctacaaactcgccattgaggtacacttgcgggatggtgggccagttggaatagtctttaatgccttgtcggagctccgggtcgtccagcacgttgtaggccgcgtaatcgcggacgccgtgcagccgcaggatctgcaccacggcgttgctgaagccgcactggggctgctccggcgtccccttgaggaagaccaccaccttgtccttcttcaccagcgcgtccaactgctnnnnnnnnnnnnnnnnnnnnnnnnnnnnnnnnnnnnnnnnnnnnnnnnnnnnnnnnnnnnnnnnnnnnnnnnnnnngcgcccccagcggagcagagccgccgcagctcggccgagggacccgctcatctccgcacgcaagccggagcccacgacggcccgggcccacagctggccacccagagcgctccccggcccgcggcccc

SEQ ID NO: 131352 - DNA, 609 bp, Homo Sapiens
cctaaatagtttatcttactgataaccaattctgaaacagtgttgaaactcattccacatgaatcacactgacagaacatttttctggaaggaaaagaacttacatccacattaaatggtattcctattacatcaccttgttccttagtcagcatttcattattgatgaatacaacttcccacaaatgtttagattggttttcttggctcctctctttcaggtgatcagctgtccagactggaaagctttggcttgggaattcttcctcctgtttccatggctcttctccttgttgcagcctgaagatcacctctggtttgtgaacacaataccccactgagacaaggttgctgtagttctccagcatcacatctctatacagagccctctgactagggtccaggtgctgccactcctcctgggtgaagcccacagtcacatctttaaatgatactgactcctgggacttctgttctaccttgttcattttgttctgttcttggaaagacggagacaactctgaagatacagcccactccctcgtcgggttgcattcgccatagaaaagcgcgtagacccttgaaatcccgggaccgcctccctcgtgc

SEQ ID NO: 131353 - DNA, 761 bp, Homo Sapiens
aaagttaactattttaattagaatttttattttgtgcttcagggccacaggataaaataactacatttagcttgcctttcagtgacgcttttgccaaatgtcagctacaaggagtcatctccctcaccgccaagctgtctagcagccagagtggtagctttactgtaacacacagtactttttgtaatcagactcaaagtcttcatccatactgcttgtgtctgccatctttttgccatcagtctttggcagaaattgtgcatagtctatcccctgctgctcatagaaaagaatgtaggcagagtcggtgtcaatttcatccgggtgaagttccttacagctgctgtcattgtaacagtaccacttgcagtttgggtttttggcataagtgacgtaatggcccccacccagaattcctgaatggcacgaaattgcatatagattataaataggcttaatacgagtatcttctctttggtcatcagtgctgtcttcttcactgtggtttccaagctgaccattgctgtagccattgccacatgcttcatgctcataaaggaatccattggccaaagctacctcatggtcctgaggagtgaccaactctggttggctgccccccagcacatgccctcgactcaaggcgtcagccagctcacatatctgcccagccccattttctttgctggcatccaagttctctttactacttgacagtttatttttgctgcaatctggggcagcggagctcctttgctctc

SEQ ID NO: 131354 - DNA, 476 bp, Homo Sapiens
tttttaggtggcagttagccgttacaagaagttttattaacatattctctaataatcacaaacctatacagctatgttcagtattttcaaggagagtgacttcttacaaaacgtttatagccaatcatgggattttgctagaaaacgatggcatatgcaatgacagatttgacagtttaatcagaaaaatggaatgatagaaatgaagcagactccccacctactgtgctaactgggtatgcaacagtttaatgaaataccataagccttagttggagactgtgatggaacagcgtagaggccatccgtttccaggccattctgagatccaagatgccaactccttgtttctatgaaacttcacgagatgtgccagtcagaaatggcatgctgaacattctgcagagctgcagcactggcctgggcagccagggctaccacactggtgacagtgctgctggtacctgtgatggctc

SEQ ID NO: 131355 - DNA, 1098 bp, Homo Sapiens
aagtattacatcaatcatttattctgattttactgaatgacagtaaagagaaaccatttacagacatgaagctcgaaaatgttctacctcccaatgcactagtatttcagagacttggaatatatttggagatgtggaaaatgattacactttagtaacactgagtaacaattttaggccaagtatactacactcatattttttttgaagtgagacattagtccaccctagtactgcatacagacacactgagtaataaatatccaatctgtgatcatctttataaagggcaatttattcgttgctttccccttaccccattcgccctagagtggcttcgtttcactttgccctaccccttctagcaggtagtaaacagtcctggccagtgatgccatctggcggttagttcagaaattgtttaaccaacacaccttccaatcaggatcttaccatcgggaccctctccaaaaccacactcccctttcttccagtttttgcccatttaccttagtaaaatcgggttttcttctttcctgccctgtttatccaactgaatgaaaaacgtattttatttgtggcactctagttacagaaaaatcatgagtcctaagtacatttgcagctaaagaaacaaaccaacaataagaggccaacatactcccaaaaatgcccccattcgacatcctgtcttaacagagactgttagaatctccgttattcatccaatgccttcagggaataccagtgctgagaaggaccttgaggatcatcgtttcaaggtcaaaagcttcattttacagctgaagaaactggctctgtgagaaagaactgaagtaaccacccacccaacagtacacagcgagttaacggcagagccaagattatggcctatgactccccattccaaatccggtactgggtcaactactctgtgcgctcctggcttctcaagcctgtttttgctcaaccagtgtatttactttttccataattatagtaatattgtgaatctctgtactatgcctaacagtgtctagcacacttcataaatatttattagttgggtatctattaattaccgtacttattgcaaat

SEQ ID NO: 131356 - DNA, 1002 bp, Homo Sapiens
  misc_feature (460)..(476): n is a, c, g, or t
  misc_feature (765)..(765): n is a, c, g, or t
  misc_feature (783)..(783): n is a, c, g, or t
  misc_feature (837)..(837): n is a, c, g, or t
  misc_feature (844)..(844): n is a, c, g, or t
  misc_feature (847)..(847): n is a, c, g, or t
  misc_feature (849)..(849): n is a, c, g, or t
  misc_feature (851)..(851): n is a, c, g, or t
  misc_feature (876)..(876): n is a, c, g, or t
  misc_feature (895)..(895): n is a, c, g, or t
  misc_feature (904)..(904): n is a, c, g, or t
  misc_feature (929)..(929): n is a, c, g, or t
  misc_feature (954)..(954): n is a, c, g, or t
atttcactggtatcaaacaaataagttttattggcatctaaaaacaaaattcacccaacattgaaacgtactttaatatttatgttgttgttttcttgtttcttttttactcactgcagtatgaggaacaaatcacaaacacttactttggagaaacagagaccgtagtgtagattttacaaaatcactttttaaaatctctgtattgtgctcctcaaatacctagagccagtctttgcataaaatatcacagctttatctataaccttaaaattctgcagcagcctaaagatatggataagatataccaccacttgctattctgaaatatatctattaccatatccaacctaatgatagtatctaaaaaattctttcttccataggaagtctctgacaagctgttattcatttccttgacgttaaaagaatctggggccaacatttgtattttatcagnnnnnnnnnnnnnnnnngtttacctaccatgttcatattaagaacaatgtctatacaagtcagttgtacaattattttaagagaaaggtgaacatgaacatcagattaacttaattctggcagacaaaagtgaacaactatggtccagtcagccattatctattacagagagatgacaactttacaaaaggtatcttttacctactgagtgatgattatgtcccctcagtttctgtgctttctaccactggttcactttctatatcagcaactgtgtcactcttctccttgtttatttcatttgangatgtcagtttttcatanagttcaagatcattctgtactggtataggtggtggctgagcatgtctctctgtnatttcancantnanctgaggcacatttatcacttttcgntgagaggtggccctttcanattatcaanacccgagcatgaggagggggaaccnagtgttttgaatctgtctcgtcaangcgatttcaatcatttctctgaaaatcaaattctgtcatcctatcctg

SEQ ID NO: 131357 - DNA, 1201 bp, Homo Sapiens
  misc_feature (214)..(264): n is a, c, g, or t
gtaatagaatcatttatattcttatagtgccttacagcatattttatcgttaatgagaaaatgaaccaaaactatagtgctaaccctgaaaccttaaaccgaaccttacaaagttaaagattaagtgttggtcagaaggaaaaggatgcaaccatgcatcttccacagggaaaatgaaaatagcaagatggcagaaatgctaaactcatgggtnnnnnnnnnnnnnnnnnnnnnnnnnnnnnnnnnnnnnnnnnnnnnnnnnnngaaattattacaatgcaaatcatcatgtgtctctattttctaccagctggtgaacctgttattaaaatttaaaagaaaaaatcaattaaactttttctattttaatccatagaaatattcagtaacataaatacaacatttgttgcatattaatgaatgtgtggcttcttgtgctttccatccaaattagaggtaaaaatccccaatgactttattttcaatgagatatagttgtaaagttatattaaacatctacacaaaaatcaatctttccttcaaccgaattctatatgaaagtactaacagtgaagattcatgatgttgtgtgaaaatggtgactcataacaatgtagactcagctacagattttaattcacaaatatatatatgcgccttgtgtatgacaactgtatgaaaatagtctcaaaaataaagacaatacttgagacacaaagcaacccattttccctgattttgcattctattacagggaaaataagtctctgatgcttcataaatactttaaaaagttcgggatggccttaaccatgcatagtctccaccaatcctttgaagcttccagcatctcaggctaaccatttcagctgtgaagaactgtaccctgtaatcagttatgctcatttatgtcctgtcttttctagatctgggagttttctgaccagggcctggtggttcattctgatgctagcaaggagtcccccttcaatgccgtctgaaccagtgtaactgatttcttcaccactcagggtagtcatatgcccccctagggcttttaagatggcattaccagcacatatatcccactttttgatgtatgtcacatggatgtataaatcagctttttcttgactcttatcaggcacatccccggccgtaatggccgaattcccgggcatatgtccggtaccgtcgactg

SEQ ID NO: 131358 - DNA, 591 bp, Homo Sapiens
  misc_feature (108)..(116): n is a, c, g, or t
  misc_feature (399)..(449): n is a, c, g, or t
  misc_feature (551)..(551): n is a, c, g, or t
tttgggtaggctagatacatttattaatagtaaaagcaaccatggcaaaagcaaccatactcattcttgataatgaaaggatcttctatatacaaacctagcaaattnnnnnnnnntactaaaacaaagtgtctgaagataatgaaaggcagttcaattcatgtaatgtcaagtaactttcaattgtaatagaatcatttatattcttatagtgccttacagcatattttatcgttaatgagaaaatgaaccaaaactatagtgctaaccctgaaaccttaaaccgaaccttacaaagttaaagactaagtgttggtcagaaggaaaaggatgcaaccatgcatcttccacagggaaaatgaaaatagcaagatggcagaaatgctgaactcatgggtnnnnnnnnnnnnnnnnnnnnnnnnnnnnnnnnnnnnnnnnnnnnnnnnnnngaaattattacaatgcaaatcatcatgtgtctctattttctaccagctggtgaacctgttattaaaatttaaaagaaaaaatcaattaaactttttctattntaatccatagaaatattcagtaacataaatacaacatttg

SEQ ID NO: 131359 - DNA, 1921 bp, Homo Sapiens
aaattcatctcagttactttttatttttattttgtgggcttttaacataaaaatacagatgctcccgtcagagtaaggcatcgcaaccttcagttcttccgcagcaccgggagtcgagggggaggcatggagcgcgggaaaaggaatcgagcgagggaaagggatggagcgtgcggcgcccccaccacctcggagccagcggagggcggagggcggcgcagaagccgctggttggggtggcgagggaggggagacccgggagccgagggtaggttccctgccggtgttggggtgccacggcgcgcggggctagagcgcagtgtcaggcgcgaggtcctgcagcgccccctcgcgggaatagaactcgtcgatcacggcctgcggaatgcgcttcagcatctccttggggaagatgcgcagcagcttccagcccaggtccagcgactcgaacaccgagcggttctcgtaggggccctgattgatgaagttcttctcaaacttctgcaggaattccaggtagagcaggtcctcagaggtgagcgcctcctccccaactactgccttcatggcctgcacgtccttcccgatggcatagcaggcgtacagctggttggagacatctccatggtcctttcttgtcatgccttccccaatggctgacttcatcagccgcgacagggaagggagcacgttgatgggggggtagatctgtctgttgtgaagctgtctgtccacgtagatctgtccctctgtgatgaagcccgtcaagtctgggatagggtgggtgatatcgtcgttgggcatggtgaggatggggatctgtgtgatggatcctccccgaccctccacgcggcccgcccgctcgtagatggtggccaggtctgtgtacatatatccaggaaaccctcggcgcccaggcacctcctctctagcagcagagacctcccgcaaggcctctgcataggaactcatgtccgttcagtatgaccagcacatgcttctcacactggtaggcaaggaattcagcagtggtcagcgccaggcgcggggtgatgatccgctcgatcgtggggtcattggccaagttcaggaagaggcagacgttccccatggttccattctgctcaaagtcagacttgaagaatctggctgtctccatgttcacccccatggctgccaagacgatggcgaagtttgtcgtcatggtaatccagcacagccttggacttcttcaccagccccgcctggcggcagatctgagcggcaatctcattgtgggggagcccggctgctgagaagatggggatcttctggccgcgggcaatgctgttcatgacgtcaataggagaaatgcccgtctgaatcatctcctcggggtagatgcgggagtgcgggttgatgggctggccattgatatccagaaagtcctccgccatgaccactggccccttgtcaatgggcttgccggagccattgaaaacccgacccagcatgtcctctgacaccggagttcgtaggatgtcccctgtaaattcgcaagtggtcttcctggcatcgatccctgatgtcccttcaaacacctgaacaatcgccttggtgccagccacctcaagcacctgcccgctcctctgagtcccatctgggagggtgaagtggacgatctccgcatactgggcaaacttgacccggtccagcaccaccaggggcccgttcacactgcacacagtcctgtaggtgacacgggggtgggtgatgtagtttcgggtgaccgcctgcatgtgttctcgggctgcacctaggttgcagctactgccggggagccccccgggcctgctgtctattctccatggccgtggagcagtccccagctgggagcgcaagtctaacctgtgctgtgctgacagaattccggaccggtcca

SEQ ID NO: 131360 - DNA, 1482 bp, Homo Sapiens
  misc_feature (320)..(320): n is a, c, g, or t
  misc_feature (338)..(338): n is a, c, g, or t
  misc_feature (343)..(343): n is a, c, g, or t
tgaggcgtgggcagcatattgatagcatctgcccccagttacatatgtccgttgttgtgttgatttgaggtacaatcccacagaacagtatactgtccgattatacgctccttgggatttgccctgagccagatcgcacgaagagaggcatgaacagctcgaggtgactcaggagaagtgcaattgtagacccgagcagaccggacccacgccacgcgagatacgctaccatcccagcccacagtatatgatccttgtacacactctccccacccggttagagaagagatgtcaacggtatgtcatgccagatacacacntcaaagtactccctcctncccgngaagcaccctttcttcagtggtctcagttctgtcctgggtactgaagaagaagatgaagatgaggagtatgaatacatgaaccggaggagaaggcacagtccacctcatccccctagtccaagttcccttgaggagctgggttatgagtacatggatgtggggtcagacctcagtgcctctctgggcagcacacagagttgcccactccaccctgtacccatcatgcccactgcaggcacaactccagatgaagactatgaatatatgaatcggcaacgagatggaggtggtcctgggggtgattatgcagccatgggggcctgcccagcatctgagcaagggtatgaagagatgagagcttttcaggggcctggacatcaggccccccatgtccattatgcccgcctaaaaactctacgtagcttagaggctacagactctgcctttgataaccctgattactggcatagcaggcttttccccaaggctaatgcccagagaacgtaactcctgctccctgtggcactcagggagcatttaatggcagctagtgcctttagagggtaccgtcttctccctattccctctctctcccaggtcccagccccttttccccagtcccagacaattccattcaatctttggaggcttttaaacattttgacacaaaattcttatggtatgtagccagctgtgcactttcttctctttcccaaccccaggaaaggttttccttattttgtgtgctttcccagtcccattcctcagcttcttcacaggcactcctggagatatgaaggattactctccatatcccttcctctcaggctcttgactacttggaactaggctcttatgtgtgcctttgtttcccatcagactgtcaagaagaggaaagggaggaaacctagcagaggaaagtgtaattttggtttatgactcttaaccccctagaaagacagaagcttaaaatctgtgaagaaagaggttaggagtagatattgattactatcataattcagcacttaactatgagccaggcatcatactaaacttcacctacattatctcacttagtcctttatcatccttaaaacaattctgtgacatacatattatctcattttacacaaaggga

SEQ ID NO: 131361 - DNA, 1208 bp, Homo Sapiens
gttgcggggaaggggagggctgcttttattccgattgaagattcagctcccccccaccccgcacccctacctctccaacacactgagaggctggaacccgggagaaggcagctgttggaggagcgagggaggcagaggtgaggactgcctccaggaccatctcgccttccacgggaggcttgaggcagaggtgagggctccccctgatgagtctgatctgcataacgacatgcagcggcccaaggctccctcaaatgttggcaaagataagttaaccgcttccctggcttagttttcggatacccactttcgagtggggaggtgcaggatctagggcacgaagttgggagttccccagccccagggatcctgagctcctgggccaaggaggagagccaggcaagactgggaagcccaagggggctcctctgacccagggcagacggggaagggataagaggcactacagcagggtacggcctgctctggggactgaatcccccatggaggctgtcatgagggatccacccaggagtcccctttggtggggaggctgccggcagtggctgcgtctggctggcgactggcccagtagcggtggtaggtgtcctggaagaggtccctgcaggcgatgtgggctcggaggtgggcacaggccaggaaagcccctgccagcttgcggtgcagggcataggtctcctcgggtgggggacacagccggtgccgcagcagcaccgggatgaggtcctgtatgcggcgggccgtttcccccgacccaaagtcataagggccctgggtggcgaaaggctcccccaggatcatcactgcctccacgtgggcgtcggagaatgccttggtttcaaagcctgtgaggaatttgaggtccctggacttctgcaggacacagtctctgtctccatcagctgcagccttcaccacctcgatgtaatggtctgtgaactctgtcccaaactcccggcttgcaccaaagtccagcagggtcacctggtggctggaggcatcatacaggaagttggcccagttggggtcagtctgcatgaatcggaactcaaacagctcccgcagacacagcgtcaggagctggaagcaaatctggttccgcaggtcctggcttaggccctggcactggtccagggggacccctccagccagctccatgatcccgggaatccggaccggtccagcct

SEQ ID NO: 131362 - DNA, 1017 bp, Homo Sapiens
ccaaggagatgctttattgatgaagatcaatgaatcagagatatgtagatgaaattttcctgagataacaccatcttcaaaaataaggaaaaccctttgagctgaaacatgttttggatccaggaaacctctgttcataggagggaaataattgaaaacacctgaaccttacataccacttgtttcacgtgttcctattacaaatctttgaggaaaagaggttgggagggaagtctgttaggggtgagatggcttattggccatagtcaccagagcccttttggttgtatgtttatactcccaatgtgaacatgataatcatcacaaatggagacagctggaagaaattttaaaccatgaaataagttaacttttattgtacactcttaaatttcctgctagtctcctcaaaacattatgactgcacagtttccatagtaaccatgaacaaaacagaacagtctacacgatttggccaacacctgattcaaagataacacttaatggtgcaaagtggcaaaaaatgttattgacagttttctgaaaatgtacaagtctgctccggagtgtccaaaaatgaggaaataatgtcaacggtgtggcccagcaactagaaaatatttatgttgcagtataaccagaaagtatacgtaaagttgttttgttgagcaatggatatcttctcagaggcttgagactagaatatgattttcttccatcttggaaatactagctatattttattagaagtactttgtaaaccattttaaccattttagtgtacaattcagtggcattaagtacattcacaatgttgtgcaaccatcatctctatccatttcctgaatatttctcatcatccccaacagagactctatacccattaaataatagctttccattctcccctttccagcacagcccctagtaaactctgttatactttccatctctatacattttttattcagataagtgaaattacataatatttatccttttgtgtatggcttatct

SEQ ID NO: 131363 - DNA, 1270 bp, Homo Sapiens
  misc_feature (976)..(1031): n is a, c, g, or t
tttaagaaagaggaaacattttgattattttattttttaatcttcaaaattttctgccatgagacaggaatgcatgatagcaatggctcaacatcttcacatgaaacacttggattcattttcattcacaagtttttctaaaaacatctacaatttcataaccccacccacttccaaccattatcacagatttaactgaccattaaacagtagttgccagcattaaatagctggaacgcttcctgcgtattagtagtgtcttttgaaactaccaccgaagagtatcatgattataaatctcattgtacatggcaaccccaaaggtgactgatgtcctcaaataaactccctgctgatcactgagagctgtattccccaggtacttaaagaaatgctctttcttctccaagaactgcctgttcatgtcagtatatttcttgcagggagtatagcacatgctgatctgatgatgtaataatcattgctaacagacagatatatatgcctgatacttactggcgcgctccgataagtatgtacagaacatacatactgaagaaagatgggttgcttggaatctctcttcttttgaagagaactattttgaggttttttaacagttgtaaacaaaaggaaagatatacagatacctatacacatagagatctacactgagtattttcaacgtggtgcatatcttcttatctagagatacacacagtgtctccactcgccccttcacacacacccacacccttccatacagcgtgtgaatataaatgttgtaaatgtccttgggagttcactggagttttcatattaccaaatgatgatgaaatacctgatttgtattactcctgagaagatattagaagggaatgtcagttctgatgcactttggaatggcacaatcacgtaaacgcctgcatacttaagacttcttaactcatccaaagtttctaaacatgatttgacnnnnnnnnnnnnnnnnnnnnnnnnnnnnnnnnnnnnnnnnnnnnnnnnnnnnnnnncttttttataatcaaagtataaacatataggaaatacatatttgtcagtaattactcttaaagtaggaaatgtactgaaaaccatagctagccaacagaacttaaaaaaaatacctttccaatgcataatacatgcattgcccaaaagagtaggatagccacattagacttacaagacttacagcaactccaccagaaaaaaactgctacacagcaagtctgttaagtatgctgttggt

SEQ ID NO: 131364 - DNA, 674 bp, Homo Sapiens
  misc_feature (449)..(572): n is a, c, g, or t
ctattttaaaggatttattttccagcagtcctgaggggcaaggacaggacaggagggagaaggagatcccaggacgcttgagggccccgttcatgggcagtaggcagattcgtccttctagtgcctgtggcaggcaggttgaccctgggttcgggagggacacaggccctggatgacactgagctggatgcctaggcagtgtcactccccacactttcaacctgagccccacagcaagcctataaggtgaacattctcactgtgatttgtcaggctgggttcagggagtgaaatggcctcctccaattccacaggttcaaataccctgcagagcggcaccagcctccctcagaaaggaccagacacttgtaacatttatgtcctttacctgggacactgctgtcccatacttgctgtatgaaaagaatatttctcaagaggaagaggannnnnnnnnnnnnnnnnnnnnnnnnnnnnnnnnnnnnnnnnnnnnnnnnnnnnnnnnnnnnnnnnnnnnnnnnnnnnnnnnnnnnnnnnnnnnnnnnnnnnnnnnnnnnnnnnnnnnnnnnnnntcagccagaaaggcatagatagacccaaatcccagtctttagcctggcccaaccacctgagaatggtctctacccaggattccttcactcaattacacccta

SEQ ID NO: 131365 - DNA, 1516 bp, Homo Sapiens
  misc_feature (43)..(61): n is a, c, g, or t
ggtccaaggtagcgaggcctgggtggcgaattcggcacgaggnnnnnnnnnnnnnnnnnnngtccttgtgttagtacttcagagacagccctgtccatagactttattatttggaagggggaagaggaggtccttggcactggttgggatggaagccccaggggcaaaggtttaggagttccagggctcagctgtcactgggcagggcaggcacactggcaagggcaggcagcaggcgtgtatatatgtccaccccacggaggaacacagcctcatgcagccgttcatcgtggtcgtgcagcagcacaggtgtgcggttcatgggtgagaagcctagagctgggacccccaccgcgcggatatagcggttgtcagtggcagcaggcatgatctcaggctccagagtgaggttcatatccttgcagacccggctaaaagctgcccaccaagggtttgagtcatcagtaggtgtcacttgggggtgcatccacttctgagcaaactctagggtgaccccctcgccagctgcctggcaccagctctgcagctgctcctcaaaagccttgaagtccacatccggtgccacacggaagtcaaagctggcgctcatggtggcaggtatcacgttataggccacgccaccctctagcttagtcaggttcacggaggtcacggacccctctttcaggtgggggtttgactgcagcctctgccattccttctcccggaatgccaggatggagtttacaaccttgtgcagcttctctgctgctgtgtcctccatgaagcgtgaggcatggcctggcctcccagtgctggtaacccgcacccaccagggactccgctcactataaaagacagtgaaggcatcagtgggattggctatgccctcatccagggcaaagcctgccctcagggcgtggaactcaggccgctgcacgaacagctccatgccttggtgacccccaacctcctcatcaggcacaaaggtcatgtggatggttctggggaaccggtggccctccaccttcagcctcctcacagcttccaggtactggatgctgacgcacttcatgtcctgggcacccctggcatagatgtagccctcagaatccttgaaggcctcaaaggggtcgtgactccaatgttccttgaagacaggcaccacatccgtgtgggagttgagcaagatggaggagagtgtagggttggtgcctggccaggtcaacacggtcaccacatagccaggtgccacctctactttctgacagcccaggcccagctggcgggctgtctcctcaaagaaagccacagcagctccatagtcaggcttgggctggacagtgcggatacgcaggtactggcggaagagcgtcaccgatgggtgctcctcctcgggacccttgctggtcatggcgctgcgcgtggtgagctcactctcctgtcgctgggctcacgctcgcctctcagccctcgtgccgaattcaacaccccaggcctcgctacctagccgtaa

SEQ ID NO: 131366 - DNA, 856 bp, Homo Sapiens
cctcttttcaggtgggggtttgactgcagcctctgccatttctttctcccgggaatgccaggatggagtttacaacctttgtgcagcttctctgttgctgtgtcctccatgaaagcgtgaggcatggcctggcctccccagtgctggtaacccgcacccaccagggactccgctcactataaaagacagtgaaggcatcagtgggattggctatgccctcatccagggcaaagcctgccctcagggcgtggaactcaggccgctgcacgaacagctccatgccttggtgacccccaacctcctcatcaggcacaaaggtcatgtggatggttctggggaaccggtggccctccaccttcagcctcctcacagcttccaggtactggatgctgacgcacttcatgtcctgggcacccctggcatagatgtagccctcagaatccttgaaggcctcaaaggggtcgtgactccaatgttccttgaagacaggcaccacatccgtgtgggagttgagcaagatggaggagagtgtagggttggtgcctggccaggtcaacacggtcaccacatagccaggtgccacctctactttctgacagcccaggcccagctggcgggctgtctcctcaaagaaagccacagcagctccatagtcaggcttgggctggacagtgcggatacgcaggtactggcggaagagcgtcaccgatgggtgctcctcctcgggacccttgctggtcatggcgctgcgcgtggtgagctcactctcctgtcgctgggctcacgctcgcctctcagcgcccttccctgactgtggcctggacttagggtccagcgaggtcgcctgcgaggtccc

SEQ ID NO: 131367 - DNA, 765 bp, Homo Sapiens
  misc_feature (46)..(46): n is a, c, g, or t
ctgagcaccagcttgatcttaggatttccaaaagtaacctgctttntgcctggatagggttaaaatagacctttcttgcctatccttgccttaacctatctgcctgaggttggcctgagattgtgagtcaacgactttgctatcttttcctcagtgttgaactttcattaagaaataaagtcctagcttcttacagagaggggtccaaatggtgaatgctcatcctgcctggattcaaggaattagctcagagattggcccctagcttttctgcctttgtagggacagcaaaaggggaaaatttgctgcagaaaattccaaaagattgctgtagctctcacagggaagtggtaaagatcagctaaacctgggttggggtgctttctgcccagtgggtcttggcataagtagattaatcctgctcttttaagaaaaggcaacttattcaggcagtctggaaagggggttctcagaaaactcagtttctttattccttcttttctcccaactactgttactggttatagaggtctttggactctaaagaccaatgtttggccactaactggactaatatgtatctttctgtgatttcatcatagaggtctgttttgtgagggtttggggtgcagaaaactttgattaaatcttaatgggaggctgggtgacctggattatctacagtgagcagacttaaatggaacagaagtttatgtgtccaaatgatggaatcattaaacctgagtgacttgaaaaaagttaaaa

SEQ ID NO: 131368 - DNA, 676 bp, Homo Sapiens
tttttttgactgtttagaaaaatttatttgaacatatgaaaggaaatttagacacccccaataaaactgagaagttcctttccgaggtgaggggaattcctgacagcctccctgagcagtgctgcacataagcttgtggtcactacgcagcctgggctcagctcacggggctgcagaaggagcccactttttctggcggggacacatcgtcttcacgaggaaagaggccagacacacgggcttgcacccgtggctcctgccgtcacactcctcgccacacaggctgtgtctgaaatgcgcagagaacagaggctcccaggatcggcatcttttaaaaatgcacgcagcaggctctcggcagaggctggactcttccctccaccatccaatctgcatgtcaaagaatgcgaccgggtgggaagcacctggactccgtgacaccaagacggttctgccggcggggaggggctgcccgaccccttccccgaggttctcttctgggagtccggccaccccttccatctcgaaaggcttcgtccagcgagagcgcagaaggcacacacgggccagcctagcggatgggcctgaagggaaaggtcacgccggagatgaaggtgtggccggggtgcgtgggcagggcggggtgggcggcggatgtcgctcatggtgcggccgc

SEQ ID NO: 131369 - DNA, 678 bp, Homo Sapiens
agcttaccaatgttaggctttttatttcaaccttgggttttaacagaaatctggtgacactttaattacatatttgcatcatcccttctatcacaagaaatatacaaattataatgtgaaagacaacagtgactggaagtcaaactacagcaggctacctagaacatccctaaatgttgtaaattatatccgtccacccagaatcacaataatcacttatgctgtagttcctgccatatccatttatttgcattagaaaaaaaattcacattcctctctgaaaactgataagctttataaagtggagttgagaaatctagacaaaagcagtctgttgtacagaagcttgaaaatgttgattagtattttacacaatggggaccaaatgaaagacttaccttaaagatgggaactactgctaagttttttcagataactaattttaaaagaaaaatggacccactgagataggtggtccctgctttatcctattaaaggtaccttaacagtagagactctcaggaattttagctgttcactagaaagtgggataatcaaggaagaggtcctcacccaaagcaccatactaatgaggtcaaactctactgggctaggaagggaaacctatccctatttttctttttcttttctcttgagacagtgtcgcaacctgttgcc

SEQ ID NO: 131370 - DNA, 1394 bp, Homo Sapiens
  misc_feature (142)..(142): n is a, c, g, or t
  misc_feature (233)..(386): n is a, c, g, or t
  misc_feature (1054)..(1063): n is a, c, g, or t
ctacgggtaagttttttcggataataaatttaaaaggaaaatgggccccctgagatagggggtccctgctttatctaattaaaggtacccttaacagtagagactttcagaattttagctgttcactagaaagtgggatatncaaagaagaggtcttcacccaaagcaccattctaatgaggtcaaactctactgggctaggaaggaaaacctatccctatttttcttttctnnnnnnnnnnnnnnnnnnnnnnnnnnnnnnnnnnnnnnnnnnnnnnnnnnnnnnnnnnnnnnnnnnnnnnnnnnnnnnnnnnnnnnnnnnnnnnnnnnnnnnnnnnnnnnnnnnnnnnnnnnnnnnnnnnnnnnnnnnnnnnnnnnnnnnnnnngtctgtccctgtttttcacaaaacaatattgcaaaatgggtttccactgctttatcaagttaagaaaagaggctttcttagaggattgaagagatgatgcataaaaactttgagagccatagtgggtcatttttccttcaaaggccattccatttttctcttaggaattaacttgtaattttaatcccccttgtaggggcacttatttttctatctcctacctaacttccccctaaaaacatgtttaatgtaagacagcaattctaagaataaagtcacaatagttcagtattttatgatgcctgaattgttgtcattacatttttatcaattacagaaaaaaacccttcaataaaattaaccaatctggatatactttgttaacaacaaaggtttttaaaactgattttttctcctagaatgcattctaagcattaacttcttcaacctaaatgatgcctcaagtcatgcaattttctctacatatatgacaaaataaggaatatacatacagataaacatacataataagtgaagacaccattcacacgctcctaaaaggtatgcagacagacatttcctaattcacatagacttcttacaaatacttacaaaggtacactcttcaaaggccaagtaacaaccaccattacctttaacaaaaaagnnnnnnnnnncaattataggaaaggctttattatagtttgaaagattgatattttgaggagaaaggcaccaaattattatttttactattttttgcatatggcacaaaggagatatgtgaagttcccactgtagagtttttaaaacctcccatcttggatcagtgtggcttcttcggtgaggtatcctgtcttcagagtttaaagcatttctcattgtatctatgaatagtcacacagccatgataggacactggcctgggcattgcagctacccctgtgatgatacttgttgcaggatcataacagagaatagtgtctgtggcttctccattttcccgtc

SEQ ID NO: 131371 - DNA, 1162 bp, Homo Sapiens
  misc_feature (31)..(31): n is a, c, g, or t
  misc_feature (221)..(274): n is a, c, g, or t
  misc_feature (1092)..(1100): n is a, c, g, or t
attgcccctttccagtatttttgagcttatntatgagttctggacatttatatctaatctatattttagataattactttttatacttttttaactcatggtatcccactcccccaccccccacctcattttttatttgtcccttctcaaagcagccacttagcccacatgggcgaaatcaagtctccagttatttctgccacaactgcttctaaggccgnnnnnnnnnnnnnnnnnnnnnnnnnnnnnnnnnnnnnnnnnnnnnnnnnnnnnnttcccagtgacagcatcatcgtgctgtttgcctgtattggctatgccttctaactccaaccagtcacttgagaatattctttcaagattctgggccccgattcttttctgtttaaatccctaaagcaaagatctaattctcaagcaatgtctgtagttcagtgggggtgaacaatgaatatattcatgctaggaatttgtgtctgttgttgtactcacagcagcaacatgagtgtaaacagtagacaataaacttttatttaagaaaactgattcagttgtgttggaaaaaataaagaaatctgatattaaacgttttctaagatcatttgtataggttcagtgtattcataagaagtccaccctgagatgcctgtaaaagtcaaatgtaattacacttcaaactttaatcctaaattattgacagatagatagatagtgaccaacttaagggtaatcatatatgtgactaacatttgggaggaaacaggaaaacagtggtctcaaaacaacaatatcccagtctccatttgaaagagcatagatcttggtaaatcattttgaaaactatgtgctttatttcccaaaagatcaaacttaatttttaaaagacacccttttcagaagtatgggttttcattgctgtttagtttcttaggtgtggtatgtcttacgtagcttatgcttacaaagccaaataatcgcagggcaaggcagataaaggcaggcaggatagtgacagtggctcggtgagcatccgccaagggcctcagaccactgttaccataaaaacatccacccagtgttatgacgtccgannnnnnnnncccttaagaaggtggaaatatggcttttaatacatacgaaaccttcagtttttacatgcagg

SEQ ID NO: 131372 - DNA, 666 bp, Homo Sapiens
cacgctcaaagagggcttttgctcgggctttttatttcacaattgatgcttaaaagtgcttttaaaggcaatattgcaactacatttatttatttatttatttgctgcagaaatgaagttatttattaaaacacacccatggtagcaagttctgatgggtctgaagaggaggcaggagcacggtgttgagcttctaaacatcgtcctgccagggagggaccctgacaggtgcttggctgacatgctgtggccgaggcaggaaggaagttgcagaattccacgaaggcagaagactaccagtaggcaggtcccatgtcatcacacccgtgagagtggcagtggtctggtggccacagagatgtctgacagcgtgggtctggagccggtgatcggctggctttgagaggttccttcaggaggtgcctggaccctgatggacagcccccagcctcacgctcccccttgaggtttgcagagggtgccagaagtgaccccagaaagggttctctgaggtgctgcggtccctacccagcagccaggggctctgtctggaagtggccgtgtcgtggccgtgctgaaccgctatgagtccagagcttcccgggcctcctctgctctgcggggaaggctccggggctctccccaccttctcgaatctttgctcag

SEQ ID NO: 131373 - DNA, 686 bp, Homo Sapiens
ttttttagatgttgcttccaactgttttattgctaaactatcatgatacaagccgtataaaaatactttacatataggaaaaataaactacattaaactggagattaaaaacatttgcataggaatgtgatgtattcaaacgcctttaacagtcaggattttctaaacctaagcctgccagcaccaccatgttggagagacctgtttgttggagaattggttttctctcctctgagggctgtagaggccagaggggtgagtgaggttctttgacaagatgtccaggatgctaagcttgtcccaacagccatagcctcggtctgctcaggccaatcagaatgctgtgagcacctgctctaatggaaacaacatcatttgcatccattccattcaaagcttgaactcagcagggagtttattctggtcagccaacagctgcataaaggtagaatgttaataaccctttcacttccagctcccaggaccctgatggctcagggagcaactctctgttatcaaccaccagaaaagtttgtttttaaacagactgagttaaacagtgatgttggctgtaagtcaaggcactcacaaaagctgagggaaatggatgtttatgatcacaattttataggatgctgctttttcttaagcatttaattggaatgcaggaaaatacttgctatgca

SEQ ID NO: 131374 - DNA, 1038 bp, Homo Sapiens
  misc_feature (588)..(588): n is a, c, g, or t
  misc_feature (659)..(659): n is a, c, g, or t
  misc_feature (672)..(873): n is a, c, g, or t
  misc_feature (875)..(875): n is a, c, g, or t
gttcataaatatagattacatttattcacttgctcaattcactcatagcagtattcacaaaaactcagtaagtttgccacattaatttatgctctaatactaccaattctaaccattctaacatgctaagcctccaaagctcagtggaataaaacaaagttttatcttgttcaaggttagcagtcccttgtggatatttctggtcatccaggaaaggaatcaagctcaggcctggattccacaaagtcattcatccaccttccgctgatgacttcaaagtccttcctgaggtcatttcctagcctatgagttgcagagttgcaaatgggaaaagagccggaagaagcacacctgggaggttttgatggtttcttctgaaatgcatgagaaacatcactttttcatgcatctctctgatttgcacttaacctccagggaggctgaaaaaaatgcagtttaactttgtgccaagggagaagagcagatgagcttgatgatcaggcagcaaactcaccctctttctggattctttgccctgttcaccttcagtcctgattataagttcagggctatcatctgacccccttnttgtcattttacatcagactttttctgccactgccatctcaaggaatgctggcttgtgggttttcctcgtngcgaattcttggnnnnnnnnnnnnnnnnnnnnnnnnnnnnnnnnnnnnnnnnnnnnnnnnnnnnnnnnnnnnnnnnnnnnnnnnnnnnnnnnnnnnnnnnnnnnnnnnnnnnnnnnnnnnnnnnnnnnnnnnnnnnnnnnnnnnnnnnnnnnnnnnnnnnnnnnnnnnnnnnnnnnnnnnnnnnnnnnnnnnnnnnnnnnnnnnnnnnnnnnnnanctgcattatgatcggcaaccgcgggagagcggtgcgtatggggtcttcgctctcgctcatgatcctggcccgtcgttcgtggcggacggtacactcatcaaggggatacgtttcaaaacagggatagcaggaacagttgcaaagcacaagcagacgtaaagcg

SEQ ID NO: 131375 - DNA, 805 bp, Homo Sapiens
  misc_feature (33)..(33): n is a, c, g, or t
gcccgcaagggtttgattggggtgggggggttntggatttgcccggggaaaaccaccatagagaatttatttttttctcaggtgaagtcagtaactaattcttcctattcccgttggacacaaggagtctgtgagggggtgtgaaggaaggaggctgcggctgcgtcctggactccgtcctgcggtagggagtccagcagggatggctcagcctccgcacctggtgtgcagccggatctccatcctgaggaaggccttgaggttctcatcagccacgtgctcctccagggcagccagggcccgctccccaccgtcctggaagtgctgcagcagcctgtccgcgtactccacccacacgcagttggggcagccactcatgcagcagtttgtgggcggctggagctcaggtggcagcgatgccttgggcggcctggtgccgtccgcacctgcttgggagcccacctctacgtggtctgtcccgaattttctgcgcccatcaggggcttgcgctccgggatggtgcctttgaagaaagctgccacctccaggaagcctctggcagcagtccgggctggagaaccggcgagccccctgaggatgcagacaaacatgtgactctccaggaagctggtgaggcccggtctacccccagcagtgaggacatttcagctctcctgtcattgggcaactggctccatgtcctcagctttttcacttcctgtgactttagacatgttatttcacctctctagactcagttttcccactgtgcaatggaagtcatgggtatgacacggtgtgattc

SEQ ID NO: 131376 - DNA, 709 bp, Homo Sapiens
  misc_feature (444)..(458): n is a, c, g, or t
  misc_feature (616)..(616): n is a, c, g, or t
  misc_feature (654)..(654): n is a, c, g, or t
  misc_feature (656)..(656): n is a, c, g, or t
  misc_feature (661)..(661): n is a, c, g, or t
acttttcataaatttatttatgaaattaaatgtggtttctggcttggagaaggaatagtgcaagagtgactgtccatgctgctgaatcctgtgggctccacgccagctcgccaggccctggctctgctcctggcgccccttggcaggacagggcgccatctccacacacccgctgcctgggctgtgggtcagtcctgtgtgctgagccacagaattcggtctctctcttatggcttctcacgctcacgagcgtaaggcaatcttctgtgtcactaagaatcaattctttttctccattgtttgttgttagaaaaacaagatgccaaaatccaaacaaaaccaggaacgaggtggttctggagctaccgcacagcagcaggcagactgaccacactcccgactgggagtatgcagccgactgcaccgtcttgtccttttccgctnnnnnnnnnnnnnnnagtgaagagggtgtccagcagccagcggtgtcttgaggggctgggaggcgaagggcgggctccgggcgcaacacaagggtgtggaattcctggcttctgccctcccaagtggcaagctgcctggcaccactggccgggctggggactttggagactanagggcagaggggcacatggcctggcattgcaggcacananggcanagatcctgccagaggaatgaaggaggataggtttcagagaagaggtcc

SEQ ID NO: 131377 - DNA, 665 bp, Homo Sapiens
tttgttttgagaattaggacagtttattgtttgaccaacatgctgagtcttttccacattttacacagtttaatgtgaaatcaacatggcggctatgtcttctgagcccataacagatggaattgccaccctctgtgctcctcacagccaatcactttaaagggatgggtgaggggaaagtgaggggagaagtggacacacaccgcgagatgcaggctggccttcaatgctatggaggcttcccacctcctgaaggaaccatctaaacccctgctgcaaggatttcctgatgaaaccacacactgctgggagtgccaaccagacaggggtctggagtccaaggagtttgcacattgagatcccaaggttttggaacacctaaatagttcatgtcaaacaaaaattcaaagggtgtcctgatctgtgtgggtgcccatgacaatcaatcagagtagacttggggactggcccttgtgcagtagaggagcccaaaataccaccaatattctcactcatatgctgggaagaacctagtgtcctaaccaaaaagagtagagatggtctgaggaacacacccacacacagcagtccttgctgtgtaataaatatggagtcacatttgttcacacacagggcagcaatggatgaaaaatgctcgtgccgaa

SEQ ID NO: 131378 - DNA, 672 bp, Homo Sapiens
  misc_feature (641)..(641): n is a, c, g, or t
atcctaaatcatttttctgttaacgtatttatttttggcttaggaaaaacatgtactttattggcaaattgttttagctgtagacggatggatgattctacagccacactcccctttccgggtgtacatccggggcctgtgcacctgcgcggaatcaggcaactttgtttttcccggtccccaaaaagctcacctttgacacaccctctatatgcataggaaaactgctcttcttattcagggtctctttttgtggtggaattcagagaaactgggttgcaacatctttttagggagaggtcgagtatgttttttcattcgagtgactctgcatgcttaaggaatctgagtcggtataaaggactagaccactgaattgcgtacagcgtcccaggatgcctgcagccccagagtacaaactgtagatgctctcgtggcctgaatgtggaattttacccaccagaaagcattactggagcccaaactggcaactttaaatagctcaatgatatcggtaccttcccctttggtttcaaaagcaatcatgaccgaacattttcaactgtgaggcaaagctgacttgcataccaaaaaacacctttccaaaaacattcaatgaggtagctcagatcaattatcanacccaagtgaataccaagaagcttaataaat

SEQ ID NO: 131379 - DNA, 1561 bp, Homo Sapiens
ggcacgaggtttaagtgcctatgggctaagtcttttaagacttcaaaatatactcaaatgcttaaattatgacagcaaagacttaaggaaggtgttgagaacggagttgatacaaaattaatacgttactttgatagcttagcaaaggcctgcaacagcttttatcaagagtagtgtgacttttgctgaaagcagcagttttcttcatggaaggaattttatagcaggggcaaaatatatagaaacaatgaaaaggtttttagaaaaattcccttaagatgttaattatagaattatcttgatcatttgcacaagaatttttcaaacacttttcaaatgtgtcaactgagcatcttgtcttagcagagaaacgtgcttaaaaatgcaacttgttttatcttccttggtttttctcaacaatttccaaagaaaattctggcttcaaatactggaatatgttcatccgactgaggtctgagaaagaagaaaattaaaattgaacaacttgcttttttcttccttgatttttctgaacagcttccatggaaacttttgcctcatacagtggaatgggttcatccaactgaggtctgaaaacaccagttgataacttctccatcacatcctttaagatacaaagatattttccctgttgtacatttgacaaattccaaacttcatcattcaggaaagctaacgttgctcccttgaggaaaaggcagtggctatctggaggatccaactgaaggtttttcttctgttgttacccagtggcctccaacaccaagaagtgtgatgatatcatgtttatgtggtagtagttgtagttttacagctggttcatcatctttactatataatctcactccagcatctaggacaatatctactcccaggccacctgtttcttccaaacagctttcagcaacatgaactttcccattagatacatcaatcactcgggctatgggaggtctgaatctttcaaggcactgcttatcttcaaggctgcatgctgttgaaatcactttggctcctctatgatgtgctaactgaatagctattgtaccaaatgcacttgctccatccattatcagcactgattttccaggagagagatgagaaagataatgcagagctgtataggcacgcactccatcccgaatgcttcctgctgcttccgtccatgtgaccttttctggtttatgaaccaagtaatgctcatgtactctaacaacttcacaaagtccagggtcttcagagtccaggggcaaaattccaactacttcatcatctggttgaaagaatgataccttgcttccgacatctaatacgattccagcaatttctctcccaacaggaaataaatcctttttcatcttcatttctgccagaagctttgtatttatctggctcagagcacaagctttaacttgaagtttcacacagttatcctctgtaacaggaagatcttccttttcttgaaatacaaatgttatttcttcatctgtggaactctgttggaaatataagccctcgtgccgaattcgccacccaggcc

SEQ ID NO: 131380 - DNA, 1039 bp, Homo Sapiens
  misc_feature (664)..(664): n is a, c, g, or t
  misc_feature (713)..(713): n is a, c, g, or t
  misc_feature (721)..(721): n is a, c, g, or t
  misc_feature (757)..(757): n is a, c, g, or t
  misc_feature (773)..(774): n is a, c, g, or t
  misc_feature (796)..(796): n is a, c, g, or t
  misc_feature (817)..(817): n is a, c, g, or t
  misc_feature (819)..(819): n is a, c, g, or t
  misc_feature (847)..(847): n is a, c, g, or t
  misc_feature (900)..(900): n is a, c, g, or t
  misc_feature (936)..(936): n is a, c, g, or t
  misc_feature (942)..(942): n is a, c, g, or t
gtggcccgaggctgcagggcactggcagttgaggttgtctgtttattggtgaggaaactcctcgagagttaatacagtgtaatcttttcccagaggtgtgtagagggaagggggcctagaggcatcccagagatagcttatagcaacagtgctttgaccaagagctgctgggcacatttcctgcagaaaaggtggcggtccccatcactcctcctctcccatagccatcccagaggggtgagtagccatcaggccttcggtgggagggagtcagggaaagaacagacaacagagcagacagaccagtgatgaccatgggcgggagcgagcctcttccctggaccggggtggcagaggaaagcctaagtgaggggtcagactataaacgttaaggaaccgagatgagcacctgcttcaagtgcacccttcctacctgacaaccagggaccagaactgcagcctggggacagcactgggagcagctaacagagcactcacctgccccagcatggccgtcgcagccctggtcctggcaagggagggtccctgtggagtaaggggagacgagggaagccgctcctggaactgtgagggagagagggatggatttgcccgtcaggcccattcacgtctgacagtacaggccactcagtcataaactcanacttaactgaagacttcagaaacagagttccctgagtgagggaaactgnagattcangggcgcctgcacaggacaggaagacagagactcaanagcagggatggggcanngaagaagccagtgtggcccaancgcacttgctggctgctgggnanagcaaacctggaggcggagaccagccanagtcatggagggctggcaggtgaagggggggaatttcaacaggggcctcctgnaccctcgtgccgatcttggctcgaggcaatcctaanggggcntataaatcctatcagtcaaacgtttctggtgaaatgtttcgccaatccacaacaacaacggacaaaagttagcgggggctaagaggggtatcaatag

SEQ ID NO: 131381 - DNA, 660 bp, Homo Sapiens
  misc_feature (640)..(640): n is a, c, g, or t
aacagctgaataatttgtaatgaagactaagcaatagttaaaatataacattattaacagttgtggaaaatacagaaatttatcatatcattaaaccagtttttattaaaaaacaaaatgtgatgttaggtcagttcagggataaattaagccatacattatattgacttccacttacatgagattcctagcaatcatatttgctgcaatgattacccactgacttgcattcattataacaaggtacaaataaaccaaatggccaaacagcaaccaaaatatactgttttaagagttaaacacattcttaaaattaaaatgctaaaaagtacctaagagacttaattgggactctcatatttcaaaagattttgggttatgatgacctagattagttccaggagcagtagcttgtttaccaaatctaagatcttggaaagaagaaaatgttctagcctgtttttggcatcattcatactacattgtttaaaatgagctagaatgggggttatttataagctaagctactggacaaacacttcatctaataatatcttgtatacacataagtcagatttaataagaatcaagatcaggtattaagaattcacttttaatatcctatatactttgtctttgntaattagtatcaccactatt

SEQ ID NO: 131382 - DNA, 1291 bp, Homo Sapiens
  misc_feature (135)..(168): n is a, c, g, or t
  misc_feature (176)..(431): n is a, c, g, or t
ctccacctaaaatttatttgaaaataaattatggcaggaattcacctgttaagacaatggtataacttgtcacaacttcatcttagaaaatcggatttaattttcatagctattgaagttagaggctttattccnnnnnnnnnnnnnnnnnnnnnnnnnnnnnnnnnnaagacaannnnnnnnnnnnnnnnnnnnnnnnnnnnnnnnnnnnnnnnnnnnnnnnnnnnnnnnnnnnnnnnnnnnnnnnnnnnnnnnnnnnnnnnnnnnnnnnnnnnnnnnnnnnnnnnnnnnnnnnnnnnnnnnnnnnnnnnnnnnnnnnnnnnnnnnnnnnnnnnnnnnnnnnnnnnnnnnnnnnnnnnnnnnnnnnnnnnnnnnnnnnnnnnnnnnnnnnnnnnnnnnnnnnnnnnnnnnnnnnnnnnnnnnnnnnnnnntgtgagccaccgtgcccagcctgaagctagaggctgttttcaatatgtcattattctcatttggttaggataagattgaagggaggggtagaaagtttcaaaggcggagagtttcaaaggcatcatgttaacaggcagcaacacgatcaagccccacacgaaggaaccaccaagactggagtgtgcattctcattgtaggaagtcttctgctaacttgttgaattcatctgcaaaacgcaaatgcaggttgtgtttgccttctggcatcaaatgcagccgtgagcctttcacgtgcttatgaatgaagtcggcatgaaaccgtgggaccagaggatccttctcaccgtgcacaatcaaggcggggcactggacccggggcagcaggtgccggcagatgttaccatctgggagatgtttaaactgtcttatgccatccacccacttttcacaggttctggcaaagtagtcatacccatagagggcttctagaggctttcttgttctctcactccatttggaaacatctcggatgccctcatatatcatgctgtcttcgtcagtgacgtaggcgttggcgccccagatcaccatcttgtggatgtaagatggatattttgcagcagcaatgagtgcggttatgcccccatcgctccaccccagcagagaaaccttcttaaacttcagcgccttcatcaaatcaacagcatcttttgcatccctttcaaaaaagtctgctgggaaatcgcgacctgtgaccatggtggctgtgctgggcggccggggcgtgttgcgcctgcggctgcttctctcagcgctgaagcccgggatccacgtcccacgggccggacccgcggccgca

SEQ ID NO: 131383 - DNA, 693 bp, Homo Sapiens
tgagcctttcacgtgcttatgaatgaagtcggcatgaaaccgtgggaccagaggatccttctcaccgtgcacaatcaaggcggggcactggacccggggcagcaggtgccggcagatgttaccatctgggagatgtttaaactgtcttatgccatccacccacttttcacaggttctggcaaagtagtcatacccatagagggcttctagaggctttcttgttctctcactccatttggaaacatctcggatgccctcatatatcatgctgtcttcgtcagtgacgtaggcgttggcgccccagatcaccatcttgtggatgtaagatggatattttgcagcagcaatgagtgcggttatgcccccatcactccaccccagcagagaaaccttcttaaacttcagcgccttcatcaaatcaacagcatcttttgcatccctttcaaaaaagtctgctgggaaatcgcgatctgggggcctggaatgtccatagcctcgaggatcccaggcgaccaccgtgaagagcttcttattgaggttcttgagctgaggtccaaaatcagtctctccacttcctaacatcccaggaagtagcaggactgcgtgatctccctctccagtctgctggtaatgcagctgaacgccattcacagccactttggcagaggttaccgaggtgccgaacgcggccgc

SEQ ID NO: 131384 - DNA, 834 bp, Homo Sapiens
cccgatccaaggatttattccacaagaaaagactgatccctgctttaggctggggaagcagaaattaggagtccccagagccttctacaaacaaaaccccagccccagggactcagtgtggcggaggctgaagcacgagcaacagggacagcacttggaagggagaaaaggtgagcttcaggcggttgtcccgaagggtcaagtggccagcagggtctggtcgctccaagagatcgcagaggatggcctcctgaaccggcagcgacaagtgcagccagcagtccacgtggctgccgtgggcctcatacagcctcaggaccagcgagcggcgctgggggctgctctccgcctgcttgacggtctccaatacgaccgcgggtgaagacacggaaaacgcactccaggaggtggcgggcgctgggctgggggctggcagagccaacagggggaagtttaggctgtaggcagcttggataacgccagcatcctggaaagagcccttgtgcggcatcagtgcataggtgaactcgtggcgccccgtgtcagcagtagcgtccggggctttaggcgcccgcaagagcgagaggctgaggatgctgcctcgcactgacgcgccatacttgcagtcgttgagcagggccagcccaaagccgtgttctgacagatccatccagcgatgggcccacacctggagggcagatccaagacccacttggtggccctgtgcccctctttgtgctcccagactccagagctcctgtcactaggccgagcacaagctctagaaccacacaactgaactccagctcccactgtacggggccctgggcatgc

SEQ ID NO: 131385 - DNA, 819 bp, Homo Sapiens
tttcccgatccaaggatttattccacaagaaaagactgatccctgctttaggctggggaagcagaaattaggagtccccagagccttctacaaacaaaaccccagccccagggactcagtgtggcggaggctgaagcacgagcaacagggacagcacttggaagggagaaaaggtgagcttcaggcggttgtcccgaagtgtcaagtggccagcagggtctggtcgctccaagagatcgcagaggatggcctcctgaaccggcagcgacaagtgcagccagcagtccacgtggctgccgtgggcctcatacagcctcaggaccagcgagcggcgctgggggctgctctccgcctgcttgacggtctccaatacgaccgcgggtgaagacacggaaaacgcactccaggaggtgttggtcgctggtctgtgggccttgtgcggcatcagtgcataggtgaactcgtggcgccccgtgtcagcagtagcgtccggggctttaggcgcccgcaagagcgagaggctgaggatgctgcctcgcactgacgcgccatacttgcagtcgttgagcagggccagcccaaagccgtgttctgacagatccatccagcgatgggcccacacctcaaatcgagcccagtcccaagaggtattgtagtgggtaggtcgctgcaggtgcccaaactggatctcataggtggcctgggaactccgcacgcgagcagggaactccaccttcaggaacttgtgggcctcatgccagtgtacctcggtgtggaagcggacataggggcagcctacgtccagcacacctcctggta

SEQ ID NO: 131386 - DNA, 937 bp, Homo Sapiens
gggccctccatgcccagtgtaccccggggtgggaagggggccattgggggcaggccaaactttccagccacaacctttcggggtaaaaccgaattgttgggggctgatctttaagcaagaacccagggggtttgcccccccaggccgcccctggggtgcccccactgccaggggttccctgcctggcccagccccaggctttccgtgtctcccaggtggtagtccatgacgtccccatgcatcccagtacaaggggacatcatcaaatagcacaaactggttccccacggcgccctcagcaatggcctccctgccagaggccaccaggaccaaggacgtcaggcgaccagttgggtccagcttcactcggatgatgccattgtccagagtcacggagccatcagtctttgtgggagggggccttgaggctgagtctgtaggggcttcccacaccaaaagtcttcccacccccaaccccagccccgcctcaccacttgctccagacaggggagctcaggaccctcagttgtaagagagtatcccagcacagttcctgccccccagggcatgcaggactcacctcttgcactacgaacacaggctgctggggcagcaggggctgcagtgaggtggggggaggaacaggagcatagcccatgctgggcactgtcaccagggctaggctgtgggccccgcccggtttgggcagggccatcacttcgatccgcttccagggcagtgtgttgacgatgaggaggccctcaggacctggctccccagcacacagggctgcggctgcagcgctgagcagtgtattgccatgggaacggatgtcttcataatggcacatggcttcctctgccaccatctggatgcagcttccagtcaccacatcatggaactggttcagaagaaggagcctccagaggtgctgcag

SEQ ID NO: 131387 - DNA, 730 bp, Homo Sapiens
tgcggccgcccttccgccaggtgggtcacgcactgaaggagaagtttgatggtgccactgaggtggagccacgccgcgtgggctcctccagggcactggtgccacgcaacgcacagttcaagccgcacacagatgaggacctggtgtacttggagcctagccccgacttctgtgagcaggacatgcgcagcggcgtgctgggcacgaggggccgcacatgcaacaagacgtccaaggccatcgacggctgtgagctgctgtgctgtggccgcggcttccacacggcgcaggtggagctggctgaacgctgcagctgcaaattccactggtgctgcttcgtcaagtgccggcagtgccagcggctcgtggagttgcacacgtgccgatgaccgcctgcctagccctgcgccggcaaccacctagtggcccagggaaggccgataatttaaacagtctcccaccacctaccccaagagatactggttgtattttttgttctggtttggtttttgggtcctcatgttatttattgccgaaaccaggcaggcaaccccaagggcaccaaccagggcctccccaaagcctgggcctttgtggctgccactgaccaaagggaccttgctcgtgccgctggctgcccgcatgtggctgccactgaccactcagttgttatctgtgtccgtttttctgcttgcagacctaaggtggagtaacaaggagtattaccccc

SEQ ID NO: 131388 - DNA, 886 bp, Homo Sapiens
cgcttctgtcctactttatttattggtcagggcaatcacaaagatgtgcataggctcaaagaaaagagacataaccccgaccacgcgatggaagaagtgacacggtcatgttatgagaggagtgtgtgggatgggagatagggctgtggccacctgcagaaaacagcatctgctacaggctgtcatggaagcgcaggatggggatttagcctacctgaggggtcagtcagcaaaggcctctgggaggaagtgagatcttcggctgaggatgtgaagggctaaaaggagaatgaggaagagtttcagggagaggaatcaatgaaacgagtccagagacgctggtgagttggatggtttgcttcagtatgatgacaatacagagggcaaggagactggtgcaggaggagagagaaggtgccatgtgctctgggtggcgctctgtgccggacccccttagaagaggagcagcctccagtcagcggtgtcccaggaacacagaggctggagaggacaatggcagccaatccctgctcccaatctggtgacagtagggaaaagctgcatggtctagatccactctgctccctggccccagtatagaagatcaaattcaatctgcccaatcttatccagataaagtaaaggaagactggaaaaaagaactaatccaaagctccatctgcccatgactttctctgctgatgccggaggcagctatggataaagagatggcacacggcatgtcccaacgcagtggaggtggggagaccctgcaactccacagggaaagagtgaagttgctgccacctgggcatcagctattctctgctcttctgcctcatcctcaattcagaccatgatggagctgcatccgaagcagttgccg

SEQ ID NO: 131389 - DNA, 1923 bp, Homo Sapiens
  misc_feature (1733)..(1795): n is a, c, g, or t
tttttttggaagggaccactgcctttattgcctctgtgctggggtcccagcctggggttcagaggcctctgggggcaataggtgaccctggacccaaattattgctacttggccaggtcaccttggggcttcccatactgccctgagaatgggtgggatgagggcatgcaaacgatatgcaaatgacatgcaaaccaacccagaggcctctggcacatccatgggtgctggaagagtcagagcctagtggcctgggagggcgacggggcacccagctcaggcccagcctcggaggcaaggtttgagggttggggggtccctgagcatcagccctgcttctgccgctggctgaggaggagcagaagcctggtcccaagacagcaggaagaaagcaggaccctcgctaggcggccagatggcctgaggcccacccagacagggacgggacctgccctgggtcgctcagccaggcagggacagcagggaccagaatccaggtctcctgagccaggcagaagccaaagtagcttggaggctgaagtgacaaacaataaaatacagggataaataaatcaataataaatagaaagcaagcagcccagtccctgatccctgggctgagagcccttccaccaggcccaagtccaggaggagacaagccctggtctttgcgctgggctggccagtccagaaggctccagagggaggcaggcagggtcccggggccctcggcgtgtgcaggtctggctcagttgttattcattatccaccaggaggctgggaagaacacagtggtgagggtgtccggggcccgcaggtggtcgatgaggatgcgctggaaggccttgctgccaggcgactgctggtgccttctccaggaggcctcatcctgccagaactcatacagggtgaaggaggcaccgtccagcatcttctgggcggacacatgcagacaatggctctgggcccctgtgaagtccacatagcagcgcagggctcggtggaagtcctgcaggccttcctctgccacctggacctgcctctgggccatgaggatgtgcaagtcaggccccttggccaggtcctcttcacgcaggggttccagccggggggccttgcactcgagctggtcgatgagctcctggaggcggttcacctggagccgccactgcatctcggcctctgagctgcgccctgtgtcagaagagccgggggaccaggtggatgaccggctgacactcctcagggctcggcgtcctgcccgccggctgccgcagagcctgctctgcgcctccacgctctctgcatctgaccgccagccatgggcctgggcctccagggtatctgacgccccctccagcgagctctgaagggcttgcagctggctcaccgtctcccgcagcaggaagcgcgtcacaaactggtccactttggaggccctctcgtactccagcttggtggcatccatggcagcgagcactgcacggttcagcgattccaatgcagccagcaccggccggtagacacccaggtgctctgagaagtagtcacacagtttttctgtttctaaattgtcggtgagatgcccatcaatgccgctgaacagttcctgcagctcccccaggctgagaaccccatcggcaaagtaattctggaattcctcaaatgagagcttcccatcatcattcttgtctgctctgcggaaaacgtcctggaagagcgtgtgtccggcnnnnnnnnnnnnnnnnnnnnnnnnnnnnnnnnnnnnnnnnnnnnnnnnnnnnnnnnnnnnnnncggccggagcaggcacacggtgagcagccccgcgcacgccatggcgccgccacccgctcgggctcggctgcggttgctgccgaccctggacgccgcggcggacatcccgggaattccggaccggtccc

SEQ ID NO: 131390 - DNA, 1119 bp, Homo Sapiens
gttattgggggaacgggagggtttttgggaaaaggagggggttttgggaaacggaggtgtttggggaagggagggttttgggaaagggagggtttctggggaaagaaggtcgttttgggaaaggaggttgttggggaacggaggttgttgggggaaggagggtgttgggaaaggaaggtgtttgggaaaggaggtttttgggaaaggaaggtgttgggaagggaggtgttgggaaggatgttggggaaggaggtgttgggaaggaggtgtttgggaaggaggtgtctgggaagcctgatcagctatcacatctcccttgggaatcttgccttcttgcagtgagtatttgcaactgtatgtcccttaacaaagaaggaattgtgtggaccacatcctcacagaacacagcatgtattacatgaaggactgacccaatctgtgtctgtggtgtttgggacaatagctgagataataaggccttccaattcccccaggttctccaatcatgccacatgaccctcttaacatctctgatacaataaccagagaggggatagtcatccccattgttaagatgcagatacagaaattcagaggggggtgccgactgtctcctatcacatggcagcagcagggggcagagctggacagtcccagctccatcctggttctgctgccatgggtctggggtgcgttactccctggctcctttctgctggctctttttaatggccggactcctcttgggagctctgttcagtctaggcttatccagctgagaaggtgcagcactttggcattttgagggacacatacaggatgcggcatggaatgtctctgaatttgggatcctgccgatggtaagctttaatttctccttctggatggaccgggtaagaaacagggagacctcctccaggctctggggtttcaggtcattcactgccagaagatgatctccgtggcaaaatatgcatcccaaacgtggggggccttcccactgagacacacatatccgtcctgtggcttctgtgagagcagatagttgatgacatcaggaggagaaaggaaaacgttcagtttctccacttggctttcatcggggatattaccttttgg

SEQ ID NO: 131391 - DNA, 1027 bp, Homo Sapiens
  misc_feature (655)..(655): n is a, c, g, or t
  misc_feature (751)..(751): n is a, c, g, or t
  misc_feature (820)..(820): n is a, c, g, or t
  misc_feature (864)..(864): n is a, c, g, or t
  misc_feature (891)..(891): n is a, c, g, or t
  misc_feature (916)..(916): n is a, c, g, or t
  misc_feature (957)..(957): n is a, c, g, or t
cagttgtagtagaagtaaaagtaactagtagctttattgagcacctaatatgtgccagtcacctttgtaagcacgttacacatattacctcatttaattatccaacaaccagcaccatcattagtcataattttacagaaaagaaaactgaggcacaaattggttgaaggagctgttttggaatccctgcaccagtctgattccatgcaagctctttttgctacatcatgccgatctgaggtcctgaacccaggtgctctgtctcttagctcagtgccttctccaaatgctacttgatatgaaagaatcctgaaagagtcctccttctggatggaccgggtaagaaacagggagacctcctccaggctctggggtttcaggtcattcactgccagaagatgatctccgtggcaaaatatgcatcccaaacgtggggggccttcccactgagacacacatatccgtcctgtggcttctgtgagagcaagatagttgatgacatcaggaggagaaaggaaaacgttcagtttctccacttggctttcatcggggatattacccttttggtcatttgtggtctgtgcttccacatcggcaggggaaagaaccaatcaattcctgagccttgttcttgcaggtggaggtcccatcctgngtctctggaagggtctggggttctctttgctgctaccacagactcatgggattctcttttgaaaataggatccattggctcatatgacaccattcntccagagactggtctggacatcatttcaatggatcaccagatcactggagcatgatatatccactctanagacacttcgctcgtgccgattctggctcgagggcaatccctanatgagtcgataaatcgtatcatgcaanctgtcctggttgaatgtatcgtcanatcaaacacatagacggagataatgtaactgggtgctatgngagcaccccatatggtgggcacgcgctccatcggactgcggcatgatatatcgcaccggggaaggtggtg

SEQ ID NO: 131392 - DNA, 962 bp, Homo Sapiens
  misc_feature (747)..(747): n is a, c, g, or t
agtagaagtaaaagtaactagtagctttattgagcacctaatatgtgccagtcacctttgtaagcacgttacacatattacctcatttaattatccaacaaccagcaccatcattagtcataattttacagaaaagaaaactgaggcacaaattggttgaaggagctgttttggaatccctgcaccagtctgattccatgcaagctctttttgctacatcatgccgatctgaggtcctgaacccaggtgctctgtctcttagctcagtgccttctccaaatgctacttgatatgaaagaatcctgaaagagtcctgaaagcacattctgttatttgcacttgatggtggaagaatgaggaaccttatttgtattcagggtacttctcagactccatctaagaccctgatctttttccttctggtactgatttgccctgttcagggctggtcagtacgactcacctccttctggatggaccgggtaagaaacagggagacctcctccaggctctggggtttcaggtcattcactgccagaagatgatctccgtggcaaaatatgcatcccaaacgtggggggccttcccactgagacacactgcagtgggaatacaacatccaataccagtgtgaggctcagctggccaggagggcagggcacgcagggtctcctgattctaggtcacgtggcacacctctgaagtagactatctcttctgtttagatattgtttcctctgtcactancataggagctaaccttccctcaagcagtcaattaacaccttacaagggcatgaatctaatccatctctgcatatcactcctacctggctctctcgtgcgatctggctcaggcaatcctaaggatcgataatcgatcagtaactgtctgggaatgttcgtacatcaacaaagagcgacaaatgtagcggggctagtggcataatatggtggtatgg

SEQ ID NO: 131393 - DNA, 509 bp, Homo Sapiens
tttttccagtggaaacacggtattcatttctgaggactgtgctaggttttaaggcaattgtcacatgtacaaaacagtcagatgagcagtatctgaacagatttaccacaacatgttagaaagagaacagcaggggaaatgttttcagacaaggagatgtgagattttccccagtcacgtaacccctggtctaccgactctgtggactgaaaaccaggaagatagacagcacattctctcttctcgcctccaaggggaagggccacctgcacactctcggaagcacccttctccagacccagacacgcttcttactgcagggccaggccaggacacaggatggtcggccaatgagtcttaagtccagctctaatttcacgctttatggctttgtgaaattcatctttagaaatgggaaaatcaagataccacagacatacaacttgtagttaatagttaagttcccctctatccaaacacaaacttgcttggcttggagctaaaactat

SEQ ID NO: 131394 - DNA, 126 bp, Homo Sapiens
ccaggggaaacacggtattcatttctgaggactgtgctaggttttaaggcaattgtcacatgtacaaaacagtcagatgagcagtgtctgaaaacatttcccctgctgttaccttctgatggttgg

SEQ ID NO: 131395 - DNA, 995 bp, Homo Sapiens
  misc_feature (743)..(743): n is a, c, g, or t
  misc_feature (762)..(762): n is a, c, g, or t
  misc_feature (816)..(816): n is a, c, g, or t
  misc_feature (847)..(847): n is a, c, g, or t
  misc_feature (940)..(940): n is a, c, g, or t
tttatccaggtggttttatttagtaaaattttacaaaagtcagggctgacttcttggctctgcccttcgaagagcacagttttccttagcagataactgggggaagccacgggcccaccagaggctctcgcaggccagtggtgcgacctcctgtccacaaccgtgagggacaaaggcctgtccttgaggctgctgggcaggggcccaggcagtaagtgagggcacctgcgaggctctgaggacacagcacatctgtacaccctcatggtgccctgaccacacagcagccagggcagagtgtgacagacagagggtttctgagcggtctcaacagctgtctctctggtgacgtttcagtgccttccccttttcctctgaactcatggatttggccacaagttgctccccctggactaagcagcccagaagccatgcccagggtccatccctgggcaaccccccaccaggtgccagcagcattcacatggggcagggggcccatgagtgccacctggaccccgacagcctgtcatggcatccagaaacctctgtctccccttggctctgccaaggacacatcctccatctcctggtcagacccgagacaagcccagaacacaggacaggtcctgttggagagatcccaggaatgggcctggggtctggaaaacagctccacagacagctctggtttccacatcaacccagccaggaagaaatgaaaattcctcataaaggtacanagtcctcctgattttaganacgtcgctttaaagagtgtcagtttgagcttgcgtggagtgacatctcctcgtngcgatttctggctcgagggcaattcctatanggagtcgtataatcgtatcagtcaagctgttcctgtggaattgtatccgtcaattcacacacatacagcggagcaaaggtaagcggggtgctngatgactatcacatatgcgtggctacgcgcttcatcggaacgtctgcactgataa

SEQ ID NO: 131396 - DNA, 1216 bp, Homo Sapiens
ttttttttcaccaaactaacatttatttagctttgttccctcccatccaagactgctgatctctaaacaagcatcaaaacccgaagctcattaacatcagagtgagcttcaataaggtgaacactacaatgatgtacaattacatcctaataattcaatgcccaagagccctgtagaactattgcaaggcccaggattatcacagtatgcaaatgcactaggaaaatcattacctatttagtcccctttattttggtgggtttaacatgagaagaataatccatgctacaagacgagatttcattttacagctgtagtaaccaagtgcataaaagcttgaatctgtcccaatagcttctaaaaaatttttcccatagtgtcagaggcaaaaataatgaaatcttgcaaatgtacagttaataggaccctagtggacactaacttcaaaaatgcatggtctataagatattataaggcttgattctagtttctgcactgttcctgttaataacaatgtctaattaaaacatctgtaaaatactgatagttttaattttacataaaatttccaaaacaactgttacacagtataataggtatctgcaatgaataggttattaatggaaatattaatttaaattaaaatctggttctaaatttaaattagtcatctctggctaatgaagagaaaaagaagtcacccgtgctgggaatacagtagaaaatttagttttcaacatctgttaaagcaaattcactgtaccacttgggctaaagaacaattcactttgttgctttctgtcttctccatttggcacatctgatggatttcacagttgaactcaatattagaactacagcctaatgcaccttttaatacattactttataatttaaaaaccaccattcaactttcttcacagtctgaaatcccccctccctgttttccagtgaagagacagcagagaacactcttccctgtagtagcttttcccccacagccccacctaacctgatgaatattttaaaaggaatggcacaaaatctcagctttccctttctttgggtctcatcttcagttacaaaataaaagagattagcaaggcttactggctagccgcaattcaatacctttctttctaattaatgcacaacaaaagagggttaaaaagcgatcagcactgactggtgtctaccgatgctggcactgagttgg

SEQ ID NO: 131397 - DNA, 1016 bp, Homo Sapiens
  misc_feature (38)..(38): n is a, c, g, or t
tttctgttgagtgctatatgtggaggttattgcaagtnccctgatatgagtatggtttcgcttgctacattgtgcctattaaagtaaaattttacacaagcctcgcatttctaagattagtgttcccgaatgaaatgtttaagaaaacattaaaagattatctctttttaagatggaggaaaaaaagtgaacaaagctaattaatctataatgaaaattgcacaaaataacatttcttaacaaatttaatacaattttgtgttctttgttgctagtggtataaaacgagatttttttccctcatttttctcattgtagatgtcatctctcacatttatatcagtgaggtttgaaattctgtgtagcagttactcagcacatatgagagggcagcgaatgaatgagatttgtcatgtgctaataaaagctgaatttttgtaatctaaaatgatgtattttctactattgctgttaatttgcattgttaaaaattcttaaagtttaatatgttatgttcagtcattgaaagcgaccactcatttttttcttaaagttgatgccttttctgctgtgctagagtcagtattttgcttctggcaggagagctgcaaactgtgtatcctcaaacagatgcaaaaagtagtgctttgcaaaacgtttgttttctgtttatctcagattaacatcctttaatacaagtttcttaagtgtaacttgtatttctgaaaatgcttaaaattattttatatttccctttgggaatttttctctatttccagcacgctgatttgatttaaaaatgtaataagaccaagagttggagtaaagggatattcattccatgttaaaagtggcttcatagctactgacaaatgtctgaactattgtcgtgcccttcaaaactggagttttctaaaataatcttatttttatacttgtatgttccagcaatttaagatatataccattgaaagggaaataaaacatttttgtttatttgaataaataatactccc

SEQ ID NO: 131398 - DNA, 721 bp, Homo Sapiens
tgaatttgactacttttacttacaagagacttttccccatcaaacgatttccccatccatttattacacttctgaagtaggatttctgaagtcatcttatggcatgtaattcttagtataatgcacaggattcctgtcattttgaagcacgaggagaggtttttgatatcttaaacatttttttagtgtagatgcacatattctccacttccaattgtaatagaaaatcagtttaaggataccctaatgatgcaaatgaaatgattagcaaacaactcaaatttaggagccttctttacaatccattgagtgaaacagattcacaaaataatttgttcaactgaagatttaatttattattagaaaatggttttaaactctgatcattacattgaagagtcaatgactgaggttttcttacctactgctcatctcttagacaataacttcttgaataatttctacatgagtgtctgtacaagcttttaaaaaacagaataaattaaagccccattcaccaaacaaaccacctcccaatctattatgttttgtcaccttgttcacagtttagacagtttgaagagatttaaacgtgttgctaggcaactagctcctgaagcataacgtatttccttcaacatcccagcccattcttttttatcatcttcatacttccatatgtcattgacttcagtgggtgcaattctttagactccagttg

SEQ ID NO: 131399 - DNA, 652 bp, Homo Sapiens
  misc_feature (33)..(33): n is a, c, g, or t
  misc_feature (50)..(50): n is a, c, g, or t
ttggtccacaggtttaggaccaggttggaaggngatttaaaccgtggtgnctaggcaaactagctcctggaagcataacggtatttcctttcaacatccccagccccattcttttttatcatcttcatacttccatatgtcattgacttcagtgggtgcaaattctttagactccagttgaatcatagcaaaaccaccaattgcatacagagatccagccaggctgaccaaactgatggagcttctttcttggggaaattcggtcattacatcccatttatttgttgtaaggtcaaaagcttcaactgaagctgaaagaccatcttcagtgacacctcctgcaatcacaattttgcctttatggactgctactccaaacatggaacgaggaattttcattggagccagatctttccaatctccttttttggggttgaagataaacaccctgtttgtacattttttgtcatctgtctttcctcctagacaatatatcatccctttatgtgaaatcacattatggccatagactttgatagggagtttttttacttcgttccattttgcagccacaggatcatagcataatactgaatccagcgaagcctctgtttgaaggtctttgcctgcaactacatagattttatcatcc

SEQ ID NO: 131400 - DNA, 754 bp, Homo Sapiens
ttttaatgtttgaaaatcactgctttaattaagcttagaccatgtgaaatgacaaagacctttaaaagcacattttgacctatggtactgaagagcaaagaggagattttacaagaaaaagggagaagacgcacagtgctccaagaaatggagagggagtcctaaaaaaatttacctacttctaatcatagactttgctggcttggcaattttgataagcgtagatcttgtctggtgctcaaatggccaggaaattgcagtcccatctgacagtaggaatagaaaatgcagaatggagctagaaatggaatagagatttctcaaggagccaaaggtggagggacctgaattccagaggtgagaggtaacaacatggatttgtacagtgcaaagcagcagctgtaggcagatcggatggaagaactttcttctagtagtttccagaccctgaagacaggcccagaaagacctttgaccagacccaggagttcccagcgtgccagggaggtacaagcacttagttaatgaggggtcccagccaataatcccaggtcctggaaggcatggttaggctgtcttgccagaagggtagtccttgattaggacagatggactcacatgaccaccctggagttggtcacacaggctccataatggccaccccagaactgtatgtcctggccccagtgtttgaaagacacaaagggacagctccaggaacattgttgtgttaagtcaataagttcttccacct

SEQ ID NO: 131401 - DNA, 689 bp, Homo Sapiens
  misc_feature (440)..(448): n is a, c, g, or t
gtttaaatacactctattttattttgtcttaaaatagtttaacctttatgctacagacttatttcaaaaaacagaaaatcttatcttgcaccaaaaaatatatatataacactctgttttattattttttctccaaagaccattaaatactaaagggaaacaaaaacgaaataatgaatgtaaagaaccaaattttgttttaaaaactagagttgcacatttgaaaacattaattctaagcaatgatttgtcatcactgcatcaagtccacgctcacactccagcaacagcagatccattaactgccaagtgcattggttcctagccatacaatggctaacatttcattttcacggtaagaggagcaaaaggcttcaatggcctctgtactctttaagaaacaaaacaacaacaaaaatatttcctagttatccagtgannnnnnnnnaagatcactaccttttaaaatttgttaagagaataagaagtaagtagtgttttaaataaaatgaaaaaatacaacagcatcagactaaaatacgtgattattttaaacaaacagtgcacaatctgaggaagtttggttagggcacaatcatttttatatctacatggaagtcacatcatacacatattggagaacagggattggggagcttgctttgccttaaaaaagtttaaaactaaaa

SEQ ID NO: 131402 - DNA, 686 bp, Homo Sapiens
  misc_feature (103)..(103): n is a, c, g, or t
gtcgtcacaaccccagggcatttattctattcgtacttgcccacaaatcagtttcatttgagtgtgttagttcatcagattcccaagattttgactcagcccncattagtctttgcttacagggcctcaagtggtctctttatgcacaacgagaatctcctgaatacacaacaggtgcacacttctggaattttaatctgttatcctgaggagaatggaatgaagggggtaagtgcccagcttcacttgaagggcttgcagccatagctgagcatgccccggttcctttgttctctcaccaagtggcaactggaggctgtcgttgatcactcagatgccattatgatctccactgagtcatccacactgtttcttgcagtctggagaaatgcggcactctccaggtttggggcacagctgagtactttcagaggtgcagtggaagcaacgctgacagttctggaggctgggaagtccaagatcacaagaccagcatctggcgagagccttcttgtgcaccatctgtgaattctttcttgtgatgatgtcaagaatctggggaccggctgtggctggggtctcgttggcatccagaaaccctcctgagccctctttgtgacaccaggatttgccgacagagcaaatgtgaggagaggcatcagaatttctctaggacttctgagctg

SEQ ID NO: 131403 - DNA, 921 bp, Homo Sapiens
gctcattgcatgatttcatctttaattaaataagtcaagtaggccatcaggagttgggttcacattctattctgcaaagcaggccctgactgctggggctgccagctctctgaagggcagccccagcgtttccaggagacggcagattgtctgtggccatggcaaggacatctgggacgacagtgacagcaatggggctgggagcaatgtggaacggcgccagaggctgagcagaatgagctacatgctacacatacacacacgtggatgcatatgtacataccatggcagtgtatgccgtgaaggggtgtctcgtaccatgcagacatgaaatagcaaacagggctgaggtgttggcaaaaagacagtgtgcaggacctgggagggagcaggggagccaggaaaatttggactagaatatacagctgagatggagacttcagggggtgcccagttcaagccaatggcagaagacgcagaccacatgggtcattgtatccccccagcaaagcacctgatccatgacatgagctaggcctgtgaggatggcgccatgtctgtagccttggaaacacgtaacaaatttgtccccagtccagttacggggtgccaaaggacacgagaccaaaggatcttggagctcttgagacaagtgaagttgccaattctgctttgtgcttttgaggttaagagcagcttccactgtctctgaaactgcagcgagttgacaggtgatgcggctgcatttaggaagccctggaccctctcccttccatctggctgcgccttgtcctagaagcttcacaagcaaacccaccaactcaggagccctggatttcagcagatggtccttctatcagcttgtacagatcaataagacacacttggcttgtgcaggcatctgcttccactcagcccccc

SEQ ID NO: 131404 - DNA, 951 bp, Homo Sapiens
gagtatcagtgatttattgggtagcccccactctaaacaccagcagccccacgcatgcatcctcaccagaaataaataaggcggcattcaatgaaccagtctgtcttcttcctaaggagctctggggagggtctgcctctgcccacctaggggctgggatcccttcagctcttgaggaagggttggggaaggtggggggtgcaggctgcaggcccacccttttctggcctggcccttgcagcctgtgagcttggaactgcattcacaatctctgaggtctgtcccagagagacctgtccccagcagaccccagcccctggcccctaccccaggagtcccatcatgggttccttctcccctctctaactgtgcagccagggtgaccagctcctcctcctcagccaagaggaccggttgtgcaaaaaggaagcttgtgttaggtactttttcttcttttcccccttggctcaggggctgaggggctggcccctgcctgacactggtcagcgggtggtcagctccatggtcttcttccgctcttcccgctgctcctcccattcctcgtcaggctcatacgtgcctttgatgatggccacacgctcactcaggctcagggagttggggaagagcaggtataattaaaggatgggacccaggacggccccacgatgggccctaccaaaaaaaccagtgagcggggctgaaccgttcatgacaccgcagggccaaaagagcgggctgggttatggagcaccaatgatttattctggttaaaaacagggggtgggaagaaaggaaatcctggccactcccaaaatctggactctccaaggtaaatgcattcaagggccagcaagtccaactcagctgaactctccccaagatccactgttggtacatggccttaataccctcctcttctcgtcatcggcaatttgttcaggcaatccg

SEQ ID NO: 131405 - DNA, 668 bp, Homo Sapiens
catctaccaattcaattcagtcatgtttctgctttattgggcagataaagagaagaaaccagcaagttatgtccaaaagctggaaaacgccgaaatgcttcccaactatctgaaaagatgttgtacttgaggaacactcggtgttccaagctggtcgacagggtgacgtctctgctcatgatgtagatgccgtcgttatggagcgcacaagtcaagttaagacccgatttggacgtgttctccttgaggtagagccactggcgggtgacggtgttgtaggactgcacggtgagcatgtcctcgctctggctgctcctgcggttgggccccagctcgtggagacacccccccacgatgtagatggtctcttccacagacaccatctgctgcttgcgaatgtggacgtcacatgtttcaaagagcgtccacatgtcggaagaggggcagtactgcaaaatgttcatgttccggtctgaaagaaagaaagacaagtgatgacaccgcctccactaacaccactaggcaagtctgtacagaaatgtctacctctgcctgcataatttggtaacaaagagaaaaaactctttcagaaaaagcacaagttagaaaaacagttttcaaagtggctgggaagagatatatttagatccatccgcactcacctccca

SEQ ID NO: 131406 - DNA, 660 bp, Homo Sapiens
caaatcaaatagatttatattttgtcaaattgaatgctatataaaatttataaccagataacacaaaatataaatcgaatcatgaatacactgatgataatatctaccacaacttacgaatatgatttccagttaaaaagagaaaaataattgctttgctggattttcagtgtgtgctaatcactatcaccattacaaaagatcaatttaattacagattatccaaagatgtatcacacatctaaatattaaactttacactgcaataaaatatttaaatctgcaagaagacactagaacatatggtcaataataccatgagctgccacaggtttttaatagataatgcaaatgacaatcaactatatgccaccacaagagaaaaactggtactggtgaatctcatacgtatcaaggaagaaaaaaatgcagaattcaatatgcaaaaaagattgtttataccaggtatatacatcataatcatggttgtctgatacattaagtgttctgtattagagtttgcaaaatatacataattctattgctaatgaggaattagccaaagcccaactattcaatcgcccataaagaaaattttttagaaaattgtgtatcttttaaaaaagttggaagtgaaactgttgaccacttcggagcttt

SEQ ID NO: 131407 - DNA, 1330 bp, Homo Sapiens
  misc_feature (803)..(803): n is a, c, g, or t
aactgtcattaaattttatcattaaataagtagcaaaaggtagatactatatagcaaccttctgtgcccatggatgcaaatgaatgaattgtctttaggcttgaatttcatctggctactcaactaggggaatcatctgctcaagaaagactgatacagagagccctgctgtctaagctgctcagggacactgggctgattcagtcagggccgtgctggtacctgctgctgctgctctctgctcagaggcatacagtgaacatccctttgttccttttagaccagtgattctgttctcatggtggctcacagggaggcatggactgctgcaggctctgccttgtatcacactctgcttttccaaagagacgccaggcctgggccattttgcgaagtttagtgaggttgggtttaatctgtttttcctgttccaagtggtctatgtcagctaacggcagcatagaaggtctcccgtgagcacactggaatggcagctggcatgaggacagagcttcaataaggcggcaactttcctgtaagctcaggccatcattaaacttaatggccccatggcaggcttgggatgccaacaccttctggacagtcagtggcaatgtcccttggatgcttccggtggtctggagtagctccagttgttctcggataaattcttccacaatactcttggtcacagtagatcttcctctccgaagttcattggcttctctttccacaaaacatagtggtgcttttcccacaaggaccagagaatcactagtgtctggaaatacaaattcaaggcncagatcttccagatttttgtggtaacaccataagagtctcctttgttcctctgtcactgttatctctagcggaggaattagagtagaagacagtaattttttccgaccagagccttgtgcctgttgcttctcgtaggaatctgcctcgccattctcttcagtcttagtgctcatcaaacaggcaataaacttgttatctacttgctggagaacctgcattgaatgaatcattcctttggtgaaacgatagggatacaagatgttgtgaattttaactgctaagctctcagcctggccactgcttacatcaacagcaacctctggataacgggcaaatactggattgtcccattctgagaacaaagactgaagcgattcgctactaacagtatcatccacagtatctctgttatcctgtctcatcacagtcctctctgctcgagctctcggaaggaaaggaagaacaaggtcgcttctaaaaggttgacacctgtactgagacccattctcaagtacaacatccaccc

SEQ ID NO: 131408 - DNA, 1929 bp, Homo Sapiens
tttttacgaacaaaatttattccaatttaaaacagagttcatttcaggagaaagatatgaaaagtcgacttccatcggtgtctggattaagggtcagggccggtggctgtgggaggtgacactgagccgctcctcagcccctcctcccatccccaacgcgcacaacacatgcatttcaaatggtaaaagggttaaaaacagcttgtatagaaaattcttttttaaatagattaaggttgaaattgtctgaaatcaggactgtgtaatatacaagtatcactgggtcccgtccgccaggccggccacaggatctgctgccaccactgggggacattggcacggggatgcctccctgggggagccgggggacccagggcatgggtttgcagtggccgggggctgctgccgcccgggcgtaacatggtcggagaaggtggtcggcactcacgagaaatcgttggcaggtgagattcaccaaggtaaaaacacacaccccacatgcccacgtggccccacacgtggcaagggtgggggttggctgtccttgcccctgggtgccactggcacgagaaccactgcctgggactctcctggggcaggcacccctgccctgggcctgcaacacctacctctgcttttttggggggcaggggatcaggcactcagacccagaggatccaggccacgacgttttggcggtcccagcccggctctgggatgcttggcacgccccctccctgggaaggcctaatacttagccccgcagcgccccggcctgcgtgctgggcgactccaccctcaggccacggccaggtcaccttgtgcaatctgggccctcagagatgccacaagcacaggccccccagagggctccgctgctggaaaaagttgtagcggccctgccaggggtggccccatctgctcccccagggcaccgccgggccccagcactcgccatggggggcttctggcaccaaccctcttaggtagacacctggcacaaaaaaaggacgcttccgggtgagacagaagtggtgtggggaagccgggggggcggtgtcccgccagccccgtctccccatggggctgatcaccagaaatgtagctgccctgacctggtctcccctgacccttccacggggctccccgctcttctgcccccagaagccagcagacagccctgcggacgaggaggccagggcaggcctgacagtggcgggcaggcaggcgggaactgctggttggagtggtcgtattttggggctgtttcttttgtcatctgtcgaggccagaagcagccgtgcagggtcccggtgtggcggcgggcgaaggcagcacaggcgatccatccctgggacagctgtgcgaagcccggaaccacagggcgctgtagtgttcagtcaacagcagacgaaaaagccacctccccaaacacagtcccctcgttccccaccttccgagtctctcggggagaaccagtctcggtgcctcagtgcctcaaggggccccgggaggcggcccccggggctgtggctcagtgcggcgtggcctggcgggctccccctcgggccgtggtcgtggccagccaggcctggaagctgcccaggccggtgcctgccaccaccttccacgcgcccctggccaaagtgcgagtgctggcttcccgctccccgggggcggcgctcgggggcgggcgcaagtgcttgggacaaggccacgcacagagctgccggccacgtccctctctctgcctctcgggtacacacctgagaatattctgtaaaagtccccacccaccctcgctgtttcccaattggtgacatcacaaagcggaacaaaacagaaacgcccccatccaagtggcctttctcccagtgtcaccggggaccctcgtgccgaattccaaccaggcctcgtactagctaagtt

SEQ ID NO: 131409 - DNA, 700 bp, Homo Sapiens
  misc_feature (661)..(661): n is a, c, g, or t
gcggattgagaagcctttattgtgggaggatcggggtgtctgagggccccgggagtcgggatggacttggaaggctggggggaggggcctttgaggaagaggagtcctggaagcgggggtcatcacaggtcaaggggtggtccttgggacccccgcagtcagtggtgctgcggcggcagagtgcacattgacagctgagagccacggcgtaggagaccacggggttcacgccgcgcgggcagccagggagccggatggactcgaagcgcacatcgcggtagttgcacaccacctgaggcagggccggcaggaccccctgcagcacgcgggtcatggtggggcagtagccggcacagatggtggtgttgacggtgatgcacacggggcagccctccttctccacagccagggtggcattgatggggcggcaccgtggccgaagcgtctccttggatgcccatgtcccgcccatgctcagcagcagcaacagcagcagcccctggaacatctccatccttggtgcgtcccctgcctggtgtacctggctttatacctcgggtttgtgggggcgtcaaggccaccaggaggttgtaggatgctggggtgagctggacactaacccttcggggggcaagaggtagacaaggccaggggggcgcangagtggctcagcggagcgcccagccctctcctctcactg

SEQ ID NO: 131410 - DNA, 2013 bp, Homo Sapiens
  misc_feature (23)..(23): n is a, c, g, or t
  misc_feature (28)..(28): n is a, c, g, or t
  misc_feature (40)..(40): n is a, c, g, or t
  misc_feature (46)..(46): n is a, c, g, or t
  misc_feature (78)..(78): n is a, c, g, or t
  misc_feature (1823)..(1953): n is a, c, g, or t
tcctcgtatcacactacgacgangcgtntccagccctgtntggcantttgtatgtcaggtgtccgttttagtaacaanctccacactgagtggcacctgccctattgcaaaggaatccagttcctccggaataacagtcccactgttaacctggtgctactgggaagttccacacagtaatctgagcagtgactcatggaaggatgaggaacgtttgctccagcttctctccctttccagcaagggcagagctcctaaagccaggggttagcacctggccagcttatgtggcagatggtctcagttacaacttcgctgctttcccaaactcctgcagccctcctgagtccgacttccgttgatagcaaggcactgggtggcagcaaccttttttctagtagttttttcccagcagttttccatttctccacagtatccttttcatttagaggagcttaataaatgctttttaaaaagtaacccacgtgacgtaaaattttacaagtttttgtggcaaaatgatgcccagatagtcacatttaagcaaatattcagcttgattcagtgattaacagcaaatgggtctacgtgctaacatggcagcacattcaacacataacacatcactcacattgacgtccactgtccctgcacctgctacttcaggggcactgaggctcctgttccaaggccttacaaacctatgtggtggcctgcagggcaaaaggaattatcattacaactggttagaggtaggaattcagaaagaaattgaggaggccaaacacacgtcgtttgaggctaaaggcttaagacgcttcttacccaagagtgacctcagagtttcacatcccagacaatcacactgtggttgagtgaaatcaagtgcagttttatttaagaactggaaagaataatcagtatctgtgaaagaaaatccaatttagaatatttaaataaacatttatgtaaaaagaagagtagaataattactccgttcagttcctctccttgcaatgggataggctgcctctgctgcagatggctgggtcttccaaacccatgacaagtgccacggcctctgcagcagtggcccagagagtaggcacttcccagcatgacagagaggccgaggccttctaaccttgccaaaccactacaaaagcaaactagggtgggcaagcccaactacctaaggcaggaagaaagtgcagtgaagggacagtggtgtgctgtgcgtatcgtgggggtactcctaagcagctagctgttggcgagatcttacaaagcctgatcggctaacgcagcttcctggtttaggaacattttccccggtcgtatcaatcccccaggttggtaaatgaacagaagggatgaataaagcctactttttaggctcaaggagcagctcgtgaaggggtggcaggtgcgctgctgccttgttttctgtcctgctaagaggctcaccccgcgacctcttctgtaaactgccactcagcagcggcctgcaagccctcacgaaaggcttcactctatgctgtttccaggtagctttgttctgacagtacctattttccacttcagaatctccactttaaaacctgcaatggaaaaataaatctcttgacagttttttaaatcgagaaaattggtgatgtggccttggcagcaaatacccagaaagcctttacctcattaacctgattctccacgggccctgccactgctaaatttataaagctaaaaataatctcaagatcatggaactaaaaagaagtcaatcacttaccaaatcctgtccttaaggagttcatcttggctgnnnnnnnnnnnnnnnnnnnnnnnnnnnnnnnnnnnnnnnnnnnnnnnnnnnnnnnnnnnnnnnnnnnnnnnnnnnnnnnnnnnnnnnnnnnnnnnnnnnnnnnnnnnnnnnnnnnnnnnnnnnnnnnnnnngaccgcgtatgcggccgcaagcttattccctttcagtgagggttaattttagcttggcac

SEQ ID NO: 131411 - DNA, 699 bp, Homo Sapiens
  misc_feature (669)..(669): n is a, c, g, or t
  misc_feature (685)..(685): n is a, c, g, or t
gttcctcagaactctcagtttattcctgaatggtgtattacattaacaagtatcacatatttaagcatactggtggtctactctcctcaaattcagttggaggcatataaacatgcagaaaagcccccagccctactttcctagcatgcagcacccacatagagcaggtatatttacaaggttaccatgcaagagtgtttggcttgtcttccatcaccctgcttttcctctatcatctccttccttctatcttttatccagtgaaaatgaaaacatctccactaagaggacttcctagtatagaaatggcaagtatgtactatctaccaatttgctactagcaccaccattacctatttacatgccctttgcatttgtggccaactgatctacagcattgtgccttagtgtattcaagacacttggaattggcagttgagatgattatttgccatccccaacctagagatgatcatttactgagtaccttctatatgggaggagagttaaagtcagagggccacagccggcagtgtgactatctcagaggagatgctgagatcagcaaagtcattctgagtcctaaatcgggttctgaggtccttctcccaggtgtttagaatgtctctcaggcctgggaacaaactctctgggacactaaaagaatanagcaggattgggggtntgactagcaccatg

SEQ ID NO: 131412 - DNA, 674 bp, Homo Sapiens
  misc_feature (204)..(221): n is a, c, g, or t
attttaaaaatcccaccaaaattacttaaatcatttgacagagtcatacaattttaaatgactataaaaatgtgcagatcagtgccaaattttttggcaaaggctgaatggcagacagtaatccaagacgcagacaaccttgcttttaagccatccgttacacagagaccagcaggctcccttctaccggagggccagcggccnnnnnnnnnnnnnnnnnnccggaatgctctcacttcctctccgcgcacctgccccgaggctggagcgccgcccggccgggcctccggcggatgttttccttgtccccaagcgtgtagtgcgcgccagccgccccctccgggacctgcgcgccagccaccgcgcccccaggacccagcgggcctggtcctcaccactcaccccctccccagcaggcacgcatgcgggctcgacccacacctctgcaccgccccccaacttctgggagaggactcctggctcagcccagcctctagctttccagaagcccctatatgcctacctacatcttcgttataggcgatgaaccttcacttctgtccccgtttccgcacacgcaccaatccccactggcgatcccttccccttcggcatcacccccaccttcatgcgacccagctccccactcacatccgccccctattgggctggct

SEQ ID NO: 131413 - DNA, 2017 bp, Homo Sapiens
  misc_feature (157)..(157): n is a, c, g, or t
aggaccctttttgagagttcgacaggagccttaacccttgaggggaagggacttcaaaagggggccccatttcttcccccagtttaagggcctttcttccaaccaatttttaaggtggctggtgccaggagagggatgggggaggacgttggatggnctatggggcatgtccacctaaagccaccggagaggtcttcatgtttgggaagtggctgggcaggatgccaaaccccaaatgacttattgagcaatttctaaaccaaacagagaggtaggaaaagaggatgggggtcaggggtggaggctgtggaaaggggagagcgagggctgaagagaatggcagccatacaggtgttttgtttttatttccacatctgaggactgagagtctgatttgctgcctgtccatttccgccactcattgactgtccatagttcatcatgccattggctccatagaagttcatcccagccatctgctgggtcatctgagtaaggttccattgcagctgctgagctggctggaccccatacacagtctggggcatagctgccatgcctgccatgtagccagcctgctgggtggtcatcattccattcggcacacccatcattgatgcctgcatgccacccatatagcctgcaggcatggccatgggggcaaccatcccagaagctcctggctgagcaaccatgcctactggtggaggcatcatgctccccattatgctgttaggaggtgtaaccccggggaagctggggtaggctgtgggatatgccatctgagcgggagccatgaacattgcttgagtaggcatttgaggcgtctgggatccatacagtgaaagaatggagtctttagagagctgtttcttgcctatttcttctgatttgctccctggctccggaaacaggttcagattttcaggaacagagccggcactccctgcagttggcatggaacctacaacctttctggaacccgaagaagaaggggatggaacagaggccaacagatctaaatccttctctagggtattgctggtcttactatttgcaatggagcaggccacaggagcatcaaggcccaacaaatccatgacaggcgctgtggatttcggggagcttttccgaggtagctgtgggtcttcttttttctgtggcattttcaccttctcaaaaacaacaggttccaattttttttctggaactggttcgctccctcttttccacttgtcatctttttctttcctaaaggcattgatgtccagacttcggtccatgtatttcttcttctcatatttgtctcgaataaatccttcaacagctgggtctatctgaggtcgccgaaaggtctcaggaagataggcttcataaagtcggtttgcctttccatttcccatctcttgcatgcactgaatctgttcttgagtccactggtcgaggttaactgactttaccctggatatgtgcacccccagattcctgtggattccagcacatcgaatgcagatgaacacaccaatgttccaagaggcccatcgcggccctttagactggcaatctgcacaaaacttgttatcctcctccagcagcaggttggccaggacagcctggtaccgatccacgtccttcaccgacttgcctgtcatggccagggtgccggcgggggcagagggcgacgcgccctcctcgcccccagagacccctgcctcagtccggggttgaggactcccggtcccccgcccaggggcacctcctgagcggggagagccctctcctccggccccgccggacgccccttcccgggtcgggggcgtccgtcccccactccgcagcccctcggcgcggcgccccttggcgggcttagggacaggcccgcctccaagagaggctgcggggccagagaccctcagcccaggcaaaggcggaccacgagcctcactgggtgccggacgcagatgaccctctggccggcctgtctgcatggccattgcgtcccgcgcctcggtttccc

SEQ ID NO: 131414 - DNA, 1158 bp, Homo Sapiens
  misc_feature (973)..(973): n is a, c, g, or t
  misc_feature (989)..(991): n is a, c, g, or t
  misc_feature (993)..(993): n is a, c, g, or t
  misc_feature (1097)..(1097): n is a, c, g, or t
gagaggcatcagctacttaattgcacaggaaaaatctgcagcagctttaaatgtgagctggatttggagggaagaaagagaagtcacccacaggccatggtggaggagacgttcatcagaaaccaggaggccaggtcagaaaccacaatcccagagcaagagttaataaagcagaaatgtatttattaggcacccttgttcctcacagaggagcaagatccaggcctgagcgcctgggaagtctcttgaggttgcaggaatctccagagaaacataggcgctgcccagccaccaccccgagaacactatttggctggagtgtgaccgccgaggtgatcctggcaggaggctggggttggctcctcgactccacaaacactgaggagtgggtggggacacccatgacacccacccaaacactggcagagagggaggcccttccacatctggggcacatgttgctgggcctgccagggggaggaggagcctggagagtcccttgcccggggccaggtcctcagggccctccccaaatccgaccgcctctcctcgccaccgctgactcagtcccacacgtaggggtttctaaagacctgagagttcttgccgtctttcggcggtgtggccgcctggtggctctgggccgagtacatgtcttcagcccgcagggtcgagttggcactgcccatcacctggctgttggcggtggcccgtgggaggatgatgtcgtaagctccttcggacggaactttgtgcatcagggccatctcagtgggctggtacacactggtcagcagctgcccattgtacccgctgtatggtgacaccggcctcttagctgcaaccggctcatccatggaaaaggcttgttctccacgaacatgctctgaccttctgctcttcaagatggctcatagccagcccgggtggggtactgtcccctggtactttgctctggctgacttggcactgngaactcggggatagtnnnanaggacgaggccaagatggggggaggcgaggcacgtggggcatccagtggacgtgtgcgctgtgccgtataaaactcggcgattctggctcgaggcaatcctaanggtcggtaatcgaacagtcaacgttccggggaatgtaccgccaatcaaaaaaagacggaga

SEQ ID NO: 131415 - DNA, 511 bp, Homo Sapiens
ttctgaccccccaatcctttattagagatgagtgaaataacaagtctgagatgaatgaaaccagacactgggggctcaaaagacaaccctgttcctgtgggaaccacagaccagtcaggtctccaggggaaacagcacagcctccccagccaggcagctgtgttggccattggtgctctctagtctcccctgcttggctggggaatataggagaatgcctagggaaggctgtgctgtccctcaaaaggagtgacattcagaatatttttatttaacagccagtacagcatgcatgttgaccagccagaatggatgtgatctgtagacaactgtaatggtcatataggtataaaccagctgagtccagagccatgccctggaatctgaccctgcctattcccaagcccaacccttaagaccagctttccaccaaaggaccacccctgcagggcccttgtcttactcgtgtggtatctgaagtgcctaacacaggtccagacatagagttgga

SEQ ID NO: 131416 - DNA, 683 bp, Homo Sapiens
tttgaccccccaatcctttattagagatgagtgaaataacaagtctgagatgaatgaaaccagacactgggggctcaaaagacaaccctgttcctgtgggaaccacagaccagtcaggtctccaggggaaacagcacagcctccccagccaggcagctgtgttggccattggtgctctctagtctcccctgcttggcttggcccattcctgccagggcccagcacccagcaactggcaagttgagatgttagtggttgatgatggcttaggtgtatctgctttctcattggggctgagcaatgatagaatttctagggctgggaagcagaacccttaagtctctgccctcccaattctattactctcccttctttctttgcctctccattccctcagactaaaaggctcctgagttgaccaagagaaagagaagagaagtgggcatccatcaaccccgactattcctttccttcctgctaaatcaaggacacaggcaaatgtgggtgcatctgactctacaatttggctggggaatataggagaatgcctagggaaggctgtgctgtccctcaaaaggagtgacattcagaatatttttatttaacagccagtacagcatgcatgttgaccagccagaatggatgtgatctgtagacaactgtaatggtcatctaggtataaa

SEQ ID NO: 131417 - DNA, 1210 bp, Homo Sapiens
  misc_feature (1133)..(1167): n is a, c, g, or t
ttttttaggataacattatttatttatttccttttatcaaagaaggtaattgatacacaacaggtgacttggttttaggcccaaaggtagcagcagcaacattaataatggaaataattgaatagttagttatgtatgttaatgccagtcaccagcaggctatttcaaggtcagaagtaatgactccatacatattatttatttctataactacatttaaatcattaccaggaactgtttgttttgtagtgaaccttgagtatgtgctgttaatataccaaattgggtgaaaaaataagggattcctttcaaaagttaagagaagaagtgtgtaagaaattattttgcttattaaatgttcggtaaatggcattctcgtcagtaaaatggagaaataagctaaaaataattggctaagtcctattaagttagaggattaagtgtattatattttcattcaaaattgggtgctcattaatttatgatcggtagtatagctaaattgctatgtttgtatcaaaattgagcataaagttgctgatactttctccgtatgaacagaagttgaaacctatttagttcagtagggcagctcagggattttttacacaacatgtatatcttcccattttaagttagaattattttacaacatctggtatacataaacagctggcactgatagctaaattaaagtagtaatgatcaattagttttgttggtatctgaataatagcgttgtttcatagctctgtatttcctaaggaagtacaaagcttctagctctttcattacaaattcgccctgtgcaataagttctttgatcttctctggattcttcacatctttgtttttaaggaaaatgttcttcaaacgctttttaaaatagtctgctccttttggatagtctcgtccaagatacagcagatttttataaagttttagtacttctcctcttaaagaattggccattttcatttatcatgtaaattatccacttttatgcataacatactttccggcacgccggagccgcaaaagcctcgaccgctacgactcctctgtccgtctactgcgaagcccccggccgtaatggccgaattcccgggcatatgtccggtaccgtcgactgnnnnnnnnnnnnnnnnnnnnnnnnnnnnnnnnnnncggccgcttcctcgctcacagactctgctgcgctcggtcgttt

SEQ ID NO: 131418 - DNA, 961 bp, Homo Sapiens
  misc_feature (110)..(110): n is a, c, g, or t
  misc_feature (157)..(157): n is a, c, g, or t
  misc_feature (166)..(166): n is a, c, g, or t
  misc_feature (218)..(218): n is a, c, g, or t
  misc_feature (363)..(363): n is a, c, g, or t
atctttgggttagatgtccttcctaggaagttttttagtagctatggggagagtttcttgctcagtcagccagcagtcaggctgccacgtcatgaaccactagcctcatntgttgccaggatgatgagtgcttggcacccagtcagaggcccagctntgcgagatntatggacacccaacccatcaccaggcaccaagcttccttagcaaccagaatnggaaagcaatgtgcaggcagggcatgctcttcattgggagaaccctcagaccatgaaggcttgttgctagggaacaagcatccttagcaagcaagagctaactgcatgcaggcctttatcatgtggggagggctggggtccgctntgcagagtggagacttgaagcgagttgcttgagggtggggggtctatctcatgcctttactgttgctaggggcccactctccttagcaaccagggccctagaaaggcagacccttgggtacctatcccagcagagacctggtgtggtttaggccccgctgctggggctcccttcctctctcgctgggacctgggtccctctggacctcagtgctctccccctcttctcctgcaggatgagaaatactggagccggcggtacaagaacaacgattgcagccaagcggtcccgtgacgcccggcggctcaaggagaaccagatatcggtgcgggcggccttcctggagaaggagaacgccctgctgcggcaggaagttgtggccgtgcgccaggagctgtcccactaccgcgccgtgctgtcccgataccaggcccagcacggggccctgtgaggctgccccacatccccacctggcggagctctcctccgccttgctgagacttacgccctgttcccttcctgccctgtggcccacgggccggccagctgggtgccccagggacgtgataatgcagataaatacatttatatttttaag

SEQ ID NO: 131419 - DNA, 1641 bp, Homo Sapiens
  misc_feature (825)..(874): n is a, c, g, or t
ttttttttggggttctcaagatttattcaggatcgtgttaacggaggcggtgggaggatagggtccctgacgtgccggggacacacacagagaaccctccccgcccccgcaagggaggggggaggctcgctttttcttaaaaatataaatgtatttatctgcattatcacgtccctggggcacccagctggccggcccgtgggccacagggcaggaagggaacagggcgtaagtctcagcaaggcggaggagagctccgccaggtggggatgtggggcagcctcacagggccccgtgctgggcctggtatcgggacagcacggcgcggtagtgggacagctcctggcgcacggccacaacttcctgccgcagcagggcgttctccttctccaggaaggccgcccgcaccgatatctggttctccttgagccgccgggcgtcacgggaccgcttggctgcctcgttgttcttgtaccgccggctccagtatttctcatccttctgctcctccggcacctggatttttcttgccttcttcatgattggctggggcttaagttcctcttctgagaagcgatgtcttcgagggtcaaaggtctcgtggccaggaatgcttgatagggcaagatcagctgggtcgggttcaaaggtcatcaacacctccacggtgtctgggtccacagggctgggtgtgtcccgagaggtcaggcctgcgcggtggccgctggcggtcccgagggcagcccgggcgggggcgtgcccaggagaggagcggggggaagccgagccgcacgaacccggccctggggagggtgcgggcgtccnnnnnnnnnnnnnnnnnnnnnnnnnnnnnnnnnnnnnnnnnnnnnnnnnngggagcccgtgctccagcaggaaggcgtccaggtctacgtactccacatcgccgaacggcagcgtgcgctcccacagcagtggcgccaacagacccggggcgggcaccggccccgggcgcccccgcggggaccctccgcccaccactgccccagccggggcatccgccgggcccgcagtctccaggcctggcccaggggttgtggctgcaggcagggccgccttgcgctccttttccttcaggagacagctggccggctctttgggcttgctggtcccctgcagaaggctccgcaacccaagcagcgctcccccgccagggggtgtcccggccgggccgcccagcagcagaggggccggggtcctgtcgctcacaggccgcgccatcgcctggcacctgcccccaggctcacgggttcatggagaggcgaagggctggcctgccagtcaccagcacactccagtggtttggacgagtgtctgcccaggggcgggcgagtgtagcctgcaaccctccagtatccagaacgctgcaaatcctaggagcgacggggatttgaggtcctcggtgcagaaacgtgcaactcaagagggtcccgggagatcatgcaatctgggcgagggggtgtccagatcaagcggtcggctctttgcaaccgagggtgagaggggactcaaggcgctccttctacaaggtgggcgagcctggctcttgcaaaatctgcagctctcgcaacggaaggcgcttgatcccgggaattccggacc

SEQ ID NO: 131420 - DNA, 1433 bp, Homo Sapiens
  misc_feature (1089)..(1089): n is a, c, g, or t
  misc_feature (1103)..(1104): n is a, c, g, or t
  misc_feature (1106)..(1106): n is a, c, g, or t
  misc_feature (1113)..(1115): n is a, c, g, or t
  misc_feature (1187)..(1188): n is a, c, g, or t
  misc_feature (1193)..(1193): n is a, c, g, or t
  misc_feature (1227)..(1227): n is a, c, g, or t
  misc_feature (1237)..(1237): n is a, c, g, or t
  misc_feature (1251)..(1251): n is a, c, g, or t
  misc_feature (1273)..(1273): n is a, c, g, or t
  misc_feature (1327)..(1327): n is a, c, g, or t
  misc_feature (1337)..(1337): n is a, c, g, or t
ataaaatacaattgaatgtaaaagatgcaaagactggaaagaatgaagggaaacaatccagtgagggagactgaaatgcagggacccagggacattggccagctctcacagcatgggctcccaagaaaaaagtcacatccagattctagaacattcactcacaggggactgttgtgtcatggcaagcaccctgctctggaatccaagtgagggtcagcactgtcggcaccccagacccatctgcctctatgtgctctgggtggctgtgagcacaggatgaggccagccaagtctcctgtaacccccataagccacctgcagaggctgtctgaattctttcaaagaagaaatgaccacaatttaggtttgaaatatctttttgcaatagataatcttatttacattaatacagaatcattttacattcctaaatcagacactaatagatgctttattttagtgaattataaaggaaaacaaaaaggaaactgttgagaagtgttcttcattaacctgtctaacgacagcccgaagatcctgaaacacatggaaactgcgacatgctaccagcagaggctggggaatgggggttctgctctcactgaatggtggggaaccttcaactgcttagcctgtgctttccttttctgaatcaacatttacaaaggaaaaaacaatgattagcactgaataatttaaacacacttcagaaaatagatgtcaacagtgtaagtgggagaaccaagcccctgactagcaacagtggcagggcttcagttcccaaggcagctgaagtctggccagcacagtgctgcaatgggctgtggctcagcagaagggcaggagccctccatgcctggcttacaacaacaggactcaatagtcagggacaggcggccatcccggatggggtgggagcaaggactgtacatcctgacaaggatcaccacccacacggtcagagcagaacccccagggactctctgggcctctacgtgcctcccaggcaccgactgtgcagctgcttggtaccccgggaataaaactaactgagcagagcagctgatgcctcggcagggccctcattangggaagacgcggtnngngggcctnnngggggccccaacgccccattgaagacacctgtcaggaagactcatttctggactcccggagtttgctgaaanngaatnatcacttcgtacttgatgcagctaaggctcattnctagctgtancatggctttactanatatcacatatcattccaatanagtttagcctgcagatctacactcctctgctgagcagggcgtactacatggcangaatgcacancctgggtgatctatgcggctgcacgtactcctggaaagggttgcagattgcgtgcagctcaagcgcggggatcatggagtcgaccctcccaggcgc

SEQ ID NO: 131421 - DNA, 682 bp, Homo Sapiens
ttttggggttgaagagtttatttattgctctgcccccttggcacagcaagcccaggctctaccagcaacgatagtcgggataggtctcagacacaaactcaggatggataacatagttgtttctctggggaccaccagacttcttgaagtgacttgtgtcccatctaaggttcggatatgggtagtatgacggcgggggagttgtaacagcacactgcattccgggccggtgctcgtagggaggtacacatagtcggttgctcccggcaccaaggccgcaggcggcggtcggtgcagggcgccccgctggcgtagtagtccatcccgcgcagacagtagtggcggcccgagcaagcactttcgtaaccatggaagggcaggcggccgggcagcgggtccacgcacccgcatcggggcgtgatccgcggcagctgctggttccgcgacagtgagttcagcatgttcaccatcacttcgcgctcgtaggcattgagccgctccggcctaggagggcattccaagggcattcctcgaactgctgtctccatcctggcctcctggaagcggcacacatgctacctcaagctctgacctggcagagctgctcccttttaggggtcctcccagaacacccagacctatcgccacgccgcaacttctcccgcccttcagcagcggccgc

SEQ ID NO: 131422 - DNA, 908 bp, Homo Sapiens
taaaaaagggaaattcgggttttctttaattaagattattgggcctttggccattaaaggagccagccctggctggcggaaggattcttagatttccacggtggtttaaaggaggcccccggggattttagttccttactgggggggtaaggttttttcccatccttcccggaaaaacccattccaccccgggttcccccacttccccttcaaaatttctcagctctgccgctggtctccatgaacggcaagggggaaccaccactcatttcactgtcagtgtaggtaagacagaggatgcccttgcaaaaattgggactgaggacagtagcacacggaatggtggatcgtacatttgcacccagagctactaaacgctcagtgaccccagagaccattaatttcccagagtgaaggggatgggggtagagctaattggaatttttattatccaggactcatcctaagaagaatgttggcctctcttcatccctggcttagccgtcaggtagaacgcttactcacctgacaccgacttcttagagaagcgagtcttttttgaatggaggagcgatggtaaccccactagggggcgcccatgatcggctcccagtgcacccccttaagggtaagcaggccgcatatctagagtctgatagtctgtgtgtacataaggtctagaagtctgtggaaacgccctgaaacttgtagtattatcttaactaccctcttatgttaaggtttacataataggatttttaaacaaatgtgtttaattttttaagatctcttgtattaaaattttcttttggaataagctgtggaaattttgttacaacctggttgagatcaacctctttacaatgacacaaattgtgacattttataaattagatactacggtgaaa

SEQ ID NO: 131423 - DNA, 822 bp, Homo Sapiens
  misc_feature (748)..(778): n is a, c, g, or t
gggggtccggaaggggctgggaggatctgacggggagccagcctcagggagccccaaaggaggtaccccccaatctcaggtaaggcacctgtgggagggttgggtcccagaaggctaaggcctgctcacccgccaacctctcccccctcccccaggcgcctctagacctcagcctcagcctcagcctcagccccgatgtcagcactgaggcctcaccccccagagcttcccaggacattccttgcttggacagcagtgcccctgagagtggcacacctatgggtgccctgggcgactggcctgcccctattgaggagcgtgagagcccggcagcccagcccctgctggaacaccagtactgagctacctggcgcccactggaccacctcctaggattcagtaacggacctgctctgctgcctctctgctggaccacagaactgagtggctttggcctacatgtctgaaccctgacctttggctgccttggccagagtaccaaaactgagtgacccagacctctgaccttgacccctgatctctttcatccccagtccagggcctgggctccccagatggaggcagtcagcctcccagccaggccctaagagccaaaccatgggctggtcccacttggagcctgtggccaggaccacctcagcccctgggcctgcactgcctgcaggtgtggcccccttggcctggacctggggcctgaattgtgggaagggtggtttctttctttccnnnnnnnnnnnnnnnnnnnnnnnnnnnnnnngtgcttcggagacatcagaattaataacactatttttgattttg

SEQ ID NO: 131424 - DNA, 2164 bp, Homo Sapiens
  misc_feature (36)..(36): n is a, c, g, or t
  misc_feature (1130)..(1138): n is a, c, g, or t
  misc_feature (1874)..(1874): n is a, c, g, or t
  misc_feature (1940)..(1940): n is a, c, g, or t
  misc_feature (2072)..(2072): n is a, c, g, or t
  misc_feature (2140)..(2141): n is a, c, g, or t
tccgggaagtgaactccaggggaactgcaactcctnggggagaaaacacttttggggaataaatttaatggaaataacaaaccacccactcaaaattacactaagcttccagaaattgttggatttgtttaattttgctgtgtacctatacattgtttagaaagtttcttttggcttaaactgaccatttccccccttctttttgagttttccatgattaaacttgcccaaataaaaacataacaatccatatgcaaagcatatctgccaccacctcccactgcttcctgggccgcaaacagaaaaataaacagtgattaaaaaaaatgccaaagtgaaggtttctctttcttctatcacaacatagttgggtagttcccttaaagtacatcattgctataagttggtatcactgcaaatctcaagtcccaaataatctctttttctggatagaaagttattcaaaagggagcacaaaagagcaagctttggggcatactgacaaacacttcattggttagaagagaataattttaaaaatcaaataaaattgaggctggcataggaagtacagattaaatacaggttaaatagctaccagaaacacagaagaggtggttaataaaaactgagattgcttcagaggacacaggagggttgatgagacagtctattttccttccaccatcttccatgagagtcaggaaaagggttctgtgagcacccaacctggagcggtcacctgtctcttccatacacaggaggatgctaagacccagttagctttaaatggtttttagaaagacttacctagtcaaaagtggttaatttgaacttttcaaacttgcaaaagcatatacatttgatatcatcatctgagaagcaattcttagaaaaaaatgtttgcttcaatgtctaaagaaatccagtgaaagttttagaaacattgccagctagacgtctccgagttagagttgattgatatactggattgggatggagaggatgagaactgaaaaagaactgctccagcctctgcctcagaagaggaaactcagcttggagatgacagaattgggtagcggagtagatgctagagcccatgacagatagaaaactacccccatttnnnnnnnnncaacaactcattaactctatctctttgaggttttggagaacaggaagtttatgtgaagttattgaacacgtcatattaagaacatttcataactaaccccaaaccaaaatgtagatgcatagctagctgtgcaagtttcccaatgctcttcctatctcctaataagtcacacagaaagactatgtgatagcctggattttcttgaagaaattttaaaagaactgattttcctatcatcattgaggccccttttacttcatgccatcagtatgcacttaagagtcccaaggaagtcaaatgttcccaaatgtagccctttacatcggcaccagggaagcctgccatatatacaatccccttcctagggtgaacaagctccaccagtttgagtgtgttaataactggaattttcatgtatagtacagggtagggtaaaagcagaccaatagccatcttgtgtgctgtgaccaggatggacattttgaggacaagcatgctgagcccagtttaactaaatgtgcaggcattctagcccacacattcaatctggcagttagcaggaaccaggttgccccacaacccatccctccagctggagccttttgctgggaaatggagtagggggcccactctgcattatggtttccaatgacccctccccagagcagagcactactctgcttgcagataggaggctactggtgctttctggcaatcatttctgcaggtgcagttnaatgaatcatatggtattgatatggaaagagcttttttctctcaagttggtgcagactgagtttanagaacaaggaagagggttcattaggggagtgattagggtcagtcttatactgcatctaggcagccctactctatcctaaataggaagggggtgccatttcatcaagtccattcagaagacagtctcttagtnacagggaagatttacaacactatagccagttccaaactgattccccggcgatctggccaggcatccannggcgaaatcgacagcaacgtcgg

SEQ ID NO: 131425 - DNA, 1564 bp, Homo Sapiens
  misc_feature (124)..(142): n is a, c, g, or t
  misc_feature (1035)..(1037): n is a, c, g, or t
tttatacaaaacagaaaaaaacaaaacactttattttccacaaggaagagcaataggaaaaattaaatcatttcccacatattgttttcttaaaacagagcctacaaggacatattcagcaccnnnnnnnnnnnnnnnnnnngagaaattacaaacagccatagaatataatctataaagcaaacatttaatattgcactttgttttgctaacattttggattttacttttcctaattgaaaaatcaggaatctatcttgaatactggaatacaactgtgaacctcacatcttatgtcaggaattgaccaatatttttaaaaaagtaatgcctctaaagaaatacattttaaaggggaaaataaaactttatttgataaagttttatacatttaaagttttatcacattttgtgatccagtgccaattatcagaatattggtcattcttgcttcatgtgttatttgtaagagtatataatgacaagtattccaatgctatgcatatcaacaattgttccctagtcagttagacgtaagagagaaaagggattttctgacaatccccctcaaacaaaaataaaaccaccaaatgccctttatgccaaatattccattagctttttttgagggggacattcacaaaatgattcaacaataaaaaaatatttcacccccatttccttattatctagtattagtttgctacgggagcccaaactctttaaccgaatcacttaaaacgcgattcatttttacactgggctttcttcaccctgtcagcatttgtcaaacatgaattgtcttccatgttttcttaaaggccacttatggaaaagcctatttgttttgtatgagctttaagacagtatttaaccaggtcaagcaccaagccagagctactattattttcagccactttattaactgtggggttaaatggcaggatagatgtaacacccattttacacgtatgttgcaacatcagagatgctggttttctttaaaaacatcagagctgaattccttctaaaatnnnacacgacatcacgacacagaataagtacacttggtaccttggaaaatgctgaaatgctatcatgaatgctggtatatttgttatgagccaacagaaaattacctttaatataaactataacttactgatgtgattgttcttcctatgtaatctatacataatcaaagtgagtgatttctcatgtttagcaaattgttctttaggtaatgaaaaacagtattctcattagaaaaacacaaaaatccaaaagatttatcgcagcaaacgttctagtattttaaattttgaagttacttttggaataaagtcgagttttcatgccataccaagcttgagcaagacagcaaaggtacaaattgagctctctattcataacctcaatgtatgtattcctgctcattaatatactttgcaccagcaaaagcgatttccaacatatgtgttttggaggtaattaagtaactctgtataaaaataaatgcacttttccctcctttccccagtgaatggaaaacttccatactttc

SEQ ID NO: 131426 - DNA, 2113 bp, Homo Sapiens
agccttggggcccccttggaggggaaatatttttaggagccggccccccccttttggtcgacggggggtattgcgctatttttcgggaattaagtttatttaaccatttcctcaggatgtttttaaaaggcccttccctggccctccttcttttcccaaacccagggccctctgtcctacttcaaaagcccaagagctcacttaataaagcaagccccagtccccacctgggaagggcctggtcacatgggagggcaggtgagggtccctgagggacagcttgttgccctcactgttcctgagatgccccagcccaagaacgaaacaaaacttctcatcatttctcctcaggcctcagccgagctggcccctcttgtgctttctcaccctgttaggactgcggatcaggctgaagggctccccagggtgagcctttcctggtccgactcactggcatcaccatgaggaggcctggcggcagctctgccctgtgcacaccgtggtaacctggcaacaggaacatttgccaccctgcaagtctgaggagcagatgagccactggagggggcgaagtcccagagccacctctggcttcacccagactcattaaatgaaagacactgtctctgctagggccaagtccctgtcatgtctggctcctgttcccctccctggtccctctgccctgtggcaaggagcccaggtgcaggctcataggttgttccgctgaagtgcctcacacaggttctggttggtgtcgggctcctccgtcagcacctccacagcctcccactccgccggatcggctcgacctcttgatggcatccaccacgctctgcatgtacagcccatcctcgaaggaggcggccatggagacaggggtgcggtcccaggtgcggcggtcgccctgcccctggaaggactggcgcaaggcctgcaccatgtagaccatgcccttcaggtacagcagcgggacatcctggggcccctgctcaggcagtcctgcgcccactgccagcgagtccctcaagagcagctcctcttgcgtggcagagttcttctgcccatagaggtcggctccccgggcgacgaggcgtcctgcagagcctaccaccatgacttcatgcacaaaggcgcctggcatgttgaagttgagtgtcactgtgctacacacacccccacccatgagcatctggaagaaacagaagtcatcgctagtgacgtgccggatgccacggatggcagcgttctgcctcacgaatgtcttgagcagcccgtgcaccttctcggctctccggccggtcaggtgggtcagcaggtccacaatgtaggtccccatggtgtgcaagcccccgccgcccatgagctcatcacagatccagccatagctggggctcagcaggctgcctgagtagatgcgggcatcacagatcatcaccgctcccacatagtgttccgaaatcagctgtttcatgcgcacgaaggcaggcaggaagcgcagcacgttccctaccaggctcatgagctgcgggtagtagcgcgaggctgtcaccatccggaaggcatccaccgatgttgctgccttctcgcaaaccacattcttcccaatacctagagccttcacggatatctgccgggtgagtggaggggggatgctgatgcacaccagatccacatcttgatgcagcaagatgtcatcagtccggctggtgtagaaggcgatgttcatctcctcagcaagctgcttcgcctcctcctcagtcttcccccacagggcctcaacagtgaacccttctgccctcagcagtgggaccagaactcgggcggagctgccagtcccaaacacgcccactcctggcagcatcttcatcccagcctctctctttaccaactcatctcctcacaagagcctctggcatggatatgatcttccaaacgtcctggtcagacatggctcctggcacgctggcatcgcccactccgcgctgcactggaaaccatgggtccgacggggtctcgggggccacccatccgccttaaggaaggctggcggggatgcgcgggcccgggagtccaggcgccgccaccgggaacgcgccgcctggtttctccc

SEQ ID NO: 131427 - DNA, 1471 bp, Homo Sapiens
  misc_feature (1397)..(1431): n is a, c, g, or t
ccgagagtaaataattcttgctttattatgaaccaagtcacattttgtctcttccaacagatgcttgagccaaaaaagcaaacataggcagaaatacaattgagaatatcttcatgtttcaacctttaatctgacttgccttttactatcctttccccatttcttctaatctcttttgccttacaatatattaccttctaggtatcacctcatcctatagaatcccttctagtttaatgtcctgccccaaacaatactaacccattgaagataactatgaaacctttaaatggacagtggttccttttaaaagcagccttactgaaaattttatatacacttaaatcaagtaacagttaccgtgagttttctaaacttttgtgttaacagaaatgccagttcagcagtgtgactgttacttttaaatgtctgtcttgccgccctagagtgacagacatcccagttaaacatattaggaataagaaatacataaatccaatgaagactgtagaaaaagaattttagcacttgaaggaacttcagtcatttaacccaacccattcatgttatagattgagaccatagaaataaaagtagcctataggatacaaaagttagcggcagatctgagataaaaatccagctctttggatccccgcgtttttcaccacacttagctgtcgttcccatgtattccgaccaaagaactcaaatataatcaagtgcagcctcacttcacaggcaagaaaacagactagagtttaatatattgcccatgtttatcttaaggtgaaacatttactcttacaaccacagttgatgttaacctagttaataaaatatgaaaggtaattactaggggaattttaaacggcactacatgagaagcaaacatgacgtcaaattactttttccatttctgcttcccaaattattggagttactgaagcaagctatgctgctttcaattccaatgataggcatattcccaaataaactcatttaaagagctcataaaatgaattatcctatttcccagtcagttgattagcgaattaagatacagctccaagttaccctactgcttaagggttttccggtccaatttgtaaggttttcggatttaaagattcagactgcataccaaaggtggacaaagacacgcaagctgatttaggttgtcacgtggcacatactctagtttaaaccctcaactacaagaaaagaaatggtgtattgtcatttttgccaagcaccccaaaatgaaatactttcttactcaatctaggttcttttttttcattctagtcccttaagctcctaggatttttagatgttgaaaataccccggccgtaatggccgaattcccgggcatatgtccggtaccgtcgactgnnnnnnnnnnnnnnnnnnnnnnnnnnnnnnnnnnncggccgcttcctcgctaatatcgctcgctgcgctcgttcg

SEQ ID NO: 131428 - DNA, 546 bp, Homo Sapiens
tttttggtttgtccactctttattaaagccaggccctcctgctgacagctgcaggacagctgctggggcccaggagggacggagacagcagatcctggccatacagggctagagctgagattcccagagccccccaagcccaccttgcccttggccctttctgaggctcctgtcccgcagggagaggagaaacccagggccgaggtcattacccagcaccccaatgcctccctgggacccctgctctcctcaccaccccgccccgcaacctcaccaacctcacccagccaggctaactgaccgccaccacccaggccctcttcccacccaccaactaccgtgcctcctacccgcccccagccctggcagcctggctgctgcgctcagcccccaaggccatgtctacactaacgtggagggaactaggtctattatggaatgcagctgcaccaaaaatccgtttcctggccccattcacagtgggcccaaaagcgtgaggggaatggggcttcacatgaactacaccccagctggccgcccagtggg

SEQ ID NO: 131429 - DNA, 1086 bp, Homo Sapiens
  misc_feature (728)..(728): n is a, c, g, or t
  misc_feature (737)..(737): n is a, c, g, or t
  misc_feature (978)..(978): n is a, c, g, or t
  misc_feature (1015)..(1015): n is a, c, g, or t
  misc_feature (1045)..(1045): n is a, c, g, or t
cacaagggtgttttgttgcgtcggcctttgtatttgccgttgcgtccgtttcctgtgttgtgtcggcctgaaagaaaaaggtgtttatttaggccatcaactaggatcataataaataacgtaatatactaatgtaataacagatcttctcatgcatttatcgtgtttataaatatagaagaaagctggcttacagggctgttgggacaaatttggaaaagtgtatttggcaattacacagtaaaagttaacagtgttgactatcagattctcttttctgtcagtttttagaatacatcccctatacatctgtgaataaatggtaatggtctcttagagtttctactttttgtgaacatgccagagttaagtaaattgtcaaaggatccaggttgacaatgtgttatttgtcaatatttctaatgaaaaacagatcttagaaaaatgaactcttctgcatttcattgtagaggctgatatattacaagccggaatcattcaaacaataaaaaaagtgcctcaatgaaataaaacccaaaagtagtttatcaatagtaactgtgatacttaatatacaaatgctgtagtattgcgtttgtaatttggtaagtaaatgaccaagtatctgaatgcaaaagtgatgaactttgatgaaagcttaattttgctagtaaatttcacacgaaggggtaaaataggataatctttaacataaagctttaggacanataatttanacatatcataaacactgaaaatgtgtttttaattgttatttacagttaatcagtgataccagtgtttagcttaatccagccaattgccagtcgtgactccttctttcaacatctgttatgagatctcccttataatactagacaattatttattgaggagagcatctgtggtcagagtactcatgtatggcacttggttgcaacagcgttaataggatgcactgtcgtagatggatctcanaccatccactgcatccctctagtaatgactttcatanattgacgctcatccatggtaggaacataanatctggcatgagcatcagattgacaagcatcctcacaattc

SEQ ID NO: 131430 - DNA, 1956 bp, Homo Sapiens
  misc_feature (842)..(842): n is a, c, g, or t
cgaaaaccgcggggaataggcttgaaatatatcccaaaatgccctcttgagttatttgcccgttttggaaaagttggggtaaaggtaaaaaggcccccaaggtattgtgaaatcccaaaaatttgatggaaccctttgaaggaaaagcataaatttttgggaggaaaaatttccccggggaggggggtaaaaaataggaaaatcctttaagcataaaagcttttaggacaaattaaatttgagccatattcttaacccctggagagggggtttttaattgttatttacagttaatcagtgagtaccaggtgtttggcttaatccagccaagttgccagtcttgactccttctttcaaacatctgttattaagatcttccttataaatgcttaggcaaattaatttagtgaaggagagcgatctgtggtccagagtaactcaatgtatggccatttggtttgcagacagcgtttaataggagtgtcatctgtctgtagcatgggatcttcaaaacccatcacaactgcagtcccttctacgtacatgaccttttcattataatttgactgcttcaatccattgtagtggtagacagtaaaagattctggaccactggagccctgatcaggaaaaaattcttgaagaaatgggcccaataatatgattcctaatccttctggatctaatttattcttcatgagatttatatattcaggatctgaaacaaggtccaatgctttcatcacatcttccagaagtgaatcgggtatgaatccattatcttctgggtcgtaggtttgaaaaactcttctggcttgttctgaaggagcttcaggggcaanctaaagccatatccttggcaaaaaatacggtgaggtgagtctcactgccaacaatccaaatagggaattttggagatttcaagtaagaaccaaccttacagtatcttaaagcttccattagtgttaaaaatcctactgctgcttgttcatgtataccaagaagtttcattcctgagcactctctatcaccatcccatacattagaaacagcatgtcccgtcagcaggagattaattaaactttggctgccatgtcccatatacaggatctatcaagggttcacttgcatcttcaatttcgttttttatgttttcaatgccctttgtcagtaatacagaatacagaaaaagcaatactccaaatttatttccccacattgaatactggtccaagacagcatcttttaattctggtaaacttctgaacgatcttttttgaattaatgcatgaaatcgctcaaagccaagctcttcgacagccaaggcagaagaatgttccacttggcaactagactctgcaggactcccagaaatactagcagtttcctcagttgtctttcctcttaaccatgaaaccaagcagtatgatccagagtggtcactacaagcactttctaaatatatcacaccaaggtatgaccaaggagttccttctgctcttcctctgaaccatcccgccaagaagacttctccgaagaaaacaggagcttcttcaaaagaaatgcctgaacaggtgcaataacagcacaggggccaccttcaaactgttctaatgcagatccctctgattcactatacactaacccttgcgtccagcggcagaaaatggtgtccgagagaccggggctgctcttggtgccccacaccagctccatcagctctttagtcagttcggacatgatgaggaaccggcgggcggatcttcgctttgcggactcctgccccggaacatggtggaaggggcaactccggaaacagcaggctgcgggacggcggcggcaaacgatattggaaggtgaggcaggaaagaagaaggggctgagagccacttgcagagaccaagcctgtcaagccagcggacgcgtgggtcgacgatatctcgggaattccggacc

SEQ ID NO: 131431 - DNA, 1251 bp, Homo Sapiens
gcggggcgggcgcccagtgcaccggaggaggtgagcgccaggtcgccttcgcggcccggggacacaggcagggacgcgggagctgatgcggctggaccggccggggaaacagtattttctggaagggggcccctctgaagcggtccaggatcctgcacatggcgctgaccggggcctcagacccctctgcagaggcagaggccaacggggagaagccctttctgctgcgggcattgcagatcgcgctggtggtctccctctactgggtcacctccatctccatggtggtcttcatcggcatgatcaccttcaataacctctgcctcaagtacgtcggtgtggccttctacaatgtgggccgctcactcaccaccgtcttcaacgtgctgctctcctacctgctgctcaagcagaccacctccttctatgccctgctcacctgcggtatcatcatcgggggcttctggcttggtgtggaccaggagggggcagaaggcaccctgtcgtggctgggcaccgtcttcggcgtgctggctagcctctgtgtctcgctcaacgccatctacaccacgaaggtgctcccggcggtggacggcagcatctggcgcctgactttctacaacaacgtcaacgcctgcatcctcttcctgcccctgctcctgctgctcggggagcttcaggccctgcgtgactttgcccagctgggcagtgcccacttctgggggatgatgacgctgggcggcctgtttggctttgccatcggctacgtgacaggactgcagatcaagttcaccagtccgctgacccacaatgtgtcgggcacggccaaggcctgtgcccagacagtgctggccgtgctctactacgaggagaccaagagcttcctctggtggacgagcaacatgatggtgctgggcggctcctccgcctacacctgggtcaggggctgggagatgaagaagactccggaggagcccagccccaaagacagcgagaagagcgccatgggggtgtgagcaccacaggcaccctggatggcccggccccggggcccgtacacaggcagggccagcacagtagtgaaggcggtctcctggaccccagaagcgtgctgtggtgtggactgggtgctacttatagacccaatcagaatacggtggttgagaaggaaccagtgtttacaagtaatatcagaaagttgaaggaaccagtgtttacaagtaataccagaaagttgccaaacccttctct

SEQ ID NO: 131432 - DNA, 962 bp, Homo Sapiens
aaaaaaacgggggccatcttccccaaagctgggggccaaaaagttcacacccaaggggccttgaaaagtttccccccaggccagccaggagcccaggggcccagggaagaaggaccgcccggccgttggaccgtttttttaagaaagtcagggcgccaagattgctcccgttcccccgccggggaggccctttcggtggtgtagatgggcgttgagcgaagacacagagggctagcccagcacgccggaagacggttgccccagccacgacaggggtgccttctgcccccctcctggtcccacaccaagcccagaagccccccgatgatgataccgcaggtgagcagggcatagaaggaggtggtctgcttgagcagcaggtaggagagcagcacgttgaagacggtggtgagtgagcggcccacattgtagaaggccacaccgacgtacttgaggcagaggttattgaaggtgatcatgccgatgaagaccaccgacaggggcaggacgctgcgggccaccctgaggtccaggcgcaagctggggaagtccacggcaccagggcagcaggcggccagagcgctgaggcctttgcacagcagcgtggtcaccaggcactggtagaaggtgacgaagatgggggtgtccagccgcagggaggggctgtccagcaggtacttattaaggaacaccatggagatggaggtgacccagtagagggagaccaccagcgcgatctgcaatgcccgcagcagaaagggcttctccccgttggcctctgcctctgcagaggggtctgaggccccggtcagcgccatgtgcaggatcctggaccgcttcagaggggcccccttccagaaaatactgtttccccggccggtccagccgcatcagctcccgcgtccctgcctgtgtccccctcgtgccgaattcggcgcgcctgacttcatactcttaagaca

SEQ ID NO: 131433 - DNA, 428 bp, Homo Sapiens
  misc_feature (342)..(342): n is a, c, g, or t
  misc_feature (347)..(347): n is a, c, g, or t
  misc_feature (349)..(349): n is a, c, g, or t
  misc_feature (352)..(352): n is a, c, g, or t
  misc_feature (354)..(354): n is a, c, g, or t
  misc_feature (358)..(358): n is a, c, g, or t
  misc_feature (360)..(360): n is a, c, g, or t
  misc_feature (362)..(362): n is a, c, g, or t
  misc_feature (367)..(367): n is a, c, g, or t
  misc_feature (383)..(383): n is a, c, g, or t
  misc_feature (385)..(385): n is a, c, g, or t
  misc_feature (388)..(388): n is a, c, g, or t
  misc_feature (399)..(399): n is a, c, g, or t
agaaagtttctctgtcatcaggcaaagaccagggtgggaacaggaaaactagaaaactggtcaagggagaacaagtcccttttcctctcaccagtgaacagcaggtgaggaaacagactctgggaggaacgctgttcaggatggcttgctgcctgcatggcatgaggctgctgtcttgtgggtgctggcagccacaatctccatttttctgaagaccaccatttatggctagatccagtagaggtccagaactttcccaacactgctggagaggaagtgtttcacagtcagaggagagagccatggggaatggaagcaggggaagaaggggtggggaggggnaggananatnantggntntntgctnatcttagggttccttntntgnccttttgggtnccagagacagacccttagaaaggaattct

SEQ ID NO: 131434 - DNA, 870 bp, Homo Sapiens
  misc_feature (148)..(161): n is a, c, g, or t
  misc_feature (833)..(833): n is a, c, g, or t
gtatactcctattcttaggtttcctttattgtgcgctatagaattgttcctctttcttgtccctaggcatcatttatatggttcttgttttggtacaattccccataatattccacaatgtactgttttgtgagtagactgaatagannnnnnnnnnnnnngcttcttcacatccactgcggagttgtaactggagacatatttccacccacaaaggctccagatgttaaaacgtttcccaacatcgacttaatacagtgacggcaacacctccctcccgcccctcccagtagggttgggattgtactgtattccctactggtttacccttcccccctgtaaagggtaacattttccctgggtgcagaggctcccttatagtctccaagactgaaggacccctaattttgggactgcagcttaagtgtattagattaaacaccataaaaagctgcaagacgctcttttaagggaagaggaaactggtcagagaaacgcctccaattttcatcgccaacttgatttttaaatccatgaaggatcttacagaacatgtctctgagatcatcttttgggttaatccatgatgcaacggcatcacaaaaaaatataaaatcttggattacgccactgggattcacactgatcatggtacaaattccacggaatgctgaatccttttcctcattgtctcttatgtttctcagagaggtgcaccagggtcttataaactgctgtagcatgggggccacctcttgaggacaaacgtaacccagacgaccaattgttattgctgtattctctaacaacgtctttggtgtgttgggtctgtntatgatttctacaagctggtgcacaccataggaatat

SEQ ID NO: 131435 - DNA, 703 bp, Homo Sapiens
  misc_feature (139)..(168): n is a, c, g, or t
  misc_feature (330)..(342): n is a, c, g, or t
ggggtaccttaaattgtaacttccaagaacctgcttctactacgggaaggcaagctgacttttaactatattagttttctttgtgtagttcttcatcaacatgcaaaacaaggccccatcatgtgggaaaacttacatnnnnnnnnnnnnnnnnnnnnnnnnnnnnnngcttctttactatttgtaactcccattcttaggtttcctttattgtgcgctatagaattgttcctctttcttgtccctaggcatcatttatatggttcttgttttggtacaattccccataatattccacaatgtactgttttgtgagtagactgaatagannnnnnnnnnnnngcttcttcacatccactgcggagttgtaactggagacatatttccacccacaaaggctccagatgttaaaacgtttcccaacatcgacttaatacagtgacggcaacacctccctgggtgcagaggctcccttatagtctccaagactgaaggacccctaattttgggactgcagcttaagtgtattagattaaacaccataaaaagctgcaagacgctcttttaagggaagaggaaactggtcagagaaacgcctccaattttcatcgccaacttgatttttaaatccatgaaaggatcttacagaacatgtctctggagatcatcttttgggttaatcccatgatgcaacggcattcac

SEQ ID NO: 131436 - DNA, 528 bp, Homo Sapiens
tttttccaaaagaggcgaaaccgtttatcaagtcggcgccggggcggtatctacagtatctacagtatctacatgtatctacaccgcctgcaggcggggctctcgggctgtctacactgcaactgccggccgggccgcgggcgacgcggtctcggggagaacaataaatatcacttccttccgcctccgaccgggcgctttggcactggcgggcggggacccccttggccctcggggccggggaaggacccgcggtggctccagggactggggaaccggatacttcgatagcccaaggggctgggggtggcgagggggcccccatggcttcaaggctggggaaggggagagccgcggtggcccctggggctgggggaacgtattccttgcttgcccttggggcagggtggccgggcccggcgaacttcggggctgtgcaggaccggggcgggagcgcgacagggcccgtgttatctggggcaatagtcgtaggagcccggcggcgcggctccggccgaccctcgtgcc

SEQ ID NO: 131437 - DNA, 642 bp, Homo Sapiens
  misc_feature (220)..(267): n is a, c, g, or t
catataaaactatttattcataaatattttccaaaatgaaaataggtttaccaaaaaatgtccctcactggggaggggaggagggggcagccctcgcccccgggcccccagggtggggctgagaggaaaacctcccggccccctccctgcttcctgggagagggggatgccccgtggcttggggcctccctccagtcttccagggcagggccctcacctnnnnnnnnnnnnnnnnnnnnnnnnnnnnnnnnnnnnnnnnnnnnnnnnccggtgtcactggaggtcccggtcctccaggtagcggtactcaaaggtgaagccttccttcttccgctggccccacttctcgtagtcaaagtagatgtaggtgccctgctcaaactcgtcagtgatggtcttgggctcctcgtgcctctggaaccacatcatgtacttggtgtggaatcgccatgactgcttctttagggccttggctgccagatactgtgccttagtgccctccagatagtagaagatgaagaatagtgtctcggtcgacaggcgctggtagaattccacagtgtccgagtgtgggggtggcatctggtggtggtaggggggcgtcggacaggggttccgggggaggtactgccgaatacgctc

SEQ ID NO: 131438 - DNA, 432 bp, Homo Sapiens
tttcatataaaactatttattcataaatattttccaaaatgaaaataggtttaccaaaaaatgtccctcactggggaggggaggagggggcagccctcgcccccgggcccccagggtggggctgagaggaaaacctcccggccccctccctgcttcctgggagagggggatgccccgtggcttggggcctccctccagtcttccagggcagggccctcacctgggcagggggatcagcatgcgggggaagggggtgggtagagggaggggccgttgtcactgaaggtcccggtcctccaggttgcggtactcaaaggagaagcctttctccttccgcagcccccactctccgttatcaaagtatattgtgggcccctgctcaaactcgtcatggatggtcttcggctcctcttgcctctggaaccacatcat

SEQ ID NO: 131439 - DNA, 909 bp, Homo Sapiens
tgtcgacgcgtccctaccaccaccagatgccacccccacactcggacactgtggaattctaccagcgcctgtcgaccgagacactcttcttcatcttctactatctggagggcactaaggcacagtatctggcagccaaggccctaaagaagcagtcatggcgattccacaccaagtacatgatgtggttccagaggcacgaggagcccaagaccatcactgacgagtttgagcaggtgagggccccgccccctctcttcccgctgctagggttggggtagagtccccaggctccaggcagcccctgctggcctctgctcccttgcctccacctttcagctggcgcagtccctcagcctgaccaagtactcctccctctggctgtctgctcagcctggaacaccgccctctcatcctccacttggccagctcctaggcctcctgtaggtctcagcccaaatgtcccttcctcaaagaaaccttcctggagccacccagcccagtgcctcccctttgcagtgctgggcacactcgcttggggtgtgggattttcccagtatgtgtccctgcaccaggctgtgggctctgctgccgagggaccttgatggcccccacttcacctccaggtcccagcactcagcagggcaggggctcagtgcggaaactattttttttgaatgggcttctcaagttctaatactgggaaattcctgctgcttgcaaacactctggaaccaacctacctgggtttcagcccagtgcagctgggcgactctaggcaagtcactcgaacctctgtgtctcaattaacttatctgtaaaaatggggggaagaccacctacctaatgcagttgttatgaagattaaatgagttaataacatgtaagtacttaatggtgactgctaaa

SEQ ID NO: 131440 - DNA, 1536 bp, Homo Sapiens
ttttttttgccgtcatctctttatttgctgccagcagagtccaccaagcctgccgggcagccctgctgcccaccacggtggggtccaggcccagcccaccaccccgtggctgtctcctccaggctccagccgtcctgagggggccctggcagtgtctggagacccccaggctggaggtgaggggtgaactggactgagctcagggttagggttcccccagacccttctgggattcctacttcctgttccctgccgagaggggcaccccaaatcctccagagggctgggatggattagagttgagaatgggacaccctcaaaacccagggggtccttgcaagtccctggcgggcatccctgctgccctcacccgaccccacccccgggagctgggtgaggatggagggtgggggtccagagaagagtgaggggcagtgggggcttttccccaaggccctggggggcatcctcgtgcgtccccacagttcccttgcacaggtgcaggaggctgtcaggagtcagggccgggcatcacggtcccagcgtcgcaggcgggtcggccacagcaggaggctacagagacacagggcagcggccacgcccacgccgcccgtcacagccaccatcgcccagtggtaaaagctcacgcaggccctgcagcagagctctgaggggcaagggtgcaggctctggatggccatgactgccagcccattggccaccttatccaagaagctcatggagccgtacacgaacgctccgctgttcgtgtggggaccgatgaggtcggccgtcatggccagcgaggtgacgaggatggtggcacagccagcacccagcagcacagccgctgcgtacacggccacacccagtccctccgccagcgccacccaggcggcaaaggccaggatcaccaggaggcctgagaagtaggtcatgttcctcccaatgcacttgttgatgggcttcatgaggaaggaggacaagaagccgctgaggtacatcaccaggggaatggtcgcgatgaacttcttgggcaggtggagcgagtaggtgaggtacatggccatgtaggtctgggacaggttcacgatgagcctggtggtcatgtacagtatgcccacctggtagaaagccggctcccggagccagtgcttccagagcagcaggggctggccgtggcaggggccaacaggggggtgtgctcgcctggctcctccgcatgcggccggcgcctctcccgggtgcccaggtggaatagcagtgagaacacggcgccgacacccaccaccagcagggacaggttccggaacacgggcacgtcctggccccccagctggtcgctgatgctgatgtcttgggtgggctccacccgcgacgagccctgcaggtgcagcaggagccaggcggcgccgtagacggtgatgttggccaccacggtgaacgcatacctgagtgccgtgagctccaccttctcatggtcgttggtgaccctcgtgccgaattcaacaccaggcctcgtacctagcctatgtt

SEQ ID NO: 131441 - DNA, 818 bp, Homo Sapiens
ggaatcatgagagttttgttctagaacagtttttgttctttcatttgagataatttgaataagaaggatcaaaggattgggaaaggaaaagtaaaatatttggcagaataaaaatgttttttttggtaatgaagcctttagaaaactaaagttaaatgaaaaaactgaagtagaactaaactcttacgtcttaggagaacttagatacatatgtgtcagagtctgactgtatttatattctaaacacacatatgatcacacaacatacatacagagactatttgtataactgtaaatagatgtgacgtatgtataacttaaaaatcttttgataggtcacagtcgaactgttattggaattgaagagaaaaaaaaccgaacattatgcttactaatacttgatcctggatgtccttctcgagaaatgcagaaattattaaagcaagacatagaggctagcagtctcaagcaacttcggaaatctatgggaaatttaaaacataagcaataccagatattggcagtagagggtgctctttctctagaggagaaacttgccaggagacaagcttctcaagtctttacagccgagaagattccttgaagaatcaagcatttaagcatttcagtgattgagaacaatactttgttttctaaatgtagatattgaactccttaatacaattatgaatctgtgaattctcttaagtcttaacatataatttaatttctaaaatgcctgtgttaattgaattatacctatcatacttcattgtttggtaaattatttcaataaaatgtcttgtttttgcattgtg

SEQ ID NO: 131442 - DNA, 583 bp, Homo Sapiens
tttttcacaatgcaaaaacaagacattttattgaaataatttaccaaacaatgaagtatgataggtataattcaattaacacaggcattttagaaattaaattatatgttaagacttaagagaattcacagattcataattgtattaaggagttcaatatctacatttagaaaacaaagtattgttctcaatcactgaaatgcttaaatgcttgattcttcaaggaatcttctcggctgtaaagacttgagaagcttgtctcctggcaagtttctcctctagagaaagagcaccctctactgccaatatctggtattgcttatgttttaaatttcccatagatttccgaagttgcttgagactgctagcctctatgtcttgctttaataatttctgcatttctcgagaaggacatccaggatcaagtattagtaagcataatgttcggttttttttctcttcaattccaataacagttcgactgtgaccttgatgctgaagatagataggaggtttagatgtacacactacctttggactcccttctccctctgaagaataatagttcaatatccattcaaat

SEQ ID NO: 131443 - DNA, 931 bp, Homo Sapiens
  misc_feature (757)..(757): n is a, c, g, or t
  misc_feature (761)..(761): n is a, c, g, or t
  misc_feature (767)..(775): n is a, c, g, or t
ggagagtataaaacattttgagcacaatatgcagcacataacttttcagattgtgttgcatagaaaaggttaaaatcaattctttcagttactgtattgttcatttcttgtaaaggtcttcctacatttgagacgagaccctttaacataggctgccttagtaacaaaataaaacagatgtgtcataatattaactgtcctaaagaacatgtgtcttgcaaatgccatggaactgaatatttatttccttgtgagtattatgaccgttaccaaaggactcaaccagatttagggctcttcttaattgatcatgttcagaaagggactcatttggtcccactttgtaacatgggaagagtagaagagaaaattaaatgtggaaatcataaatgcttttctaacagggttatgctattctgtaacactaaatgtctgtcttttctcttaaaagattaagttttattaattttgtcatacatttctctatttgaatatatcttaaccattttatgttccaaattcgttttttgtccaagacattctatcagaattttacttgcctctataatctgaaaaatgggttctagaatgtcccacttgctgtctcttagaggctgagcttcatttctatgagcaaagagctcatttagcaatgtagttatttcagtatttatttctattatggaatccctggggttcagaatgtaactttgtacatgagatatatataaatatgtatatgaacataccccccacncccnaaaccnnnnnnnnnccctgtgcggccccctccggcccccccaaaagctttccaaaacctttcgtttgtgcgcgcgcggcccccgtaaggaaagggaaaattgggcctaagctggttccccaaggaaaaccccgggtcaatgaccaagggcgttgggattcccctcccaat

SEQ ID NO: 131444 - DNA, 668 bp, Homo Sapiens
  misc_feature (85)..(102): n is a, c, g, or t
ttttttttctcttttaaaaactctatttggtgcgtgcccacggtgctgcgtcccgtcagacatacctgtatagatctctctattnnnnnnnnnnnnnnnnnnaaaggttctttagcagttaaatagattccaatatgaacgtctcccaggacaaagctgcgtctcgcctctgggtcacacgcatctgtgcggctggggtgtatgtgccgcgtcacagcagtaccatataaatacgttgatttgaacgcagtttccctgtggtggtaaaaacacattcctgacaagtgacaagcagaagagtccggcagctgcagcgcctcactcggctgggacctcgtacttgaagatgacgctgaagagccggccgcccagccgctcggccagccacgcgttcttgatgacggccagcttgaggctctcgcagcgcagggctgcgtggtagtttgtgtggacagcacggcccatgccctcgatgaccaccagatccgcgccacgctcccgcaccagtgcggccagccccttatccaggcggctgaggtcgaggcacggggagctggagcccgtctgcaccagcagcagcctctcttcctggagcgcagagtgcacgacagggtccatgcccgcaatacgctctgccacgatgagggactcgctgtgggtcacgtcgt

SEQ ID NO: 131445 - DNA, 713 bp, Homo Sapiens
ttaaagcagatagtaaaaagatataatgtgaggaatatacaagaaagatatttaaaacagactgttaaaaatcataagtaactcatattagttaaaatagtatattaaaataggggaaaatcaatcacttcagctaaaagtttatctctccaagaagactgagtgactgagtcccagggcccaatccccaaccctcacaccggcagcaggcataaaaggggagggaccttcagacaaaggcacctttccatcttcaagttgcattccacagaggttcctagatttcttgaggtcattttcaaggcagagagatgccctaactagagctttagcttcgccctgattttttcgtttgcttattgtttacccttggggataacagcaagtacaaaatctgattccaacttttcccagctcaaaaccttcacaaacactttcacttgttcccgaatcaacacctcacaggccttgctttggcaaacggctcctgatcccagcttcctggcatctccctcctttcctcctcccattcccaccacctgtctcagtgcactcccaggatgggagctgacatggactgtatttctcagtctacactgcacatttcctaggcagagactagggccgtcttggtgcttgttgcatgaacagatttagctccaccctgacacgtaaactggatttcctgatatctccttaaacaggccttccgt

SEQ ID NO: 131446 - DNA, 1343 bp, Homo Sapiens
tttttgctcttttaaggtttaacttttaatcagccaaacatcttgcgcagaccctgagccagccctgcatcctggttcttcccctgaatgaccaccttccccagttcctcctgggctgcccggtttttgggatctatcgccagcaccttcttgaggtcagcagttgctttttccaggttcccaagggcagcctgggcaaccccccttcggtataaggcctttaaatggccaggctcccgctccaacacccggtcacagctctgggctgccaactgaggctgccctagcaacaactgacaggcagccagattggcatgaaggacagttcgttctggagggccaggtgggggtaaagtcaggagcagccgaagagcccgtccatagcatcgggcagctccttcagggttcccagctcgaaatagttctgtgccccttgcacgttcttccctggccagggcttccttctcgctagtctccagctcccaggagtctcggccttgagtgaaggatgccagtgtgagcctgacaggaggtccagagtgcccaggcagctgaagctctgcttcctcaccttgacacatggactccaagcatttctctatgagctccccccaagtttcctccctccatggccctacgcccatagttagctctgtccagccctctggcggccctgatccgaaaggaaaccccaaagccagtacccggcagcaggaacctagtttgggtttgtccaagccatggccacggattacgatcttcttgacaaagctcccatcggggcagtaccagagatcagaagcttgaagggcctctggcatctgactggttgatccatgagacttatgagagtctccttcaagttcagcaaccagtttttcagctccttgagtatgctctagaatttggctggctggatctgggcttacttccagctcaagcgtttcggtaggagggtctcggggctgctgcctaatctgaataactgaatcaaggttctcccgaaggttcttttcccactcttgttgcggctgagaggtgtccttttctccaattgtattgactggtggcgtctccatatggatgcttagtcccttccacggtgagtgaacagttttggtcagaaagggatgaaccaggttcaggtcagcacctgcgcggccaaagtgcctagcatggtgacaggaggagccgggccattcgaatcacctctccttccaaagctaaatggctactgaatgctgccctcggagccttgccccacgcggagagggcagccggagaggggcgcggtgcgggaggcgggggtagggggcggaacaactgggaaagatcctcgtgcc

SEQ ID NO: 131447 - DNA, 1675 bp, Homo Sapiens
tttacaatttcagctaaaacgtttatttctcactcaaaacttatttcccctcaaccctatacccaaagaagaaataaaatcacagatacataacagaagtatttgaggtaccctctcatatatgcaaacaaatgcagactaggcctcaggcagagactaaaggacatctcttggggtgtcctgaagtgatttggacccctgagggcagacacctaagtaggaatcccagtgggaagcaaagccataaggaagcccaggattccttgtgatcaggaagtgggccaggaaggtctgttccagctcacatctcatctgcatgcagcacggaccggatgcgcccactgggtcttggcttccctcccatcttctcaagcagtgtccttgttgagccatttgcatccttggctccaggtggctccctcagtctggactctaccacttgggtctccagattttctgttacgtccttgtgggtcaggatatttctggaagtcactccgtgaggctggtaatcctcagacccagcttctggtcgactctggaatggactgaagctgggcaggatgatgagagccagggaaaaaagaagaatcaaaacacaagtgctggtctgggcagctttgttggaagtttgagcaattagcgtctgcagctggcggagctgagctaccaaggagatgttgtgcctctccagctccctggacttttttctgtaattcttggttctgtgcagaacaggctgccaccctgctctccagcccatcaatgtactccttcttccgccgccgactgtcctgagctgactgcttgttacggattttcctcctgaccttcttgaggaccctctcctctgccttggtgaggggcaggtgagagggcagggaaaccccttcctgccccagcagacgcttctcctcatcggtcaggaacagggtttgacagggcagcagggttgtacagggcactggggctacggtgcctgctctgggcaggatgtgggcatgagcatcaaagggcagctcactgaccatgcaggaatcaggcaccataaatgctgggctccactgatctagctggatggagataaggcctacatttggcccagtttccccctgcatcctctccagggcccctgcctcatagacaacctcatagagcataggagaactggttgccctgggggcagggggactgtctggatggcaggggtcctcagagatgccactgtcactgccaggagatgcttctgagcagtacacctcattgggatcaatgaaaagcttcaagaaatcttcaggctcactctcttgaaggcccggaacctctggaggggggcagtggagtcccagctccaggacggatcctgtcgagaagatatcctctgggggctccagccacgcgtccagcaggtcagggattccgagatccatgcttcttgccaggagccacggtagggccgctgtatctgggagtaggggactaagagtctgagggtccacaaacggaatttaagaagtaggtagccgcgccctttctgctgcagttttctcttagctatagtaaatcttcctgagggtttggtgtctcctagctgaagaacagaaaaggctgtgactggagcacaggactcctgaatgcctgttctgtagccctcgcttttgcaagagggagatca

SEQ ID NO: 131448 - DNA, 949 bp, Homo Sapiens
gcgtttggcagctggcggaagctgagctacccaaggaggatgtttgtgcctctcccagcttcctggacttttttctgtaaattcttggttctgtgcagaacaggctgccaccctgctctccagccccatcaatgtactctttcttcccgccgccgactgtcctgagctgactgcttgttacgggattttcctccctgaccttcttgaggaccctctccttctgcccttggtgaggggcaggtgagagggccagggaaacccctttcctgcccccagcagacgcttctcctcatcggtcaggaacagggtttgacagggcagcagggttgtacagggcactggggctacggtgcctgctctgggcaggatgtgggcatgagcatcaaagggcagctcactgaccatgcaggaatcaggcaccataaatgctgggctccactgatctagctggatggagataaggcctacatttggcccagtttccccctgcatcctctccagggcccctgcctcatagacaacctcatagagcataggagaactggttgccctgggggcagggggactgtctggatggcaggggtcctcagagatgccactgtcactgccaggagatgcttctgagcagtacacctcattgggatcaatgaaaagcttcaagaaatcttcaggctcactctcttgaaggccacagccacggtccccaccggacttccagccttgcagtccctgttcctgtagcctagttaccggaacctctggaggggggcagtggagtcccagctccaggacggatcctgtcgagaagatatcctctgggggctccagccacgcgtccagcaggtcagggattccgagatccatgcttctgttctgaagagcccagccctgtcaagccagcatagcccgttgaccgcccctcgggccgattcacacccagcctcgcact

SEQ ID NO: 131449 - DNA, 821 bp, Homo Sapiens
gggactctttccgcctttgtttacaaccctgccatgatctccctcttgcaaaagcgagggctacagaacaggcattcaggagtcctgtgctccagtcacagccttttctgttcttcagctaggagacaccaaaccctcaggaagatttactatagctaagagaaaactgcagcagaaagggcgcggctacctacttcttaaattccgtttgggaccctcagactcttagtcccctactcccagatacagcggccctaccgtggctcctggcaaggtggcatccacttttgtagtaagcatggatctcggaatccctgacctgctggacgcgtggctggagcccccagaggatatcttctcgacaggatccgtcctggagctgggactccactgcccccctccagaggttccgggccttcccgagagtgagcctgaagatttcttgaagccttttcattgatccccatgaggggtactgctcagaagcatctcctggcagagaccacgccatcttctgaggactcctgccatccagacagtccccctgcccccagggcaaccagttccccctatggtctatgaggttgtcttatgaagcaaggggccctgcaaaaggatgcaggggggaaactgggccccattggtaggcctttatcccccctccaaccttaatccactgggagtcccagccacttatggggggcctggattctcggcaagggccccccggcggctgttcccttttgaaggcctccagtgcccaccaatcccttgcccacgaagtgaggggcctcggatactcccccagatgggcaccttgg

SEQ ID NO: 131450 - DNA, 1014 bp, Homo Sapiens
  misc_feature (59)..(59): n is a, c, g, or t
  misc_feature (66)..(66): n is a, c, g, or t
  misc_feature (69)..(69): n is a, c, g, or t
  misc_feature (80)..(80): n is a, c, g, or t
aaggatcttgacactggaattcaaaaatttacagccctctttactccgaagagtttttnttgatgntgnttgttttttcnttttaaatcacttccctataagccctcagcaattatttctagttttgttttggaagaaattttaatgacattcactgcaactcccaagccccatcccacagcttgtgaggggctggattctcatccactggacttggcaccaatgccctgtaagcatgtgccactctacgatctttcagtgggttttctctgctgccaaggggatattcagtgccattttgccacctgcagatcaagagctctcccagactgacagttcccaggacggaaaagccttaatacaggcacagccttggtagaaacagtgagcccttcacatggagatgaagtcttaaaggtttgagcaccatcttctggtcagtttttggcttctgaggccgactctgctttagaaacttcatttatttcagaatggcagaaccctaattgacaagctcaagtgatctgcgtatcaaaatgtggacaggaccagaagcaggtgtagtcggctgggatgagctgtcccaggctggccggagctggcgctcgctgtggaaaccgtcggggctgcctgcacaaagccggcagatgccagtcagtgggcgtgctggtcagtaaggctgtgccttctgcgcttcaagcagggtgagacctgaccatgtgggagcaataaaagcttccatggtgaccaaacgtgactcctgcctctgtacatggcaatgtgagatgtgcctggaaggaaggggtggccccatctctgccagtgtgggatccaaccaggcactcccctccacagggggtcaagccacacaaggtggcagacagccctgcctggtgtgtaaacaccgcaccagcagactccaacctttggcatggaaggaaaagaagataaatgctagtcattctctccaaacggcaggaacctacatctatctaattgcacttcataatggat

SEQ ID NO: 131451 - DNA, 718 bp, Homo Sapiens
  misc_feature (296)..(325): n is a, c, g, or t
ttttttctttcaaacaagacaggctttatttagatcaccaaaaataacattttacagaaagggaaccataacattacacaacaaagtatagctgtaaaatctcaaataagaaaggcaatgctttctttagatcaccaaaaataatgtttcacagagagggaaccgttagaagcaaatgcatagctgcaaattttcttttgccatcaatatcgattccctctaaaatactttgagactactttgtggtttccgagtacaaactaaacctttttggacagagttgctcggcttcatcnnnnnnnnnnnnnnnnnnnnnnnnnnnnnntttgtttaatgctaacaaataaagagacaatgtggttcttgctaactaactgcaatgtctactgaaatggcctaacctattccacgaatatttcactgtgaacatagttgctttttccttgccatcacagatggcctgcaaagtaacaagtgtcgtgtcagagcactttcaggcacccagggaatcattcctaacagaataactgcagtatgtgggcaactcaaacaacagagccccaaggtgggcattgtgtttgcgctgtgggtaaagacccaccaccttgttagttattcacctggaacccagagcgccaaactagacagagcagttgctcttacagaaccaacaacattttaataaattgcccgggggttcttggtgctgtaatgtgcc

SEQ ID NO: 131452 - DNA, 501 bp, Homo Sapiens
atatggaaatggttggggtgataagcaagtcttgcatattcttttctcctcaatttttttctccaaagtgggccaagccaagagtggcacagctgtgtggagatactgagctccaccttgtcagggaagatcccaactcaggagaaaacacctctaacaaaatctgtagccacgttggcacatctgcccttgaattcactttgtctcttttgctgcttccataaaaaggctttcccttgacaatgttaggcactttttagcaactaggcctgggtggtctgctacaatgcccaacacttaatacagtatcactattactgttagtagtatgctaagcgaatactattgttataaaaaaattcctaagcatgaaaattacggtatacaatttattgtgaaggcaacttcttgtgaacattaaatggtttatctccttcacctcatattaaagtccatactcttgggatatatctgacatctcaatattaaatgactaagatg

SEQ ID NO: 131453 - DNA, 941 bp, Homo Sapiens
  misc_feature (385)..(444): n is a, c, g, or t
  misc_feature (510)..(572): n is a, c, g, or t
ttttgagagtccagaggcccttattgtctgcttcctttgtcagctgaacccctggccccagagcccccagcagggccctctgaggatatagcagctccaagatgagaccaaccacctaaggaaggagctggagagtgtgggaagacagctccaggctgaggtggaaaacaatcagatgttgagtctcctgaacaggagacaggaggagaggctgcttgaacaggaggatagggctacgtgaacaggaggagaggctacgtgaacaggaggagaggctgtgtgaacaggaggagaggctatgtgaacaggaggagaggctgtgtgaacaggagaagctgccagggcaggagaggctgctggaagaggtggcgaagctgttagaacnnnnnnnnnnnnnnnnnnnnnnnnnnnnnnnnnnnnnnnnnnnnnnnnnnnnnnnnnnnntggaggagctcctggagcaggagaggcttcggcaacaggatgagaggctgtggcagcaggagactnnnnnnnnnnnnnnnnnnnnnnnnnnnnnnnnnnnnnnnnnnnnnnnnnnnnnnnnnnnnnnnctggggtgggaagccctgtacgagcagcgggccgagccacgcagcggcttcgaggagctgaacaacgagaacaagagcacactgcagttggagcagcaagtaaaggagctggagaagtcgggtggagctgaagagccaagaggctccgagtctgcagcagcagccagaccagtacctggagccccattcccacaaggagcttggatgtgcggacaagcagggtggactccccaggagcacccaggcttgagtggagaagctgttggtacaggagaggcggcaggaggagcaggagaggctgcatgccattcttttcgggctgccgagaacagggagctaaacatcaccatcatctaagagcgggtcaag

SEQ ID NO: 131454 - DNA, 1042 bp, Homo Sapiens
gtttatcctgccatatatggtagacacggaaacccatcttgaagagactcagaatatctgcaaacataaaactgcttctctaaattgcatttactggccttgaatccagtagagtagggttcagctatgacatgaagtgtgtcatcctggggagggggagcaatttgaagaaaaagggcactttgctacagttaattcacatggctataatagtctacaagtttctcctcaatgccaaatatctactaagaatttaaaaaagcagatgaaactttctatttccaagaattcatgtgataaagggtaatcatcacagagtttacatatgctcagttttcttaaagccatagattttattccagaaaggagaaagtacatggcattaataaaccacacatgccatgaattttagaacactaaattatttttctctggcttatcaaccagttatatccatgggctgcaaattatatccatgacaaaattgataacattttgcaacatgtcaaagaaagaccaacatttttgcctgagtgtcccactaatctttatctagagttattattcttggactttctacaaaagtttcttttcaaataatttatgaattacaacaactggaaagaatactgtgagaacctgaatacttcaatcaaacactgaaggcaacaatcttcctctttaaaccatctctcctgcctgaatttttatatactaaaataaccccactccttcatttctgcaggagtagccagaataaggtggcattccttggccgtcacaagtcccaggtcaaaacgtctccattcttcaatgttctaacaaaggtttctggccctgcagctcatgtctgtgtgattcaatcttgttctcaatgagagagatctctagcacaggtaagagtagctgaaaggcgtcctggatgtaggaggcactgtttgatgcctctagaaatactgcagtgattaatgggttaaggacatctgccatttctttgaccccagcagttgttaggcaggtagtgaactctttagacagagag

SEQ ID NO: 131455 - DNA, 1272 bp, Homo Sapiens
ttttcccttcaaaaacttttatttgtatcaacagttcctagctcttgacttagcttagagcttttaaaagagcagacaccttatatatttgagattgaaaaagtttctgctattaatcagaaataatcatttctattttctggcttaccccttggaataagccaaaaataaaaccaaagttacatttcctgacagatggctaagaaaacaatagaaggaacatcctgaattctagagttgactcttgctggtgaagtacaccttcagcttagtccattctcctaagtaaagcctgaaggaaaactcttaacacctaattctttgtggaaaaatgatcaactagccatttcacaggctatagaacaaaagtacaattgggcatctttccttatgtcctgggatcaggggtgcttacatttaacattgatcaggtaaagaggagaggctgtgcctaaggtctgagaaaaggcttgctctaagcaagctgtggtgaggcacaggatgactagggaatggcagagaacaggctggcctactgtcagttcaagcaaccagctgagcagcagcagtctaaaaagccccaaacagaacacctccatggattcagggaagggctgaggcactgcctttctagtatgtgccaaaaaaaacataactctgaattggggcccaggggactttgagtttgtatggggagggaaaaggagtgagcagttctcctcccctccccacagccttaggccaacacaaactgcaaattggtaagcagcaccttaatacctcttgtgacagttacggctgaagtggcagggtcaagcttgtaggtgttggcatcccccttattatatcggtcccggaagacatagatgctcccgttacagctggcaatcttccagagggatggggcagagctccaggcctcaggaaggcaaagccgggtgaagctgtctagcaagggattgtagcacaccagggagtccccttcagccacgatgaacaccagatctttatgcacagctgcgtgcatgcggcctgcaaagggcagcacatagggcttcacatggcatttgtctgtctctgtgtcaaagcactggatgagtcgggaaggtttggtaaagaagtccagatcattctcctccccccctagtaagtagatgatcccgttgaggttggcaccagcagcccctgacacagccacctctagctgagttgtctctgtccacacattatcacctacgccgaatacataaatgacctgcgctggcaggaggg

SEQ ID NO: 131456 - DNA, 678 bp, Homo Sapiens
gccagcaggcagagatttatttccacagcccctgcctccaagggtctgttagtctgggggaggggggctgaaggcagctggaccccaaagtttaggtctccaccctccacctgctcccacaacgggaagaccaccggaaacaagggtgtcccggccccctggctcaggcccagcaccagccaaactccctgctctaaacctggcccagggagcgatggccgggggtgtgggtcaggccggctcccctttcccctctgtctcctcctcttcctcggcccctgctgtggccgggatgccctcctcgtcccacgggggttcagaccctggatctggtgcacacaggggtacccccatggcctccgggtgcttgcgcttcgcatggcgccggagcgtgttggcctctgtaaagcgcagccggcagatggggcactggtacgggcgctcccccgagtgcacgcgatggtggtgcgccagctcgcccgcctcgcggaagcggcgggggcacagcgggcagcggaagggccgcaggccggcatggatgttgcagtgccgccgcaggtggctggagcgcttgaaggtcttgccgcaaaccttgcactggtgcggcttcagcactgagtgcgagatgctgtggcgctccaggtcggagaggtaggggaaggcccgcaggcacaccgg

SEQ ID NO: 131457 - DNA, 1351 bp, Homo Sapiens
tttaacatttaatacagtttttatttgtttaatttggtaaatgtagaatgtaatggtttcaaggcaaaccctggactacttcagtcacaacccaatagttaacatgattctgaagaacagtcttatctgcaatatctacccacttctaaacaaacacatctatagaaatccatgtacatatatattagttttcaacaagtcaggattttcaacaactctaaaatttcaattttatattctgaacacacttcaaaattatccacttgatgcaggatataaccatagggagataaaaattcatgcaatgatactcaggctgttgtttcaaaggtaaatccaatatttgatcattcaatgctacataaagtgcattgaatatcgaaaataaaacaagcgccaatttttatcattaattaataacacatttattatcttgaaaccaaactggcccaagttactttttgtctttttgagtcagctctgtataaactcatttctctcaagcttcctgggaaataaaaaccaagatatttcatttattctttgcagttaacaagagatggcagcgggctcaaggtaggtatgttcttgataattcagagtcagaaagtacttcttcttgagcagaaggttcataatctcctacattttcagccaactcaatatctaactcatcattactttctgcactgtaatcaacttcttcaaggaatcgaggttcatcttcatccaagacataagtggtagggctagttactttgcagcttgattcaattaaatcattttcaaagtcaagcaggctggaaggcagattatactccaatggagaggtcagtcttttcaaacgtaaaagaccaacacaaaattttgctcccatctcttccagttctcgggtaccaatctgtaaacccttgtattttccctgatcacagccacataaagtactctccatggtataacttctttgtactcctatttccctccaaactacaacacgtgctgtggattctttagatttttccactacgaagctacagctgctcatgcaaaatgctggggcgatatggctcagtatcttaggcaatgtcctgtatcccgtatcctccacaacatcacatgaagttgcattatcattggtatgccacactgtctctttgatgctgcaaccatacataaatacattcttctttcgggaatggccatgataatcacaataaaccaagggtaaacgcttcactgcagccaagtattgcaacagccccttagcatggtaaattgtaggatgtaaatccggacttggacccggccgtaatggccgaattcccgggcatatgtccggtaccgtcgactg

SEQ ID NO: 131458 - DNA, 911 bp, Homo Sapiens
tgaagctgccaggggccaaaagggccatgggggggaacctggggagggggaaagaaaatggccggtttcaaacaaataagcgggcagggggcgggcaggaaacaaaagagccactgtggaggttaggaggacaaaaggcaggcccgcaggtggccacccatctgagtgccatcgtggacaaaagccggtatataacggtaattgaactgtctctggataacaaagttttaaagaaatcaccctatattttttaagaaggagaaagtcttgtacctggggaagttttactgttcagaatgaaacctttatggaatggggaagtcaaccctcactaggtacgtcggcccgatttctgagataaaagatgaagcagtctgatgggtctcaaatccgatcttgtatgaataaagcaagcatcaggaaacatggatgtcatgttctaagagaaatattctgttatgggtgagggaagcagtgatgggggtaggcaccacagtctgtaacccctccccttgtatctcagtaccaacaaggcagatgagctggagttctggtaatcctacacagtttacttcatgccagcttttgctttccatgaggtccaggtaaaccaagaacgctacataaacttgggtggcatctcctatatctaattccatcatttctagatacttagggtgagtgcccatccaggcgtcctcaggggcccacgaaggagctccaccgccgtcgccaaagccgcgaacaccgcccggacccaggccgctgcagccgggggtcggctcggaatcgccgcgctcctccatgccggccggtgcggcgctcccgtggtgcaccacgacccgcgcccggccagaagcagcggcgcgcgcgcctgtggcggacgcgtgggtcgacgatatcccgggaat

SEQ ID NO: 131459 - DNA, 626 bp, Homo Sapiens
aggagaaagtcttctacctggggaagttttactcttcagaatgaaaaccttatggaatggggaagtcaaccctcactatgtacgtcaaccctatttctgagataaaagatgaagcagtctgatgggtctcaaatccaatcttgtatgaataaaacaagcatcaggaaacatggatgtcatcttctaagagaaatattcttgcaactttcgagatgccttcaagatctcccttatcctgttatggctgagggaagcagtgatgggggtaggcaccacagtctgtaacccctccccttctatctcagtaccaacaaggcagatgagctggagttctggtaatcctacacagtttacttcatgccagcttttgctttccatgaggtccaggtaaaccaagaccgctacataaacttgggtggcatctcctatatctaattccatcatttctagatacttagggtgagtgcccatccaggcgtcctcaggggcccacgaaggagctccaccgccgtcgccaaagccgcgaacaccgcccggacccaggccgctgcagccgggggtcggctcggaatcgccgcgctcctccatgccggccggtgcggcgctcccgtggtgcacctcgtgcc

SEQ ID NO: 131460 - DNA, 2028 bp, Homo Sapiens
  misc_feature (64)..(69): n is a, c, g, or t
  misc_feature (73)..(73): n is a, c, g, or t
  misc_feature (77)..(80): n is a, c, g, or t
  misc_feature (83)..(83): n is a, c, g, or t
  misc_feature (86)..(86): n is a, c, g, or t
cgcgcccaaaacgaattggtctaagaaaagctttttcgaggggccgaggcgggccgaccagggnnnnnntttntttnnnnttnttnttttttgattttaaaacatttttattataaaatacaaataaaaacattgagaaaagacaaagtcatccattttctgcctcctatcccactataaccagttagtaatttgatttactttgttatctttttatcatatgcttggtctgttatttcagccatgattacacccacttatacacttttccgtcttgcaatttttacttaaggtaatattttcatgtttttaataatattcattactaatttttaataagtacattatgtatcatttgtatatatctgtttattgactatttcctagacccagggatgacaaactatggcaccacatttgtaaacaaagttttactggaacaaagccacgcccgtattgtttatgtattgtctatggctgcttttgtgcttcatacagcagtgttgacaagttatgacagagacagtaggtttaaaaacctaaaatagttactttctggccctttatagaaaaagtttgccaatctttaccccaaactttaaagtggtttataatttgggctactaaaagtaatgtcacttggaacatctttgtgcatataattttttatactttgtacaatttgagagacattaacaaaagtggaataactgggtctaattaatgaagacatttttacggttgattctctcccacactgttgtaatattcaagctatgatatgtgataagaatgaaaaggatagcccagaactcttgtaggtaacatgtctctggtccctgttacttaagacacgtaagttacttaagacacactctggatgaacatattttgagttttgatttaaagttaaccaaaaaagagaaataacagtaactgcaatgggaagaccaattgaaagaaatcttttactttttactgggagaggaaaaagtaaacagaagtgggtgacaaggtacatataaaatgccattctacggtagctgcagtggccaaaaggcactggggagagctgagtaagagaaagaaatggcagtctcaacaatgagctggcagtggcagcaagaaacaaagagacaactttgagtgtgggatgacaaaagcagcacacaggtcccacccatctgaatacatcctaggcataaacctgtatataactgtaattaaactgtctctagataacaaagttttaaagaaatcaccctatattttttaagaaggagaaagtcttctacctggggaagttttactcttcagaatgaaaaccttatggaatggggaagtcaaccctcactatgtacgtcaaccctatttctgagataaaagatgaagcagtctgatgggtctcaaatccaatcttgtatgaataaaacaagcatcaggaaacatggatgtcatcttctaagagaaatattctgagggtctggcagcataaatccatcagtaagtttataatagactattgtagaatcagactccactatggccaaagtaaaagacatcggcaaatctggatcaccttgcaactttcgagatgccttcaagatctcccttatcctgttatggctgagggaagcagtgatgggggtaggcaccacagtctgtaacccctccccttctatctcagtaccaacaaggcagatgagctggagttctggtaatcctacacagtttacttcatgccagcttttgctttccatgaggtccaggtaaaccaagaacgctacataaacttgggtggcatctcctatatctaattccatcatttctagatacttagggtgagtgcccatccaggcgtcctcaggggcccacgaaggagctccaccgccgtcgccaaagccgcgaacaccgcccggacccaggccgctgcagccgggggtcggctcggaatcgccgcgctcctccatgccggccggtcgcgactcccgtgtgcacctcgtgccgattccaaccagccctactagg

SEQ ID NO: 131461 - DNA, 1089 bp, Homo Sapiens
  misc_feature (105)..(113): n is a, c, g, or t
  misc_feature (159)..(272): n is a, c, g, or t
  misc_feature (654)..(667): n is a, c, g, or t
  misc_feature (962)..(962): n is a, c, g, or t
gtgggggggaatcccagcccccttttttatgtccccggggttttctctgggggaaacagcctttggccccagtttccctttcccccaggggcggccccccgcccnnnnnnnnngggtttataaaaaatttttttggggggcgaggggggcccccccaannnnnnnnnnnnnnnnnnnnnnnnnnnnnnnnnnnnnnnnnnnnnnnnnnnnnnnnnnnnnnnnnnnnnnnnnnnnnnnnnnnnnnnnnnnnnnnnnnnnnnnnnnnnnnnnnntagatattaaaattagtttatttttctacttaacttttaataaatgagaagaaacacagtagtctgtctcatatagaacatttataatacataacaatccataaagcctcatggtgaggtaggaacagctttggaaaataacacacagtcatgaaaacatacaaaaagttaggtaaaatgttgcagcactaaagatattttatctgcatctgtatttaatgagatgataactgcatttaactggcccacatctggcccaaaggacaggcaacagaagacacaaaacaacacaacatataagtttcataatcacagaatatactgatacacttcattgtgctgtttcaaggcagaaccataacatggcaatttgtgtcttttnnnnnnnnnnnnnnaccacatattaattgtatgttacattccctccagcatctttttgccaaagacactggaccataaaatttttggtttaaaagtttaaattgaataacatacaaaaggctcttgtgccagtgaaaatgactgctaaatattccagagcttgttagtaaaacaaaatagcattaccacatagtatcggtagagctacatcaaaatagtgctattataatcccaatttcagagacgtgaaacactgtatgacacagtttcaattttaaaaatgacaaacaaaaaacccctacaccttcncaagagttttaacactgtttatgacttaactgaaactcagtattaaaataaatatttttatactgtagaattactctccatatttgtgtgaacatcttaagacagcaggttaatgacatttttatca

SEQ ID NO: 131462 - DNA, 1037 bp, Homo Sapiens
aatgtttcctaagatgatttaatatcatggaaagatgctcacaacatattcttttgtgaagaatccagatggaaaaagtatatatgagctgtaatagcatgtttaggtagaattcacataaaaatcactatttcaaccattctaaagtgtctaattcaatagcatttagtgcactcacagtgtcgtgctaccttcatcactatctaggtccggaacattttcaccatcccaggaggaaaccccatcctgattagcagtcgctcctcagtcccacctccccacagctgctgaaagccaccaatccactatacatctcttcagattggcctgttctggaaatttcatataaaaggacagtacactatgtgaccttttgcatctgatgtctttcattcagtatcatgcattcaaggttcatccacagtgtagtggggatcactgcttcattcctttttatggctgtgtaatactccattgtatggatggaccatattttgtttatcctttcatctggtaatatatagcttggggttgttttcatcgtttggctactgtgaatagggctgccatgaacattcacgcacaagcgtctttctgtttgaacacttgtctcaattattttgagtagatatctaggatggaatacaggactgtggaacagggtcttatggtaattctaggcttcacttttgatgaatcaggggtcattttattggggtcagagtgggtctctgcagaactcagctcaggggctccacccgcagccaaagtccgccctctgcgcgcaggaccagctccggcttcctgcggggctcggtgtggtcaggcaggacgcggaagcgcagcagcgtgagcgccaggaccaccttcatctccgccatcgcgaacgtctgcccgatgcagttcctgggccctgccgagaagggaataaaagccagaggtgacctctccttgatgttctctgggtcaaatcgaaaggggtcgtatacctcagggtcccgccacacagctgggttgtatgggttcctaaacactga

SEQ ID NO: 131463 - DNA, 1205 bp, Homo Sapiens
  misc_feature (175)..(175): n is a, c, g, or t
agggggtggcccgggccgtgggcgaatagcaccgggggggatgccacgtgccgccccctggtgtttgcggaaaggacgcctgccacggtgtggatacgagggtccccgccctgttccccattgctttgtccccctgttggtcttgccttgttttggggagttcggttcggtcggngccgttggtaggcgggtatcccgcgtgaaggggtgtttcctggtttgaacccaaaattccccatcctttgtcccttattgccccattgttaatgcccggtgccttcccttgctccaaacccctccccaggggttcctttgtgcccgcagggataaagtttttactgggcttctgggaagaacccactaagggccctagatgccctgtgctcagccagagaggccgtcagggttttgggttcagagaggtcaccctgcctccacccactcacctccttgtcttagatcccgccagtccccaggagccccatgctggctgtcaacgaggctcaagcagaggtgtcagcatatttttgtttctgggactctacagaggtgggtgggtgggtagggcagtcactgtgagttcgcacccaggggctccacccgcagccaaagtccaccctctgcgcgcaatatcagctcgggtttcctgcggggttcagtgtgggtcggcaggatgcggaagtgcagcatggtgagcgccaggaccaccttcatctcagccatggcgaacgcctgcccgatgcagtttctgggccctgccgagaagggaataaaagccagaggtgacctctccttgatgttctcttggttgaaacggaaggggtcgtagacctcagggtctggccacacagttgggttgtaatggatcccgataatattgatgaggcagacaatgcctttggggatgacgcggccgtctgggagcacaaagtcctgcgtgcaacatcgggagatgaccgggactgggggatgcaaccgcaggctctccttaatgcacatggtcaggaagggcagctgggccaggtcgtcccattcaatctctataggttcacggtccttcagaagctcttgcacttcttgccggcacttttcctggtattctgggtgctttgcaaggtggtataggacccaggagagaccactggctgtagtgtcatggccctcagacatgaaggtgtcagcttctgctcttatgtcctcatcag

SEQ ID NO: 131464 - DNA, 999 bp, Homo Sapiens
ccagggtttgcacctgtttccccatgtagtttttaatagcatcccgcttcatactcagaagtgtcccagggtggacaagacattgtgtggcacccttgcaatggcccgcgctgagcagtgggagtaggggatggggagggcggggggcaggtgcccctctccactcaccttcccagaaggccccacccacctccctcagcaccatctccagtgggtggggcaacatctgtcctggcctcagattgcccaagacaccatttgctcacggaggccaccatgccccaatatgtacttcccgtttcgggaccaccaagctctggggactggaatgcaggcagtggaagccccagattgacttaacctgttgacagatcttcagagaaactgctggtaggaggcagctggggaaggtggcgatggccagtgggcaggcaggcctggccccagagccactgtggtacaaagaggaagtctgacagaagagcagcctcgggcaaaacgggggagccaaggcggccacgggggagaagtctctccaccgtgccctgtgtctggtgcctgggagggtggcccagtgtccatcttgtcccactgatgctgccacatcccaaggctcatgtctcagaacgagagctgctgaagggctggacgttctgagacttcttaagatgtaagtcatttggcatctgtagctggtgaatttcaggtctctacggggaggcaatctcagacacccctaaaatccttggaacaggtgctgagccagtccaagcatccccatgtagcatccagaggggttgaggggctgggcttctggggatagacaacagtatcctgagcccagagcaagacggagggaacccagggccgaggccaaggaggccactcacaagagcccagcacctgggctccaaatgcgaccctgcccagaaccaagccacaacagcccactattcccccaacctggccagaatgaccccaaaagtcttggacaaatca

SEQ ID NO: 131465 - DNA, 830 bp, Homo Sapiens
  misc_feature (184)..(282): n is a, c, g, or t
  misc_feature (802)..(802): n is a, c, g, or t
gggtgattaaacaacatcatttatttgctcacagttctggaggttgggaagtgcaagatcaaggtgtggacacgtttggttctcctgaggcctcttcccttggcttgtaaacagttgccttcttgctgtgtccttgcgtggcctttcctctgggtgcacatctccatggtatctcttccttttnnnnnnnnnnnnnnnnnnnnnnnnnnnnnnnnnnnnnnnnnnnnnnnnnnnnnnnnnnnnnnnnnnnnnnnnnnnnnnnnnnnnnnnnnnnnnnnnnnnccaagctttttccatgacagaaaatcctctctgctaagtttaagataaaatagtcctgggaatataaaaatcaaacatgttgatgtactggcaccaactacaccaaatacatttctaatgtcaggaacatatattgcaagtgaaacgatgataatattgagtgctagagtgatcaaaaaatggcgaatccatgagaatggaaaattggagaaaaacatcattgttacagcttttctggcagggaagtggattagagggactgtcaaaagcacagcaaatagtatgcataacttcacagtcatgacaacaacatcatgtgataagtatttactataaccttttagtaattctgactccactttgtcatagaaagtgaggtacccaaagagtgcagatattaaataaatgagagaacttagagcaattgctgtattggtgacattctgcattcgtttgtttgaaggactttgaagttcacaatgtatgggccatattgaagtatggcagagaaatgaaaaanccttgggttggtgagcataagcgctctc

SEQ ID NO: 131466 - DNA, 965 bp, Homo Sapiens
  misc_feature (801)..(801): n is a, c, g, or t
ttgattaaacaacatcatttatttgctcacagttctggaggttgggaagtgcaagatcaaggtgtggacacgtttggttctcctgaggcctcttcccttggcttgtaaacagttgccttcttgctgtgtccttgcgtggcctttcctctgggtgcacatctccatggtatctcttccttttcttacaagaacaccagtcacattgaattagggcttaatggcctcattttaatttaattacttctttaaagaccctatctccaaatacagttgcattctgaggtcctggggattggggcctcaacctacgaatttggggttggaacacaattgagtgcataacagctaatagcaatgaagggggctaccaccctatgactgaaggggcaagaggaggtggaggtttccagaacccagaacctggcaagcatggctacacatggggagggccacctgaggtgtagtctacccacagtggcctggcaggcagggaggaggcagcagacaccttgacctcactttcctccctctgtaggctcccactggtgctgctctctggctgaacccaacaggaagccaggggcaagggaatccattgctacagtccactaggtgaacctctgggctcagagcaggaggaaatggtagagggccacgctcacactatttggtgtggcttgcacaccaaactcttaagttctgctctgaagtgatggtgatttatgagaggacatttgattgcctggttttttcaattattcccggatatgttcacactccgtgcgattcttggctcgaggncaattcctatagggagcgattaatcgaatcatgcatagtgttctgtgtgaatgtatcgctcaattcacacacatacagcggagataaggtatgctgcgtgctatgaggagaatcaatattggttctccatgcgctcatcggaactgcggcatgattagaacgaa

SEQ ID NO: 131467 - DNA, 880 bp, Homo Sapiens
gtggagtcagaattactccaaggttatagtcaatccttatcacatgatgttgttgtcatgactgtgaagttatgcatactatttgctgtgcttttgacagtccctctaatccacttccctgccagaaaagctgtaacaatgatgtttttctccaattttccattctcatggattcgccattttttgatcactctagcactcaatattatcatcgttttacttgcaatatatgttcctgacattagaaatgtatttggtgtagttggtgccagtacatcaacatgtttgatttttatattcccaggactattttatcttaaacttagcagagaggattttctgtcatggaaaaagcttggggcattcgttttgctcatctttggaattttggttgggaattttagtttagcactcatcatttttgattggattaataaataaaagaaatattttcctacttcttacaagaataatatacccctagttgcaagaatgaattattccggaagacaccctggatgaaaaataacattttaataaaaattattaacagaaaagcagaacaaaatggcagtgggtatggggaagtaagagtgtagcagttttaatcaaaaaaagaaacaaactcgaaatgctcttaaatatattgggttgatcttttgttttttaaattaatatttttatggtagttttatgtttgcagaaatactgaacagaaagtacagagttcacatataccgttttaccccaacatacagtttcccctattattaactcttgcgttcatgtggtacatttgttacatttgatgagtcaatattaactattattattaactaaagttcatagtttaccttaggtttcattcttgggagccact

SEQ ID NO: 131468 - DNA, 667 bp, Homo Sapiens
  misc_feature (41)..(41): n is a, c, g, or t
  misc_feature (77)..(77): n is a, c, g, or t
  misc_feature (121)..(121): n is a, c, g, or t
gccggagcagctccatcctggaggaggcctgccggcagttncaggacacactgcaggagtgctgggacctggaccgncaggccagcgacagcctggcccaggcggagcaggtactcagctntgcgggccccacctcttccttcgtcttctgaacgtggcctatggcccaggacagcctggcaggtggcctcgctgcccccagttcccctctctgcccccacactcgtcttagttgcttcacactggtcactggccctgcacactgggctattgctttatccctatcctgagagcagcccctccccaccatccctccacatgctgcaaggacagactgaagggctgtgagcaggtgtaagggctcccacatccgtgagcctgtgtccgcagctgctgccacttctgggctgctccagcctgcaacttagtggaaggaattacttcctcctgaggctacaggcgagaaaggtagggatgggccagcctcccgtctcagctgttgggagacagtaggcaggctgagtggcccagagcactcctggaagtgggactcccctgccttgcaaatgtgcctctccagactgctcctgcacttaccccctccccgcagcaccttctctgcccgttcttgtccacacatctattaaatgcttctgttttcatttgc

SEQ ID NO: 131469 - DNA, 1164 bp, Homo Sapiens
  misc_feature (903)..(903): n is a, c, g, or t
  misc_feature (999)..(999): n is a, c, g, or t
  misc_feature (1058)..(1058): n is a, c, g, or t
ctttttctttttctttgttaagtcgttccctctacaaaggacttcctagtgggtgtgaaaggcagcggtggccacagaggcggcggagagatggccttcagcggttcccaggctccctacctgagtccagctgtccccttttctgggactattcaaggaggtctccaggacggacttcagatcactgtcaatgggaccgttctcagctccagtggaaccaggtttgctgtgaactttcagactggcttcagtggaaatgacattgccttccacttcaaccctcggtttgaagatggagggtacgtggtgtgcaacacgaggcagaacggaagctgggggcccgaggagaggaagacacacatgcctttccagaaggggatgccctttgacctctgcttcctggtgcagagctcagatttcaaggtgatggtgaacgggatcctcttcgtgcagtacttccaccgcgtgcccttccaccgtgtggacaccatctccgtcaatggctctgtgcagctgtcctacatcagcttccagaacccccgcacagtccctgttcagcctgccttctccacggtgccgttctcccagcctgtctgtttcccacccaggcccagggggcgcagacaaaaacctcccggcgtgtggcctgccaacccggctcccattacccagacagtcatccacacagtgcagagcgcccctggacagatgttctctactcccgccatcccacctatgatgtacccccaccccgcctatccgatgcctttcatcaccaccattctgggaggggtgtacccattcaagtccatcctcctgtcagggactgtcctggccagtgctcagaggttccacattaacctgtgctctggggaccacatcgccttcccacctgaacccccnttttgatgagaatgctgtggtcccgcacacccagatcgacaactcctggggggtctgaagagcgaagtctgccccgcaaaaatgccctttcgtcgngggccagagctcctcaatgtggatcttgttgtgaagctcacctggcctcaaggtggccntggatggtcaaccacctgtttgaatactacccatcgccttaggaacctggccacccatcaaaaaatgtggaaatgggggggcgaaatccagctgtaccctggggaa

SEQ ID NO: 131470 - DNA, 1622 bp, Homo Sapiens
ttttttgaatgtgccaacaagcattttcatttctttattttaaggacactgggaaaggagccagtcctctgaagagaacactctggtcaggtggtggaggccagtgggaagccatcaggcctgctttccaggaggggtgaagggttggtgcacggtgcaaggtgagagtgaggttaaaggtcagagaggaggggctgaggaggccacctcccaccaggagcagacagctggtggcttgggactggggtggagctgcgtgggggatgggaggggactgagcatggggcttcatcttcactgcccactcctcccctctccctggctgtgcctgcctcctgggatggtaggattccagcagctggagccccaggtgctgctgcggctgaggaaggcaatccccgtcagctgccttctccgttccagggtggctgtagccagaagcaggaccagacaaggacatggcctctgcattaaagcccagatcccaggcagggttggaaaggctgggcctgggaagtggggatgatgagaggacccagactgccccacaccccagcccccggccccagggccaggaagccgcctatgtctgcacatgggtcagctggatgtcgccccccacttccagtctgttgatggtgggcaggttcctcaggcgatggtagtattcaaacaggtgctgaccatccacggccaccttgaggcagtgagcttcacacaagatccacactgagaagctctggccacggacgaagggcatttttcggggcagacttcgctcctcagacccccaggagttgtcgatctgggtgttgcggaccacagcattctcatcaaaacgggggttcaggtggaaggcgatgtggttcccagagcacaggttgatgtggaacctctgagcactgggcaggacagtgcctgacaggaggatggacttggatgggtacagccctcccagaatggtggtgatgaaaggcatcggataggcggggtgggggtacatcataggtgggatggcgggagtagagaacatctgtccaggggcgctctgcactgtgtggatgactgtctgggtaatgggagccgggttggcaggccacacgccgggaggctggaagctgatgtaggacagctgcacagagccattgacggagatggtgtccacacggtggaagggcacgcggtggaagtactgcacgaagaggatcccgttcaccatcaccttgaaatctgagctctgcaccaggaagcagaggtcaaagggcatccccttctggaaaggcatgtgtgtcttcctctcctcgggcccccagcttccgttctgcctcgtgttgcacaccacgtaccctccatcttcaaaccgagggttgaagtggaaggcaatgtcatttccactgaagccagtctgaaagttcacagcaaacctggttccactggagctgagaacggtcccattgacagtgatctgaagtccgtcctggagacctccttgaatagtcccagaaaaggggacagctggactcaggtagggagcctgggaaccgctgaaggccatctctccgccgcctctgtggccaccgctgcctttcacacccactaggaagtcctttgtagagggaacg

SEQ ID NO: 131471 - DNA, 993 bp, Homo Sapiens
  misc_feature (797)..(797): n is a, c, g, or t
  misc_feature (816)..(817): n is a, c, g, or t
  misc_feature (830)..(830): n is a, c, g, or t
  misc_feature (846)..(922): n is a, c, g, or t
  misc_feature (941)..(941): n is a, c, g, or t
  misc_feature (952)..(952): n is a, c, g, or t
atatttaactggaaagtataccaatttcactttattagcctaatttaggaataggatgaggagagcggggttgaggtcaggcatgaaggaagagggtaaaaacttgtgatggttaagatcccttcagaactctggtgcagtcctcaatcactgcagctttactgtcagtcagtggagctgcaatccaaaagacggaaaatcgactcctgttttccatttctgtgtccagtgactcttcagttacagtgtgatgaggtctaccaggttgcctttaggaggagtcatgctgtcaggaaagaaatttactaaggtgtcaaagagctgagttctttgagcataggtgtgatccacatcagaaaagcccagagctgtaaaatctgaaccagatttgaatagagctgatgccaggagctgaaactcttttgtctcttctgggtctgaatgatccacagttatataaagatcattttgtaaatatttcagagcactaaggggatccacttgggccttttcttcaaacctgtgttttcttatgaggtacttgcaatgcctcagtaaataatcttttgaaggtctacacaacttcagtgaccagaagtcatctaatctcatctttggagagccagattttcctggattcccaccagataagtaatgaaccttgtgtagctcatcgtatacaagctgatgggcaaccttggacatggttctttttcgctgaagactttgtagttggattatcctttgcagcttgatcattcttatagacacaagacaactattcctcacaatgtcantaatccagaatgaatttcnntacattttctccntcggtgcgattccttnnnnnnnnnnnnnnnnnnnnnnnnnnnnnnnnnnnnnnnnnnnnnnnnnnnnnnnnnnnnnnnnnnnnnnnnnnnnnatcgctcacattccaacanatacgagcggnagcataatgtaagctggggtgctaggagtgactatcacata

SEQ ID NO: 131472 - DNA, 1157 bp, Homo Sapiens
  misc_feature (1106)..(1107): n is a, c, g, or t
cagtggtcccaaaaagcctttattcactttatagtttccattactgaagagccaactttcggttctcccacaattgtgtaaagtgcaggcaagccacaagagcttctagttttagcttgcagcccgtgggaccacgataattgttatgaagccattaattctacctcagcagtttcaactgtcaggtacatgtaacaataattgcacttaatgaatgctgctcaatttattaagtacaaaatgaaaaccagtattcttttatatgcagcactgaggcacattatttatcatttgtgtataccatgttgaatattctactatcatttattggtcagggtatatagccatagtttttctaaagcttctttttattaaaaaacaatgcaggaaattgtaacactctaattaaagaataattaaaataattagtaccaaaacaaatatttaataagaatctatgtctatggaaagcaatccagcaaaaccaagatcaagttcctgctttagataaacaagattctttctgtggctaccctcccctccccaaatctttactagaatatgaaaaaattcaaaagcttccagttgtttgaaatatcagtgttgtttctttctcaaagtttttggcagtaaaacttttgtgtacagacatacagcctgcctcagaattttcaaaagtaagagctagatttcttattttcaatcactcaaggtaaactgcatagacatttgcaagagcgaagagagaagaatttctgaaaacataagatgaaaaggtatcacttttaggatcccagaggcatctgcttccaataattatgctctgcctgttcagttgtccaatgtgaacaatcacaattagtttataccgtggaatcatcaagtccttgacctgggctttaataacctcagaaatggttttagtcatctgtctacagagctctggttcatattcttctacttgtagatagctggttactacatctttcaaaatatgattgacggtgaccacaggaaaatgtttggggaggacctgaaaatacacataaaatttatttctaaaaagtaatttcaaatcacacccacccaccccataggctaatcannagagtatggaaacatggagggatttatcttctgggtggactctattgaag

SEQ ID NO: 131473 - DNA, 510 bp, Homo Sapiens
ctcaaggtaaactgcatagacatttgcaagagcgaagagagaagaatttctgaaaacataagatgaaaaggtatcacttttaggatcccagaggcatctgcttccaataagtatgctctgcctgttcagttgtccaatgtgaacaatcacaattagtttataccgtggaatcatcaagtccttgacctgggctttaataacccaactgataggtgttttccatctgaactgtaaggcgagagatatcatcacgctgactgggttcatccatataagacacagtactcatagaatctttgatgcgcccatgaatttcctttcgccaaaattcatgattacttagagaagaaatactccctcttttcttccatgaatgagctgtctgcctttagcattgtctgacatcatcataacctgcagcaggggagttcgcccggagcctccctagactccggtactgcagacactcgccggcgctcccgcgtcccaggcttcattcaccggcggccc

SEQ ID NO: 131474 - DNA, 895 bp, Homo Sapiens
  misc_feature (549)..(661): n is a, c, g, or t
  misc_feature (671)..(831): n is a, c, g, or t
aagttacaaagaattgtttataaagaagaagaagaaaaaagcaaacccaaccaagctcaagcctagatccgtatttggattcagctcgtctcggggcggagccaggcgtcacggcctccggattaaagtatccccccggggagtgtgctctgtgaatctgggtggggagggcgctcggtgctgttcccagcaacccaccaccctcctcctagtgcttgcaagaataggcagggaactcagctgactgcatcagaacctgagaagctggaggctgaagccagacaccagcctctcaggacttggggacactatgagcccactcagccccacaggtctgaatctttggggaggggagggttccagtctgcactctgcccttgaccatcagggcagggggatcacactggctatcggcatcatctctagcagtttctccagccccagccctagaatcaggccaagctctcagcactgcgtgggtttgatcttgaggattctttaccaccatccaggactggggggctgccgctcatgggttttgttgttaannnnnnnnnnnnnnnnnnnnnnnnnnnnnnnnnnnnnnnnnnnnnnnnnnnnnnnnnnnnnnnnnnnnnnnnnnnnnnnnnnnnnnnnnnnnnnnnnnnnnnnnnnnnnnnnngtataaattnnnnnnnnnnnnnnnnnnnnnnnnnnnnnnnnnnnnnnnnnnnnnnnnnnnnnnnnnnnnnnnnnnnnnnnnnnnnnnnnnnnnnnnnnnnnnnnnnnnnnnnnnnnnnnnnnnnnnnnnnnnnnnnnnnnnnnnnnnnnnnnnnnnnnnnnnnnnnnnnntagtacaaatattttaaggaaaatgcggacgcgtgggtcgacgatatcccgggaattccggacc

SEQ ID NO: 131475 - DNA, 1649 bp, Homo Sapiens
  misc_feature (1631)..(1631): n is a, c, g, or t
gccagtctttgtcagaaaatatatttattattgatagtgagtgaagtaaagatgtgagtattcactatagaggttttatcagccaaggttgccttcatattgataaaaataccttatctcacttgtaatcataaacattattccagtagaagaggtacattttctctcctttttgtcttcttgcctgtataatcaccataataagttataatgaaatagctcttacataatcaaaggagaaaagaaagacaaaaccaacatgccacagcctagacaattccatccagcactgctgcctccagatctgttttctggctctctccacccagcactgctgccctcggatctatgttttctggctctctcctcgccccactccaattaatttagcccccaaccccatcctactttgttagggtggaggttcaccaaatgatggggcttgttcagaagagaaacattttatggtcagtgcaagttgaatagaaagtaccaaaaggtggagagggctgcccttctcttttaatcatcataagagggtttactaatactcaagagtgtcctttaatgactgatccctgatcaaggctttggcccttcaaactgctgctgttcaaaacgtgaaatgattctgctgaatccattcttgatgtctctctttagtggtcttctcattagtggtcttctcttcaaatgggttgttttctcactaggaaaaaaaatgttccatctctggaattaacgttgatggtgttttgctcattctgaaagtttttatcctcccttctcaagcatgctctgtttggcatgattgacacagtgcatatactgggtggccagagcggagcatttgagggtctggtgggtgttctcacggtaacactgaagaattttggcctgcagatcagcacagactggatgagactcatatcgcttgaactttgcttccacctcttcagcagctttctgatattgttcagtggtgactctgtagaactctgagctcctctcctccagtctagccagctgttctttgtagaatgcatcctgcttctttagcactcggtctttctcttccagctgcctagccaggtgctttgccttagcgcgttcctcctcgctacatatcctctcccgaaggatggctctggttaactgctcattggcagcagccctctctcggtccagctctttggcttgctttagtcgtttctgatcttcggattctttcttggcttgctccaatgccagctcctcagctactcttcttttcaattcttcatcagaaactgaggcaccataagcaccagaataccgctgagacttcgaaccagatggagaggattccttcattcgatcaatcacattttccgaaagccggatgcccttcaccacggtgatgttctcattctcgtccgcctcgaaggtgacccggcgggtgctggtggtcccacccatgattccggttcctgccccagcggagacctagcggggaaccacgagcacttcggggcccccgcacccacacgcgcgtggaagggcctggattcttttcccgcacagcgggagcaaggccacgacccccagaagcaaggagaagaccggacgcgtgggtcgacgatatcttgagnttccggaccggtaccagc

SEQ ID NO: 131476 - DNA, 1021 bp, Homo Sapiens
  misc_feature (66)..(143): n is a, c, g, or t
  misc_feature (966)..(966): n is a, c, g, or t
gaagttattgagttggatttattgtccttgggagtaaaaatcatctggatttgaatattggcttgnnnnnnnnnnnnnnnnnnnnnnnnnnnnnnnnnnnnnnnnnnnnnnnnnnnnnnnnnnnnnnnnnnnnnnnnnnnnnngattcgttgtatggaaagtacctaacattgtttggcatgtggcagactactatttagggataactactttatccctaaatacttagtgtgtatttcctaaaaacttcactgtgtatttccttaaaacaatggcatttattctcttacatagctttggcacaattaccaaaatcaaatgcctgctttcctcctctctgacagtttgggctgtcaggtccatttcactgggcctgctttacctcctcaccagcctctgtcctcttgagttaccgttttcttgcttcccatttcctgatggcagagcctatttgtccatgtcctgctgcagacagggtgttcattcattccgcaaatgtttactgagtattcaccaggtgctgggtggagaaagaagacttaaagattccctagacatctcctctcccctagactcaggaccatggcacttattttctagtcaatattctggtctccagcatgtcaggatgattaatgatggtgtcaagcttgtctccctctactttttcccatccccatggatataaatagaggtgaccttttaatccccctctcaatcaggtggagacgattggggatgcttacatggtggtatctggcctcccaggccgaaatggtcaacgccatgcaccagaaattgctcgtatggccctagcattactagatgcagtttcttcctttcgcatccgccaccgaccccatgaccagctgaggctacgcataggggtccatactggtaaggctgactctcactccagccctagtctccacctttcccagactctcccaacctgtttcttctcanagggccagtctgtgctggggttgttggcctgaagatgcccgttattgtctttttg

SEQ ID NO: 131477 - DNA, 795 bp, Homo Sapiens
  misc_feature (664)..(664): n is a, c, g, or t
  misc_feature (691)..(691): n is a, c, g, or t
  misc_feature (703)..(703): n is a, c, g, or t
tttttttattattgttttatatttgaccaaaatattctggtttagatacagatatttacagaaagtagggaggaaggggaccaagccagagagggacaggtatatgtacagggctgagctgcagagggctacaacttccatataaggtaggtttttttgtggctgttttccattgcatatgaaaatgtccatttctggtgtgtgcagacatggtggccattgcccacccaggtaccagcagcagaagactatctgacttggaaagaatgggggtttacaggagtccaggaggtcctttccgctctcctaagagccagtatgttcgcatctttccttttcccttcatttccacatccccccgaagctctagctggaagcatcctagctcatctagggcatccttggtggtagaggagacatggatcttcagcgcttgaccattagactccattcgagaagcagtgttcactgtgtctccaaaaagacaataacggggcatcttcaggccaacaaccccagcacagactggcccagtatggacccctatgcgtagcctcagctggtcatggggtcggtggcggatgcgaatggaagatactgcatctagtaatgctagggccatacgagcaatttctggtgcatggcgttgaccatttcgggctgngaggccagataccaccatgtaagcatncccaaacggctncaacttgtagacatcaaagttgtcattatggcatcaaagccagtatacaggtcattaagagtgtcactaccttcaatggggtgcttctgctg

SEQ ID NO: 131478 - DNA, 1049 bp, Homo Sapiens
  misc_feature (155)..(155): n is a, c, g, or t
  misc_feature (852)..(862): n is a, c, g, or t
  misc_feature (869)..(944): n is a, c, g, or t
  misc_feature (971)..(971): n is a, c, g, or t
ataaattaaccgtggaacaggagtttatgtctggaatagacactgataaggtcaacaattacattgaggattgtatcgcccaaaagcactcgttgatcaaggtgttaagactagtttgcctccaatccgtgtgtaatagtgggctcaaacaaaanagttttggattattacaaaagagagattctccagacatacggctatgagcacatattgaccttacacaacctggagaaggccggcctgctgaaaccgcagacggggggcagaaacaattacccaactatacggaaaacattacgcctctggatggatgatgttaatgagcaaaaccccacggacatatcgtatgtgtacagtgggtatgccccgctcagtgtgcggctggcccagctgctttcccggcctggctggcggagcatcgaggaggtcctccgcatcctcccagggccccactttgaggagcggcagccactgcccacaggactgcagaagaaacgtcaaccgggagaaaaccgagtgactctgatatttttccttgggggcgtaaccttcgctgaaattgctgccctgcgatttctctcccagttggaagatggaggtacagaatatgtcattgccaccactaaactaatgaatggaaccagttggatagaggctctgatggaaaaacctttctaggatgttcagaggagacttaacaagtgtactgcagaataaactacctctttgaagaaattgctgaaaggaagtaaaaccccatagaagaaacatgggaatacagaatatattctggggtcagcttcttaaattatactactgtttactgctttctccgtctcttttgtattcccnnnnnnnnnnncctttgnnnnnnnnnnnnnnnnnnnnnnnnnnnnnnnnnnnnnnnnnnnnnnnnnnnnnnnnnnnnnnnnnnnnnnnnnnnngttcaggcaattctcctggctcagccntcctgaagtagctgggactacaggcatgcaccaccacacccggccaaatttttgaatttttaagaagccatggtggtt

SEQ ID NO: 131479 - DNA, 1082 bp, Homo Sapiens
tttggtttcaaacaagtaattttatttaccttttcatgttttaccaacctgtcctccccctaggccttgagtgttttcacgttttcctttcagtgtttgggagctggggactactagggtatcagcattcatttccgccggcgggccccccgcccaggtttcttttctcctcggcgccttcgggtgggggcaggaggagcagagggagttggggatgggggtgggggggcccggccgccgggcgggccccgctcccttgagcaggcttgtaaaccaggtggaagatgaaggcattgcagtaccaggacatgcagttgtcggccgctctgaggcgaaagggggagcggaaggggttgggctggggagggctggtgccccctccagtggccaccgccatggtctggccgtccatcacacagctgtactcgctgctctcggtgaagaaggctggcactcggagggactgtaaccggggcagaggcctcagccacgtatccttgagagcaaacccggagttaaatccaataaccaggtcaggcttgggcccctggaacaggtggtagggccttgctgacaccttgatctgcaggtccctgcggccccctttctccttagtgccagagctgggccgtgctgatatgccggaaccaggccggacagacacctccaggctgtccctctgcagggtaaaatgctgctcgtcgctttcggggggcaggccatcacctacaaactgcagctccagggccacatgggggagcaggaccaaaagctcccaaaacaccatgacaaggtcaaactccttcccggcctccaccacgtggatcttcagtgactgtttgttttggatgttgagctcagggaaggactggggcaccaggtgggtgatgacgtagtacacggtcagcgggtaggtgagaagcacggctatgggggagtccaagctgaggccccgccatgtgtagtaatcctgccatgagccaaaaacaccccggggttgatgtgggggcacaggaggcatcagggcagtcccgtctccctggagaagctggtaggggtctcctgagaggatgaaagaagga

SEQ ID NO: 131480 - DNA, 1005 bp, Homo Sapiens
  misc_feature (680)..(680): n is a, c, g, or t
  misc_feature (701)..(701): n is a, c, g, or t
  misc_feature (711)..(711): n is a, c, g, or t
  misc_feature (754)..(754): n is a, c, g, or t
  misc_feature (760)..(760): n is a, c, g, or t
  misc_feature (810)..(810): n is a, c, g, or t
  misc_feature (817)..(817): n is a, c, g, or t
  misc_feature (920)..(920): n is a, c, g, or t
  misc_feature (970)..(970): n is a, c, g, or t
  misc_feature (994)..(994): n is a, c, g, or t
ttggactccatatgactttattttctggggtggaggagaaagcgagccacctcagctgcctcatcatgcaaaaggtagagattagaccccaggaaggacttcctttggcttagggcatccttctccctgcagtcaccagcagggggcgccacaggccagcctgtgggacccactatctgagaacggggttgtcacccaggagtgagtgaaggtctggccagcactgagggctctggggtgcagagaagttaggagatccatcaaagcagccagaccacctggtgggaggcggcacacactctgccagtccggacacgggttagggagtggcatcacattccgccgagtcattgcctgcgaagactaacgtcacctctgatgtcagggctccaaggggcttcgttccagctccaggctccaggaaagggcgtcgcagggcccagaggttacacaacttcccccaagatcgctgtggaaatgactggcagagcagggattcaaacccaggtccctgtgggtgcctctgcccagccgcctgcagggtctgcaggtggccatgtcccacgtgtcacctttacagacccacagctgagagccggcccggccttggcctggcttccttctttctcatctctaaaaatgcctttcattctaagatctccttggcagcttcataatanaaagaagcttctgaaaccganatgtttttanatgaattcaagcccaagtttctgcaggggggtgagggatgcangatgangggtagtcttgagtatgaaagtacatgcatgatgcgagagcctccactgnactccanactcgcgctgccgggatacagggccctggcgatctccgaatgtctcttttgaagtcacggtcctgtatctgatgcttcagtgggtcatatgaaatctctttgnatgagtatcaatcgatttgtccgcgacaaagtcctcaatccttttgagantggtccactgtatcagactcggangaggcagtgtg

SEQ ID NO: 131481 - DNA, 817 bp, Homo Sapiens
  misc_feature (773)..(773): n is a, c, g, or t
cactgattctgcagaagctttatttattggtggattcagattcagcgtcccgactcagttactccagtaccatcagccaccaccacacagatggcctcagctcggatggccccataccccaccctagcgacccacgggtgagtttgctgagtatgtgagattaactggtggctcagtggtcggctcctctagtggataattccattcaaagccaatgctcttgatgccaaggagttgatactggccatagatgcccaccagcacctgcccctcttggctggggtaggcagaggagatctggccatcaagcttcccaaaatagaaatagcggtccttgctggtgtacatgaccataccccggaggaaagcttggaaggcgacaaagacttttgtgatgtattcgcctggctgcagggtgacttcctgggtattcccacctaaggctcccagtttcacgtcccaggagtctccaagtttcacctggacacttttcaccaggagaagacctacagacacccgcagccctgtgatttcatggtcgtagtcttcagtggtgctgaaatacttgcctcctccagggccatacatcttccctgcccaggtggggccccccaggagggcaagcgtgagcagcagcagcatggcctctggccggtgcatcccagggctctcgcctgtgactgggcgtctggttgtgccgggcaccctccacatcgcctttatactctcctgggccccctgggcccccatccagaaggaagaagcgcgacgcngtgggtcgacgatatcccgggaattccggaccgtaccagcctgc

SEQ ID NO: 131482 - DNA, 416 bp, Homo Sapiens
caatctggaacacaaaagtttattagaataaaaatacacatacagtatcaacactaaaattatttcacatcgcatttaggttttacctccattagttttttttaatgcttataaagtctatgctctaaataatttgcacatttgtaaacaaatcttagatgaccaaagatgcagtgtatctatcagatattgaatatcaaaacttaaggatgggaactgatagcgaaatccaattacactaaacattcctgtaaatttttggaaagagaggaaaagattaaaataattcacttgaaatgaggtaagatgtatatgaaaaggtttttagtagcatatatcacaatgttgagatgagaatattaaaaacattcatggaaaattcactttgatgttttgcatagtctaggttatttttt

SEQ ID NO: 131483 - DNA, 993 bp, Homo Sapiens
  misc_feature (783)..(783): n is a, c, g, or t
  misc_feature (791)..(791): n is a, c, g, or t
  misc_feature (802)..(802): n is a, c, g, or t
  misc_feature (809)..(809): n is a, c, g, or t
  misc_feature (839)..(839): n is a, c, g, or t
  misc_feature (851)..(851): n is a, c, g, or t
  misc_feature (935)..(935): n is a, c, g, or t
  misc_feature (939)..(939): n is a, c, g, or t
  misc_feature (943)..(943): n is a, c, g, or t
ggaggatcttgaaatctttattgagccaattctctcaggccccaggccctgatgatgactgtcaccccaacccctttccccacaggaggcattcagctgaggccaccacacattacatacattcacgcacttcataaaaaacacctgagggagagaccctggctttgattagcaaataaggtatgaacctgggccagtgcccacattcacacagaccctggcccagggacatcctcctcatatgaagcattaaggcacatgctgtactgtgagccagcactccctgacctcagggtgtgtgaggagttggcactgtaaagagaaaccaagactcttcctcaatgcctgccttattctgagcacccacccttagctctgataaggatatcctgagaccacattcaagatccaaaacctttcctcatagatgagggccgtcacccctgcaaacatgaccctgttctgtttgcagggtctccaagattttcacttctgagacaaaaattgaggagacttctgtctgcaccactcctgctgcaggcctggagcagcttctcagggcagccctggcccactaaggcccagtaatgagggcagaggggtgcagagccatacctggctacacccacaggtggacacagggagcaagctacttcgctgttctctgggctcattcccccagcacaggagggcctccatgcacactcattccacagggccccactggcctgtcacactcagacggcacgcacttggcgctgcctgctgtctgccttccactgngggtacangaggcacccanggggcangcgtgcaggctctggatctctggcgcatangatactctgcangtctgcggagtgtctccctctccgctgcagaactaggagtatgtttaaggcagcgagggtccatcactcccaatcatttctcangcanctangctgtacggctgcagaggcaccagggtgtcacacaactcgcatactggcg

SEQ ID NO: 131484 - DNA, 2063 bp, Homo Sapiens
  misc_feature (164)..(239): n is a, c, g, or t
atttgggtgggagagattccacaggccctatgttcactggccacaggattcttccttggagaacacggtattggccactgtttcccttaacctactggggcccgccggcgccaaaagagatggtttagaaaactttttcgagggccgagggcggccgacaaggnnnnnnnnnnnnnnnnnnnnnnnnnnnnnnnnnnnnnnnnnnnnnnnnnnnnnnnnnnnnnnnnnnnnnnnnnnnntaggaaaagggactttattaaagaaaagtcatctgtgagtgactagttaaattagcatgcttgacattaactctgggttgaaacctacctccgtcaaataacaagtggactctccaagcaaatgtctacacggcaattcaagcagcaactcaagagcccagaggagcactggagacgaggccatcactccacttcccagtgcgacaaccacttttttgtaaacacctgtcagatgctaaaaatacggccttacacactaccgtcaccaaagtttataagcaataagatcagagagcaggagccgctgcagcacctctaacagtccagggctgaggcgctgaaggtgagtttccaggtgaggtccactctgcccggtctcgggccgcaccagggggctgctgtggcctgatagccgagtggaacaacgccacctacgtgcgatttagtgtctggaagattctagagatctgcagcatgacaggccccgtttctggatcattcatccactgggtgctgttcagtgggttctccagcatgtcttcaaatgctagcaatgttttcgggttggtcaggcccagctgcaccaccgggttatccaggatggcctgaaagagaggactgtcggggtcgatgcccttgtccagctcctccggagagggcttccggtcccccagcagccactcgcacgcggcattctgctggttgttgttcactctgagggcatctatcacctctttctcgtcgaaccccatctccatcagggaaatgacggcccgagcatcagcccgaaactcccttttcctccggatcttcttgaagatttccgtcagctcatctctggcctcctcatcggtggcgctggctcccgcggcagcctcggaggcagctgctgtggccccctcggcctctgggggagcttggccaggaagaggcgtgtctatggtcgggtcttctgcgtgttcaattagccactccatggcctgaggcaccgacatgtggttcagctgaagggccttggtggctctgttctccggaaagcccatctccgtgagctgccgcagggcagcctcgtccacacgctcatcctcgtcctcgtccagcattgcattcgccttcttaaacaattccaccgcatctgggttcagcgctaacagcttctgcgccacctcgatgagagacaccagtatcttccggagttctgtctggaagtctctcatgttggtctggaccgcggcccggtccatgttgtaggagggcaggttggcggtggcccgcagtatggcctctttatctggagctttctggtcttgttttttcttttcttctgctgagacatcagccatcttgggaagtggtgatggagcacgcttttttatcaataataggacatcttggtcctggatgttctcttccaggatggtcctggcatcactcagcaccctctctgaggcagcgtggattaatttatgatgggttatacttttgggatcttctaagctcccatgagcacagtgcttgaggcagcgctccttgagcttctccaccgaggtgtcctcggtggcctcctccagccactcggcgccgtcggacgcgcagatgtgcagccgcagcaccttgcccgcgaagatcttctcctcctgcacgaacatcccgccgccgccgcaggggcctgcgcccgccacccgggcccctgaaggtcaccgggaaggcgggcggggagggggcggggccagacacgcccgcgcgctccttcgctgggccgccgccccgccccggcatcccgtcggccgggccagccgtcactctccgcggcctcagcggtcg

SEQ ID NO: 131485 - DNA, 642 bp, Homo Sapiens
  misc_feature (13)..(13): n is a, c, g, or t
gggcacacagggnacctgcagagggcgcagactgcagcagcagcctccccacacagtgggggaagagccactccatccccaaattcaagattagaaagatccctgactgcttctcaagatccagaacattccttgacagagtatattcaccatttagaagtgatccagcaaagattgggaggggtactaccagattctacttcaaagaaatcctgccacccgatgattaaacagtgaataaaatgtcatggctctttcctgcgacaattctatttgaggaaaagatttgtttttcccttttcccaaggaagctcgtgggacagcatgggcactactcttcatgtgcggtgacaccagcccccagatgccttgaattaagtgtcctcacctttatgcatgactgcaaagccagctggagcattttctatggagcctccgtatgttttaggcccatgaccttcgtgaggtgacgggcactcactcccatgagccctggctgtgtgctgttgtgtgcctatcggcagatccatccttcctgcctccaaggaggatacacagagaatggcttcctgttgttttgtttattttcttaacgtgtacagatggaaacttcatttaaaaataaaaacaaaacaactcaaa

SEQ ID NO: 131486 - DNA, 1509 bp, Homo Sapiens
  misc_feature (23)..(23): n is a, c, g, or t
  misc_feature (35)..(35): n is a, c, g, or t
  misc_feature (108)..(108): n is a, c, g, or t
  misc_feature (1418)..(1452): n is a, c, g, or t
cgcgcacacgcggatcgtgcgantcgaggatatgncaccatcgtggcggcggacatttcgcgaagttatcgcggttccaacgcagcgaatttatggacgagagggganactcgccccattggtccggggccggaaagtggcttctagatgagagttttaccaacgcacattggtctcgccgataggagatgggccaggggggggcggagaaataaaggggggaatattgcggggatgggaatatgggcgctccgggggtgggatagatccgcagataaagggcggttggggagcggccaatatgggagttgggtgaaaaaacagcgtgcataaacgccccggagacggtttttttgttgggtggagaatcccaaagcccgtagttcatcggccaggggatcttcttagggaaagcaagttatggaccaaggttcgacttaccctagggggggcccggcgcgcgcaaacggaatgggtctagggaaaattctctgagtgtacggaggcaagccaggcacgggcgggggggtggttgtgggtaggttttggggaagttccaaagaatttattatcaaaactaaaacaaaacttcagttgtacataaagtaataaactttacaacagctgttaagagaaagtcgtgatgtaagtttatacatattaccgaaggcaaagaggacaagcaaaggagagctccagttggaatgttgattacattcatgcagcttcctcttgatttaaacactcatgacacattgaatgaaatcatcatatgggaaattcacaacaccttgctgagcagtatcccgtcttcgaaagctgtctgtaagagccctcagtttgacgcagcaggcgatgtagtcgtcgaaggtgatctttccattggtgctgtatcgttttgcaattgaattcacagcctggggactcaacctaaatcccattgttgtcagggccttctgcaattcttgtgggtctactgttccactcctgtcagtgtcaaaactgataaagtgttgtctccagccattcagtacagcccagagttctttaaattcattgaaacccattgtgccagacatatctctatccagcattgaaaccataagccggcaagtctccaggttaaaaggtttgtatcctccagcaatgccagactgtgtcagacatctctgcaattcatcagcatctatctgcccatcctgtccagctacagcagcaaagtaaccatacagcggatcctgagtttgtccgggaaacgcaggccctccgggagcccctccatacccgcctgggtagtacccgccgccggcgccaggatgccccgggtacgccatgctgcagactgcgccgcagccgccctcgccctctccggccgtaatggccgaattcccgggcatatgtccggtaccgtcgactgnnnnnnnnnnnnnnnnnnnnnnnnnnnnnnnnnnncgccgcttcctcgctcactactcgctgcgctcgtcgttcgcattaagagccgagcgg

SEQ ID NO: 131487 - DNA, 664 bp, Homo Sapiens
gaaaaatggtaaatggatttacatctgttttattgtaccttagccttttattttaaagttaaagggatgacttttaaaagcaggacattccctacctttaatagtgcaaagcacagtttcagcaatggctacatgactatgtctaaaaactgaatactcagaatactaaaggtttggtgcttaaatttatttttcccatgccagagaaagcaagctttggtatggtaaaccacatgagaacatggctcctttctttttggatagcctggccatgtgtgaatgggattttagcttattatgtttctaagacttttccttacagcacacttaatgtaccttttcagtccttctcccaaccccctgcaaattgtcttttaaaacaacaacacataaggaatctgaagcacaggagaacacagagccaacaaacagaatgaagaacaatcatctatttttaactgactttctatcattaccatttttccttttgcttaataactatcttgctttgaaactttgactccttttataagttctatgaggcacatatgtatagcaatttggttctaaaaaccagtgatcttactttagctccatcttaaaatttcaccttaagtaaatggcctctagtagatgataagcctctacctgcacgacaacacat

SEQ ID NO: 131488 - DNA, 665 bp, Homo Sapiens
  misc_feature (553)..(553): n is a, c, g, or t
  misc_feature (575)..(575): n is a, c, g, or t
ttttttataaaacacagtatttattgatttcaaggaaactgtcttgaggatgttctatcagcgcatccacccaagtccctgggagcagggtctgaaaggctggcaccagcctgagcacagttgtggggaggaagatgggagcaccactgcctgaggctgagggagtaggatttggggaaagagggcttccactgagccaagtgatgacctgggggacctctgggtatctccagaacctctagtcaggttcattctcagccctccagacctgctgctgctggaagacctcctctccactgcaggaatctgggcggctcctctggagggagtagagatgccttaggtctgctgaggctagcccagggcgagcatcactttttgtgtggcctccagacctctgtgctgctgttgtgtctgcttgggagcacttctcacctctcttacacattatgtcctcagggaagcctctcctgatcatcccttcctgggttgatcccttcctggttgaagccctgctagcagtgccctaagtggccccttgcaggcagcgtanatagttaattcgcttgtttcanagtctatgtcctttgagggctggcactgggcctgtgggttacctatacccggctagacagcccagttcccagtgtcaaaaaatatctgcc

SEQ ID NO: 131489 - DNA, 1084 bp, Homo Sapiens
  misc_feature (592)..(592): n is a, c, g, or t
caattttaccaaattctttattgaacaaaaaatcaacagcaaacattgtcaaacaggaagctcaaacagggcaggtgggtagggctgaccatcctctccttgcagtcccacctctctctggaacaggcttcaacactagtgagggcatcaaaacccctgttctggtgggtaaggagggtcaggcctttctagggaagggacactcagagccagcttcatctgtaggccccaaagaggagtcacgggctgggccagggggctctggagctgcaagggcgctagacaaacgctgcagagggcgggggatggagctcttggtctgggggcacagtaaggcttggagctggtgactcatggtcgccagggattcgaggtgccggagcagggcttggtggggacaggagtccctgtggaagtgctggccacggccaaagccatgaccagctggtgctactgaatagggatgctgggactggcgcaagcctggctctgggggccactgccctcgcccaggatgctgccagttttcaggctctggccagagcctccccctgcctctggggggcctctgccaagcagagattccccttgngagctatactgcccctgccctggctctgctgccaggcacctcctgggggaggggtgcccttcaggggcacattcggcctcctgtcatctggctgatagtatctcttctccaccttactgttgaaggagaccatcttttgaaccttccccaaccaggggctggaccctgctgtgtctggaagcccttccttggggagcagcacagccagcaacagacttgagtgagtgacctccagacctgggccccccaaagggcgcagcctggtgggcaggggctggaaggcaggcaggggcagcaggaccatccccatgtgctccacagaggccagcccgtggcgctgcctatcattgaggtatgagtagagcaggcggcagttctgggtgtcccgggccccatgtgggcacagtctgaccacgcagacgtccttggccttggctgggcagatgctggccagaaggtcccagacaatgttggaggggatgcagcctgccg

SEQ ID NO: 131490 - DNA, 1706 bp, Homo Sapiens
  misc_feature (1628)..(1628): n is a, c, g, or t
  misc_feature (1650)..(1650): n is a, c, g, or t
cgagatttaacagggggtcgttgtggccgctctctggaggaggggcaaccgattgtgtgtggagagcgaggacccgccccgtgtggtgtccctaggttaatggttcgcgcatggagccggtgagccataagggtcaaagccccgtcctccgcggacaacagcttggggacagcacacatcggaaccgggctcttgtaaggcccgtggtttttctgccgcaaccggatgccaatgtgaaggcacagacggaataagtccggaaggctctctgcagctcagcccgctgaggacgcagaaaatggggaaggcccgggcgtgtgagcgcgtggcttcaaagcaggacagcgccttgactcacggtgtccatagcgtccctacacgcgcctgcgcttcctgggcagcagatggcctggctgtctgggaagaggcgctgtggacagccatggaggcagaaactttgtggggttgcatagaggcttggcgaggccttacctgagtaagagatttcagaaacggaaggagaggatctcacgcacagtaggctttgtacactcaacccatgctgcaaaaaccactctagactcttggaactcctgggacttgttcatacacagctcactcagacggctaaggaaagacagactcccaaaagatcaaactagctaaaagaagcccctctgccatcaccaggaagaatggacccgtgttggtggaatctggaggtttattttctgcagccctgtgccttgggcatcacctggagatgctgtgtagtgctgtcgtgggcgtctaaatttcttgaggccacaaggagtctcatggctatagagagggtctaggggccaatgtcacctggcatgttggtcacattcccaggaccacactgcctctgggagctgaaggtccctggcagcccaggagccctggaggcagggctgggacaggagctaggagagttcaaagcccgtgttcatgctgatggcgtagcgcagcttctcgcggaggacgctcttcttgctgtagttgggcagcttgagcaggttgaagcaggtggaggaggtgggcaggcggccgcctggctcccgcttgcggatggtgaagaagccccggaggacgctgcccagagtgtccccggtgtcctgatcgtccgacacctccacgcagcggatggagaatggaggcttgaggtaggcgaatcccaggagcgggggtctggagcagctggtcacgaacttcagaaacatagctctctcatccggtgtgaagtcggaggccagaatatcccagagccagatgatgactctgtgacttccatggaaaccaccgtagtagactgtgtgcttctttaaatcttccagatcaatctcagcattgtcgccagagatgagacgctgcagttcaggagttgagaacattcggatccactcgggtttgataatggaacggaatccgctaatgagggcagctgtttggttttttaattgagtgtgcattcgaaaatgtgccatcagatggatgtagctaattttattttcatttgtaacaggattggtcttccctccaggaatcagttcatggcaaacaagctgacccatgacgtcctcgtcgtaagacagcgtcaggcccangtcagtgatgtccgcatcatancgcttgatggaggtgaggtttttatagaactcggagtccagagaatgcaattcatc

SEQ ID NO: 131491 - DNA, 516 bp, Homo Sapiens
ccgtcctactctactccgaaatgccaacacattcccctccatgacatcccgaagtcttaatacaaatgtttgaacaaggattgggtgagaaaaaaaccttttgtattgatcatgcagggtctgcttgttgatatttcagccttgactttttatgagaaaggatggttcccaagcatgtgccatcttaattccatcattatcatggatgtttgtgctgggccctctcatctccgggaagctttatttccccattagagtcctccctattaattactcccatcttctcccccagcttgtttgccatgaactgattcctggagggaagaccattcctgttacaaatgaaaataattcgtgaccagctgctccagacccccgctcctgggattcgcctacctcaagcctccattctccatccgctgcgtggaggtgtcggacgatcaggacaccggggacactctgggcagcgtcctccggggcttcttcaccatccgcaagcgggagccaggcggccgc

SEQ ID NO: 131492 - DNA, 683 bp, Homo Sapiens
gtagctagtacgaggcctggttgtgaatcggcacgaggccaagtcatggtctgcaccggccacagcaccggtgaggagggaggagtgcattcagaaatgtttgggcacctaacagtttttacagcattctactttttgtcaattggttaaccagtaattcgctgtgaaccggaaggccccatttccaaaagcttacttagtgcaggaattctctgtgcaggccccagggagaaggggttccttctctggaagccagtcgtcttgtgtctggggcttgacctcgggtagtggtgccagggcagcgccctgcactctgcccagcatccagggactggccagatcccctccctgggctccctggccttggcatcagcctgggctcccaaactaggcccttcccaattcaaggccacgatgtgtgccttcaggacaccggggacactctgggcagcgtcctccggggcttcttcaccatccgcaagcgggagccaggcggccgcctgcccacctcctccacctgcttcaacctgctcaagctgcccaactacagcaagaagagcgtcctccgcgagaagctgcgctacgccatcagcatgaacacgggctttgaactctcctagctcctgtcccagccctgcctccagggctcctgggctgccagggaccttcagctcccagaggca

SEQ ID NO: 131493 - DNA, 517 bp, Homo Sapiens
ttttttaaaatgtgcatcattcttttattttaaaatgtgcatcattgtctcgtgctcggcgcatgcgacctcagcgtggtggcccgctggggggcctcgttcccgcccagctcccgcggagccgcagggagcaggcgcactcacgtggcgcgggcccgggggctcccgcccatggcgaggtagacgtcgatgggcacgtgcagcagcgtcaggcagtggcatccagggcagcgacgaagcggcctgaccgggttgtgctccgtcgctaccgcctccgggctgtcctgggactcgggggcggcggcaaggccacgggagtctccggcctcaatggggaatctccgaccctgcgggggctcctgggcgctcatgtccaagccccggggcgctctgcgcggggagtggcggtcaggcctctcccgggtcgccgggcgccgccgcctcgcgcccgcccctgggccgtcgctcacctcccggcggttgagaccggtcccaggctagaagcagctgccggagc

SEQ ID NO: 131494 - DNA, 1033 bp, Homo Sapiens
ttttttttggaaagaacagtttgtgctgtgctttattaaaatgtgcatcattcttttattttaaaatgtgcatcattgtctcgtgctcggcgcatgcgacctcagcgtggtggcccgctgggggcctcgttcccgcccagctcccgcggagccgcagggagcaggcgcactcacgtggcgcgggcccgggggctcccgcccatggcgaggtagacgtcgatgggcacgtgcagcagcgtcaggcagtggcatccagggcagcgacgaagcggcctgaccgggttgtgctccgtcgctaccgcctccgggctgtcctgggactcgggggcggcggcaaggccacgggagtctccggcctcaatggggaatctccgaccctgcgggggctcctgggcgctcatgtccaagccccggggcgctctcccggcggttgagaccggtcccaggctagaagcagctgccggagccctggccgggggagaacgctccggtccaggcggagccgggcaggtctctgtggcgtgcccgggcccgggcgtcgaggagggcagcattgtgacccgggccgcggcgcgctgacctcacagagcacgttcctcccactggagaacccccaacggtgccccctgccgcccctggcactcagcgcgggccagaatcggggactggaggcctctggccatggcgcctggagacggggtcgcgcagaccccggacacccgaggggggcgcagcaggccagggcaacccgccgcgaggcggcgtccacgccgaggagccgcgcattcccggtccacacagacgcggcggagcgccctcccaggcgggactacaactcaatgcctggcacgggggcgggctcggcggtgacttaatccgggctgagtttggtggtggtagtgagggcaggtaggggcactgcccattttggccaagggtcacacagcatctacatcacaattgcaccggagtttaaaaatgtctggccctgtccctccccaccacccgccgctgtgtccatcccgggaattcc

SEQ ID NO: 131495 - DNA, 1123 bp, Homo Sapiens
ggccctttttgcccccggcccggggccagcgttcaccgggccaccccgggacaaagcttgcccccggacaaccacacggggccggactgttaagattggggagccattcaagaagggaacctctggtggtgagcaggactctgcctcagaaaactcggatctcagagctgaatgaaagcataaatcccttctcctcttcaggccaaaagagccccatcatctctcctatcattttcaagacagaaagaaatgattgaacagaatttattggctgtctttgagtgtctttggtatggctttggcagggctgtctgggttcctccgctttgcttgtttttgggctgctgctgcagcctttaaggctcttcttcgcttcttcagcttttgagtctcctggaaaacccgaatgcacagagccttcttggtcacgaatcggcggtgggctcttcggtaatacagaggggggaaggtgtactcaattcccagcccccagcatatcttctcaaagacatcatagttggtgttacggaggtttttgagcatctttttcctctggtcaatgctcattagcagatagcgtttgtgggctttgtcctttcgatgtttctccaagtgttcttcataactgcggatcttgacagacaaggcaataattcgagcctccagggatctggtgtcctctgggtttgcaacaatcttcttcataaactgttcttgcttgatttttagcatctccttcttgttggccatttccaaagacaagagtcttttcacgacatcatcaaccttctcaattccagggacattctggtagtctttgagcagcgtagaaggaggtgggtcatcatccagcctagactgggctggtttccggacgacatatccgcgcgcggcctggaggaggagacttcgaggctgcaggccccactggttgaaaggaaacttggcgctcccaccgcccggcagcccgggtactaggacctgggtaactgcccgggtccgaatcaaactcagcgtcctccacgcgaccctcagcatggtgacctctaacccccgcggggcccgcgccgcgccgccattcgctgtgcgcacctcgtgccgattaacacggcctcgtactacc

SEQ ID NO: 131496 - DNA, 927 bp, Homo Sapiens
agaatttattgggctgtcttgaagggtctttgtatgggcttgggccagggcggtctggggtccttcccccttgcttgtttttgggctgctgctgcagcctttaaggctcttcttcgcttcttcagcttttgagtcttctggaaaacccgaatgcacagagccttcttggtcacgaatcggcggtgggctcttcggtaatacagaggggggaaggtgtactcaattcccagcccccagcatatcttctcaaagacatcatagttggtgttacggaggtttttgagcatctttttcctctggtcaatgctcattagcagatagcgtttgtgggctttgtcctttcgatgtttctccaagtgttcttcataactgcggatcttgacagacaaggcaataattcgagcctccagggatctggtgtcctctgggtttgcaacaatcttcttcataaactgttcttgcttgatttttagcatctccttcttgttggccatttccaaagacaagagtcttttcacgacatcatcaaccttctcaattccagggacattctggtagtctttgagcagcgtagaaggaggtgggtcatcatccagcctagactgggctggtttccggacgacatatccgcgcgcggcctggaggaggagacttcgaggctgcaggccccactggttgaaaggaaacttggcgctcccaccgcccggcagcccgggtactaggacctgggtaactgcccgggtccgaatcaaactcagcgtcctccacgcgaccctcagcatggtgacctctaacccccgcggggcccgcgccgcggccgccgttcgctttgcggcacggaccgggttacatgggcgccgccatgctggcccaggatcgaccaatcgaggcagttgcaataccggagcagacgaagaccgagagaat

SEQ ID NO: 131497 - DNA, 160 bp, Homo Sapiens
cattgaacagaatttattggctgtctttgagtgtctttggtatggctttggcagggctgtctgggttcctccgctttgcttgtttttgggctgctgctgcagcctttaaggcccttctgtcgtcttctcgcagccgtatagtagtagtagtagtaggcgg

SEQ ID NO: 131498 - DNA, 820 bp, Homo Sapiens
  misc_feature (642)..(642): n is a, c, g, or t
  misc_feature (761)..(761): n is a, c, g, or t
catgattcaacactgatcagtgtttaccacttggataaatctgagttcacactttccttctctgacctaaatgtgaagtcaggaaacacatgtgccctacttccatcctgagctcagtccccaatctcccaccagcctcaggcccctccacttctcagatcaggtcccagacctgcccatgaaaatggggagcaggctgtaacagatttgtccacatgttcctaccacctgtcccaacccagggtacccacccagagacatctggtatcatttaacaaacacattgaaggacaactggtcttcagagctgaagagagctcctagggggagaagctgggacaacagtgaaataagtagcagcagcaacgacagaagtgaatggtgacaaagactgctgtgatgagcaggtagcctatcagggtgagctccacagccgagcgagtctcaggatctgagaacgaggctgggtagtgcccatgagatgtcacacccagccggaagccagcaactagcacaccctgcctccagcaatagtagatgccccggtcatccagctgggtgaagcggatgtggagctggttgccgtggtcaatgaacaccctcatggacctgttgacacccttcaggtactgtgtgcggtanaggtgctggcggtctttgtcccaggccactgcatgctctggccgggccccaggacaggagatgatgagtccatggcccagtctctgctggtgggactgaatgggcacctggggcaccangggcggctgccactttggacacatattatgatggcagacgcctccggatggcttgtctc

SEQ ID NO: 131499 - DNA, 722 bp, Homo Sapiens
  misc_feature (119)..(119): n is a, c, g, or t
  misc_feature (711)..(711): n is a, c, g, or t
ccattgcattttaatttcattaaacatattttagttctacagtaacctaattcctcattgttaccatgagatcctaattctgtagctgtgttctgtaatcccatggggcgtgtaccatntggagacacatgaaggatacagtagacagcacggaaggcagcagcaacacacaggggtgtcctccctccccagagcccagtgtgcacacagaaccaaattcaatctcattcatcgtgagcttgcatggtaactgatccagccactcagtacctccattggataagagatttggccacagattcttctagagaaaatccaaatgtggagggtgcatttgtttctgcacccaaacaaataccttttgagatttcttataggcattcctctcgaagtctcattactctgatcagttattgatcggaggctaccctggctcagtcaccagctgctcactgtgtccttctgtggtctcaggagctgcagttgttgctgttgtatgaatagacgatagttaattagactggatgtgtctgtactggcagtgattttgcaacttcctctgtataagcgatacatttgtaaatcatgggaatgtatttgatggtaattgcctgtggtggttgtatcatgatttaattttattatgagcttttggctttatatatttttctgcctttttatgcattcattaaacagtttaacagaccaaanatccaaaaaaa

SEQ ID NO: 131500 - DNA, 1324 bp, Homo Sapiens
  misc_feature (601)..(614): n is a, c, g, or t
  misc_feature (1054)..(1054): n is a, c, g, or t
  misc_feature (1157)..(1157): n is a, c, g, or t
  misc_feature (1175)..(1175): n is a, c, g, or t
  misc_feature (1239)..(1239): n is a, c, g, or t
  misc_feature (1266)..(1266): n is a, c, g, or t
  misc_feature (1268)..(1268): n is a, c, g, or t
  misc_feature (1279)..(1279): n is a, c, g, or t
  misc_feature (1288)..(1288): n is a, c, g, or t
tttcaacccggaaaccaaccacatttttactgcatctgctccacgctggattccaacatgctggcccggagcgtggctggctggaagcaactccaacaggtttttcccttccccgtcatgtacattatttatttttgatcctactcactgtcccaagtccagaggcagttacaaaaaacactcttgatgcaaaccgtgagtggctacaacacacggatgggggtgggcgcgattcccacaacagggagtggaatccgggaagatgatatataggggcaagacgcccccttacttgctaagagtatatggagctcaaaacccacaattgctttgttttgtttctcagttcctggagtatgttgaaactacttgctcttaacattagttcgtatttttcatcagatatctgacctgatttaaaacatgtttgtttgcatacatctttttgtagtgcaccttatagttattcctactgatataggatgaagattataaatatctgcataaaaagagaaaccatgtgactctatatgaagacaaccatcacattccacagcacatcattggttcattttcgaattgtcaagcagtatttgaaatnnnnnnnnnnnnnnatataactgaacacaagcaccacgacaaaacattcataacaacagaaccaaacccaacttctctattattaatcatgttaaaattttagctttgtttctaacacttttctttacttgttattttaagctccagtagcaggatcagatttctgctgcctctaggcaaatgagttatgatctgatctcgagttccaagggaaatgctcaaagttttatttttccccagttgaataaacagtaccatgtatattatctctcgtgttagaatagtgttgtcttcacataagactcaaataatggtattagtcattcatttccctgaacacagacaccctcatgcgtgctgacaggtttataaggatgcggtggcagccgcgggttctgggagctgctagacggccgagtttgatttcttgcagtcctgagcgatggagcccggnggtgcctggttattgtccgctttctctctcagatgcttggcttgtttttcaagagaactttttcgatatcattgctcatcgattggatcagtcttgttcaganattgtttcaggcacttanggctgctgaagcctgaatcttgctaatatccagttgttttgaggtgtctggagacagggggatngagactcttttaactatgctcactgtnanatgtcatcaangagtcctgncatgtactatatcgattggaataacgagaaagtgag

SEQ ID NO: 131501 - DNA, 1007 bp, Homo Sapiens
gtctaagtttggcaagtcttgcctctaagatagcctttcgcttttcctttatgttttctcgttttgttctctgatctgttgtctgttcacgcagcatctctaaggttttcatctgcttgtttctcaactctttgtctcgggcaaaggcaaaatacccaacaccaagttgccgggcctcattttcccgaatgtcttcataatgtacgggccccatgggcctcttcagggcctctctttcttcttcctcccattgctggcgctgaagttcttttctcatatcttcagataatagggttttttcattagcaggactaataaaaagtctcccctgaagatttttatccatctccagcagatctggcaaatcctttctcatacagcgccgggaacgccccaaagagtccacgtaatccacccattcttcactggggtcttggggaggagggatctctccctcaggaaggttttcctcatcgtcgtccctttctcctgccttttgagaatctctatgggcaccagatgcctccatttctttgcgcttgtctatgatcttctgtgtgaaatccacaaggtacatatcctctacttcttcatctataaagtctcctttagtcattttttcatataatttggctttttcttccaatttttcccttgctttgtctaaagtcttctgttcttcaatcttctgttcagcatccttctcagctcgatttgaaacgcctacattctgtttgctccagatacttggtttcttgttagttgtttttggttttccaaaaactccagaatcttttagaagtttttcttgtttgaattcttcttgctttcggaagagttcagccttaagatctaccaacgaggaggccgtgacgtccaaggctttttcctacggtccatggtcgtggcagagggtcccggtccaggaaggaccctttctacccgacacagcctcgtaagcctacccctcgtgccgaattcaacacccaggcctcgtaccttagccc

SEQ ID NO: 131502 - DNA, 972 bp, Homo Sapiens
aacacttactatactaacacagagttgtaatagttgttgtggccagtacagacagagagaggatttctgtaactagagaagaactctataaaatagttagcgcatgaggacctaagaaaagctggattgctgatttttgctaataaacaagatgttaaagaatgcatgactgtagcagaaatctcccagtttttgaagctaacttctattaaagatcaccagtggcatatccaggcatgctgtgctctaactggcgagggattgtgccaaggacttgaatggatgatgtcacgacttaagattagatgatctctactgacctcttctcatagattttgtataaatgaagtgctggactttacctgaaagctgcaaaaattaatggtttagatatatttataataaactgatttaaactttttctataagaagaaaaattaagaccacttatttgaaaacaaagatgaagtctcaccttccagtttgctttctcattagttttttccaaagtaagttattgaagctgtgattgacatttttctcataatgaatcctctcaggacattgtgtagcctatggtaagtacaaagggagaggaagacattttgaattttaagagctttattatcagtttaaccctccctagttgaatgttattttcttcttgttccattaagtcagaatacaaatcagcacagatattcgaatgtttccaatattttaaaatgtaatgttacttatgaaaagtattttgcttaaggttgtgtgtgtattgtgtatatacctcaagttcaagttaatggcattgatttatgttccagacaaaaataacacaaataataatatccttcgttataaccacaatgagataagtattggcattagtgttcagtgccattttatactttctctctgtgttctctgtattgtactaaccaacctcccaaatcgctgagctgcttgtttaaaaaa

SEQ ID NO: 131503 - DNA, 1121 bp, Homo Sapiens
  misc_feature (994)..(1028): n is a, c, g, or t
gacaactgaaacctacttgtttatttctgtgattccaaaaggacgcaaaaaacccaactgggtcaacccttcccttccccctcctttacagtgtatctctttctagtctcattaccgaacgacaaggcaggagacgcacagtttggaggggccgatgcaatcatcatggcagaaagcgccacagcctttgcacatgatcatggctttcaagcggcagtaacatttcgaaggcgtgccctctatgctgttctcttcggagaacgcctgaacaggaatggtctggccatggctgctgggattcatagcttggctagcagggatggtagtgacagtcactgaaaatgacatgacatcacctacattgctagatacctggctacctggtacagcagagttatggtccatgtcagatgaggtggagacattgatcatgcctctatagcttggccctatctgggtggggcttccatacaacttcggggtttgcaggggtggaaggagtaggggctggtgggtggggctgtctgcaggcagaggaagaacagtagaactgaaaagctcggggctgctacggattgccttacctctcactgcatgagccatctgcttctgtgctgcctgaattaaatctctggctagggtcttttcatcaaatgtttggcctctagtgaacaggtaattctccttacttaaagtggtttgctcattcaatggtatctcagccttcacattcttgctagctaagcaatcactggtagatagagtttccctgctgtgaggtcctgaacttgtgtcacccttgccagcactctgggaaacctggggctcctctttcactgtgacagattcctgctcatcaccagtactttcctcatcagtgtcatcttctttgctgctgctactctctcctgttgcatttttacagtctgtatatcccattttccccggccgtaatggccgaattcccgggcatatgtccggtaccgtcgactgnnnnnnnnnnnnnnnnnnnnnnnnnnnnnnnnnnncggccgcttcctcgctcactacttcgctgcgctcggtcgttcggatgaggccgcgatgcgccatatgaggtattatagtttttttctcttctc

SEQ ID NO: 131504 - DNA, 611 bp, Homo Sapiens
  misc_feature (187)..(196): n is a, c, g, or t
ttttttttcaggttttacattttatttccaggaaatgagatagtattttcacaaagaagaggtaagccatcctctcaaaatagacactgccttcagaggcagccatggggtacacccaacctatccaaaacaactgtcaacggaggtgtttccgaggtatcaaaacagtaacaacaacaacaaattnnnnnnnnnncagaagagaactcaaataactctttcgacatgtagtgaggcagagtctacgaagtaccctgaagcagttgggtgccgtgaatcctggtggtgcttcagccaatgatggcagcagggctggccaccgtggaaggcaagtgactgagggcttcctaactcaagtctctgtcccacaagacttctcagttgaccttcagagcagcggagtcacggctagagagaatcctccagaccatctcaggctcgcactacctggcagtctttcaaatgcccttagagcacggtcttcagaacaatctctttgctcaatgaagtattctgaacaaataatacattggagctcattctctagcacatcattcatgtggctaagaacttcttccttctgtgcttgcatcttctccttctcttccttg

SEQ ID NO: 131505 - DNA, 755 bp, Homo Sapiens
tttcttggtcatgaaaattgttttattaaacttcctatgtttactgtaatcagatgtagccaaagaaacaggaccttacaaaagtaggtaactaaaaaaaacatgtagttacagtgccttggctcaagcagatgctgaataaatgtaatgtgaaccaatgagcaagcaaacatgtgactacggaataagagtgagttacattaaagtcagaaatatggtcaagttagagtgtccagtgaagtgataataattcagagatttgtttcacagattgtattttatttaagcatacttactccctgacttttaaaaactgtttaagtcatatgctcctaatagtgcttaaaaatctattgcaagaagttagttctccaagtacatacaatgtactcttcttaagtttggcttcattcattaaaccgaattattttgaggtccatctaggttgttgagagtatcaactgttctttttattgccgagtagtattccattgtataaatacaccaaatttgtttatccatacacttgatggatatgggagctgtttacagtttttagctattaccaataaataatagctgctgtgaatgtttgtgtacaagtcttttttgtggatatacagtttcatttctcttgaataattagaaatggaatggatgaatcgtatggcatcttcacatttactttgaaagaaactgcccaattgtcttccaaagtagttgatccatttcacattcctatcgtcagtgtatga

SEQ ID NO: 131506 - DNA, 1528 bp, Homo Sapiens
  misc_feature (59)..(59): n is a, c, g, or t
  misc_feature (1378)..(1412): n is a, c, g, or t
  misc_feature (1482)..(1482): n is a, c, g, or t
  misc_feature (1491)..(1491): n is a, c, g, or t
ggaagtccaggtggcctccacggggaaggaatgttataaagcacaatcaggatctttgngggtgtgcctccttacagtatgccttggtggaggaagcctctgacaggggaatgtcctgggacttgggactgtcagccatggaccggtagcgggggctcaggagtccaccttcctcaggactccactccagcatggggtcttcatccacactctggttgaagaaagccttcagcctgtgaggctgcatcctgtgggccaccgccatagccaggcccagcagcacacacagcagtcctgtggtcaatgtgatccaaaaggcaggcccatggtgagtatgcagcacagaagcgcccaggtgcaggggacagggtgaggtgagtgatgtggccatggagaaaaagagcagagccaacagctggaagatgcccgtggccaatagcatgtagccaccatataccagcacaggcatggagagcatcacattggccagcagccagcagaggaatgccacccatagcatggctgaggtgtagtgtcccgccaggcggtactggcgttataggccacatgggcttcttggagtgaacttctcagctaggtacaacacagggtctggcagccccttctccagagcctttgcatactcctcagcatagttctcacccaggcgccaggtgaactcctcgttgtaattgatggtctcattcagctgctgcacgggggtccccaggattgcagccccgatgaataagctggtcaccacccgaagcagccagaacagcctcgtctttccccgaatgccaggcaggatgacgatgaacgtggccagtgcagtcagaaagatcatgatgatgctggccaaagtggtgtccatcgggaaggttggcttggggccagcatagaaggggaatgtgtgtcccaaagtagccatcttggtgaggtggtgcagggggggcaatgcaaactctctctttgaagaactcccacttgatccgaacttggtctggatgaaagcaggaagtgcagcccttcccctcttccaaacagtgcgtgtgtggcagcctgcgcctctcgccttcccccgtggaacctcacacgaagcgcccccgggggtgtgattaaagagggaaccaggtcccgacgttctagcgacgcagttccgggtctggcggggcgcgggcgcggctcgcagggcggtgggacccccaagacctcacgaggatccccggagggagacgtgactccagggtcttagaggggtttaggtcggatgggtgacttgctttgacgcctggcctggtctcgcgcgctgccgtccgctggaagccccggccgtaatggccgaattcccgggcatatgtccggtaccgtcgactgnnnnnnnnnnnnnnnnnnnnnnnnnnnnnnnnnnncgccgcttcctcgctcatctgactcgctgcgctcgtcgtttttcgggtctttatcttaaaacaggcccgnctgaggcgncccccttaattagttggagttcgtattacgatgctcc

SEQ ID NO: 131507 - DNA, 663 bp, Homo Sapiens
tctgagggctggtaaaaatcttttttaattactgatttttccacatggagttctgtttcaatctgtaatctctgatgtacccaaagcctccccaaggccacagtagtcatgctcccgggcagtatctgccatcccagccacttacattcccatcgtggtttgggcaagagagaggctttcccgcagccacagcagtgactgtctccaggatggaagactcctcagcgttgctgcctggagttcgctgcagcacgtccatcaggtttgtgatgaagaaattgttctggagcgcggccacccctttctcgggcaggatggaggtctggcggcacactgggcaggagagggttaaactgtgggcaggaatgtagttctgcaggcacctctcgcagaaagtgtgcagacaggggagaaccttgggattcttgtaccgttccaggcatatactgcaaatcagaaactgcttgtcaatctggcgcaccacaggacttgggatgttggtgccttcactggccatcctagaccactgacatggggggccggctgtctttgaccctgcacgctgctgtacgagacggcgactcgcttcgcgggaacagcgcgcgctccggagtggcctgggcctcacccctcgggcctgggcctcgctgcgcccccagccag

SEQ ID NO: 131508 - DNA, 717 bp, Homo Sapiens
  misc_feature (683)..(683): n is a, c, g, or t
tttttttgcaaatcaaatcataacattccctactccaccacagcagcaaggaagcagaagccttagttctacttattccttaactgtacctgctttatagattttgaagtaaaatattttggtacaagttaccaaccaattaaattagcttttgctttttcagtcaactttcggactcgtcctctactagaagttccaaaagttaaagaggtgtcttcgaacaacagctgcctttgctcctcttcagagtcatcctcattatagaaagctgtccttcgaccttgatttctagttctcatgtggggttcagagcctttgagttcttcaaactcttcttcctcatctataggatcatctatcttttttcggttacttctccttaacactttgacacttgcagggactaggagatctgcatctaatttttgtgtcttcatcttccttttgggcttcctacctccacgattctttttctgtaacaaatcttcctttacattattagtttcagaaagaaaattgcatgttgaagaaggaagtacttcatctctgatgggatgcacattattttgctctaaatcttctggctttgcatactgtagctttttgggctttctaccccttttcttgtgtataatttcaccactattggtattaacttctactttaggtttccttccaggtcncctcttcacaagttttgatggctgtcctccatgg

SEQ ID NO: 131509 - DNA, 835 bp, Homo Sapiens
  misc_feature (640)..(640): n is a, c, g, or t
  misc_feature (704)..(704): n is a, c, g, or t
  misc_feature (798)..(798): n is a, c, g, or t
  misc_feature (819)..(819): n is a, c, g, or t
tttaaagtaggtcaagttcaaaattatatcaaggagataagagatgggaggcaaaggctccagaagaggaacagaggcggaaggaagagaagctccaaggtgacgcccactctaggacaagatgatggggaggaggtgaggctgccctggtggcatcacttcccatgtaagtcactcagctccatgtcatcctttcggcgcttctgggtgaagagggaggcgacagggtagagcttggccttggcctggaagcggtatcccgcgatgtcaatctcatactctccccggttgatgaaatctgctgtcaccacttgctcttcccccgtgtcctcagaaaaattgtgcacaaagcccaggcaaacgtggcgctccaggctgtagctgtaggcactgctggtggtcttgccaacatactgcccattccggtaaatgggctctccccaccaaggccaaaggtctaggtctgaatcatggtcgtccaggatgaacatggtgaggcgtttatacactccattctgcttctgctgcaggagggcgtcgcgaccaatgaaatccatgcccttctctaatttcacccgagactctcgtccacattccaggggcgtggtgaggttatttatatcctgaccccagaaggcanaaaacttctcaattcggagactgcgaagagcgtaatacccagcattccggattccgtatttctnggcaaactcatcacttcattgtatacatgcagggcgtactctatggggatgtagagcatgaatcctggctctcctgtgtgcgtcatgctcatcnaccggatcccatttgcatagncacactcatctccttt

SEQ ID NO: 131510 - DNA, 669 bp, Homo Sapiens
  misc_feature (22)..(22): n is a, c, g, or t
  misc_feature (58)..(76): n is a, c, g, or t
gagaagggaaggttgtggacanagtgcagttctaaatatacgtttaaatgaacgaacnnnnnnnnnnnnnnnnnnnttgaaataatgctcttttgttccaatgctgcagcctcagtcccaaaatgaagggagcgacgtttgccgaactgaaaagggtcgcccggtcaggcggcacgtgtgcccggaggggctgagggcgtgaccgccagccacggtcaccacccgacgcaggtcagtgcctcgtggtggaggagcgtgggcagaatcacggggtgcagaggagccgaagaccgtcccctcagctccggggcagctcctgtgcggctctgcacttcctggtacccgtggggacagcgctggcatcgacggcggcgtggcgggcggggtaggcggcagtaaggcgggcagtgttcgagctcatctcgcacgcggcactgtccctgctctccctggcagcagcaggaagacctgggtccttgtcgctgaaaaaatagactctgaagaaaaacccctgctgtcctcacgcagccgcgggcagatgagctgtgatggcttccccgggtggggagggtggggcggccgccacccccactccgttgcgggtcttcagatggcgtcatgtgttggggcttttagaagttagtcatttaaaaatgtgttgattttctg

SEQ ID NO: 131511 - DNA, 2276 bp, Homo Sapiens
  misc_feature (989)..(1019): n is a, c, g, or t
  misc_feature (1352)..(1375): n is a, c, g, or t
  misc_feature (1918)..(1918): n is a, c, g, or t
  misc_feature (1948)..(1948): n is a, c, g, or t
  misc_feature (1963)..(1963): n is a, c, g, or t
  misc_feature (1965)..(1965): n is a, c, g, or t
  misc_feature (2035)..(2036): n is a, c, g, or t
  misc_feature (2056)..(2057): n is a, c, g, or t
  misc_feature (2080)..(2080): n is a, c, g, or t
  misc_feature (2088)..(2090): n is a, c, g, or t
  misc_feature (2098)..(2099): n is a, c, g, or t
  misc_feature (2111)..(2111): n is a, c, g, or t
  misc_feature (2114)..(2168): n is a, c, g, or t
  misc_feature (2177)..(2177): n is a, c, g, or t
  misc_feature (2198)..(2198): n is a, c, g, or t
  misc_feature (2206)..(2206): n is a, c, g, or t
  misc_feature (2213)..(2213): n is a, c, g, or t
  misc_feature (2220)..(2220): n is a, c, g, or t
  misc_feature (2239)..(2239): n is a, c, g, or t
aaaacctcattttaatgagacaattgaccctaggcatcacatgaaacttttatttcccaactgtggaaacattcctgtggaaatacatattcaagtttaaaactcgtaagctcaaaagatctaggatatgtactgtaatgccttactggtatcatctaacttataaacaaagataatccaatgagtgtgggcatttctatttctactgtaaaggcatatcaaataaagaaaaaaagtctaataattgcataaaggaatataaaactatttattaaccactgttcaccagtatttacaataaagtaaacaatatacagttggataacattttgattactacaaagttgttcttcctggcttttgctgaaccagtaaagcaaactcaagattgagcctccatgtaatgaattggggtaaagaaaaaacatgcaggtcaataggttaggttacaaaaggttgttcacacatttatgacagcaggtcctaaactgccaacacctctaaccatctgattaggtttctatgagccaagtcttacatattccattcatcatgaccttttagtcaatgtagcaacagggattccaacattttgctaaggaatggcccgctagggaaacttttaaatgttcatttaacttagttttgtttagctagttaaaacacactagcatttgtctagtttcctcatctggatgaggaaacctgctgtgatggcagtgataaaatttttccttttaggaattttgcaaataaaccactgcaattatagacactttaaaattatccaatttaaattgtcctatctagaattacttatttcacttgaaatgtatggtttcaggaaaattttcaatttaacttgaagggattatctcttattttgcttggaataatggcatctcagaaacatgggtttacctgtgatttttttgtttgggtgaatgcttaaaatacccttaaaaatttacatatgcattttatggatnnnnnnnnnnnnnnnnnnnnnnnnnnnnnnnaaaaacacgtaataaatctagaatggtccttaggctcatgagaacacaagttttgactgagtaatgactatggacatttcccccaacatttagaaaagctgttctttaatgaagaggaaatgatataccatggtatcaaatgttcttttctgataaaggaagcaactacagaaagcttttatttatttgttcaaagtaaccagtgctatggatgcaaaaaacccccaacaactcttccaacgctactttcaaaacaaacatatcaaacttgattttcattaggatgtagttattttgtcacactagtaaatcaaaatctaagacccaattttnnnnnnnnnnnnnnnnnnnnnnnnaaagaacaatgtgaacaattattgagcttcatcttctggacaagaatgccaagttagtctctcttcataaaaagcaattacaatttgaggacacttcatatttgcctctttcgccagcaccaagtctgcctcatctgaatctttccatttcatgagaaacatcaattctccactgctgtctgtggcaccaattattctttcaggatcaagacctctggcaaatcctcttggtttgtcagcagcatctcttttcttctttgatttgctgtcatcagattcactgtcagataaagattttctttttgtaccatctttttctttgccagctttctgagagttaagaaacgcttcaatcaattctggacaatctaaattttcttcaggttcccaagtattgtcagcatctgtaaatcccttccacttcaggaaatattccactttcccattcactacacgtcgatctagtactttttccacgacaaattcttcaggctctgcctcttcaacttttttactctttccattctgtttttttcccatttnttgcaatgtagttttggttggaggcatttnttattgcagacttgnangagctatatcccacgctccgagctgctccgggtcgcgggtctgcagcgtctcccggcctcccgcgctacnnagcgcggcgctccaacatcnnagatggtacaccctcgtcccganttcctggnnnctcgaggnncaatttccctanaannnnnnnnnnnnnnnnnnnnnnnnnnnnnnnnnnnnnnnnnnnnnnnnnnnnnnntgtatccgntcaaattcccaaacaaatacngagccggnagcatangtgtaangctgggggtgcctaatgantgagctactcacatattgtcgtgcgtcactgccgctt

SEQ ID NO: 131512 - DNA, 718 bp, Homo Sapiens
  misc_feature (57)..(80): n is a, c, g, or t
  misc_feature (609)..(654): n is a, c, g, or t
cattaggatgtagttattttgtcacactagtaaatcaaaatctaagacccaattttnnnnnnnnnnnnnnnnnnnnnnnnaaagaacaatgtgaacaattattgagcttcatcttctggacaagaatgccaagttagtctctcttcataaaaagcaattacaatttgaggacacttcatatttgcctctttcgccagcaccaagtctgcctcatctgaatctttccatttcatgagaaacatcaattctccactgctgtctgtggcaccaattattctttcaggatcaagacctctggcaaatcctcttggtttgtcagcagcatctcttttcttctttgatttgctgtcatcagattcactgtcagataaagattttctttttgtaccatctttttctttgccagctttctgagagttaagaaacgcttcaatcaattctggacaatctaaattttcttcaggttcccaagtattgtcagcatctgtaaatcccttccacttcaggaaatattccactttcccattcactacacgtcgatctagtactttttccacgacaaattcttcaggctctgcctcttcaacttttttactctttccattctgnnnnnnnnnnnnnnnnnnnnnnnnnnnnnnnnnnnnnnnnnnnnnntattgcagacttgaagagctattattcaccgcctccgagctgctccgggtcgcgggtctgcagc

SEQ ID NO: 131513 - DNA, 158 bp, Homo Sapiens
ccgcttttctgttttttgcaatgtagttttgttggaggccattttttattgcagacttgaagagctattattcaccgcctccgagctgctccgggtcgcgggtctgcagcgtctccggccctccgcgcctacagctcaagccacatccgaaggggccc

SEQ ID NO: 131514 - DNA, 480 bp, Homo Sapiens
  misc_feature (338)..(406): n is a, c, g, or t
actgctgtctgtggcaccaattattctttcaggatcaagacctctggcaaatcctcttggtttgtcagcagcatctcttttccttctttgatttgctgtcatcagattcactgtcagataaagattttctttttgtaccatctttttctttgccagctttctgagagttaagaaacgcttcaatcaattctggacaatctaaattttcttcaggttcccaagtattgtcagcatctgtaaatcccttccacttcaggaaatattccactttcccattcactacacgtcgatctagtactttttccacgacaaattcttcaggctctgcctcttcaacnnnnnnnnnnnnnnnnnnnnnnnnnnnnnnnnnnnnnnnnnnnnnnnnnnnnnnnnnnnnnnnnnnnnnttgcagacttgaagagctattattcaccgcctccgagctgctccgggtcgcgggtctgcagcgtctccggccct

SEQ ID NO: 131515 - DNA, 1581 bp, Homo Sapiens
ttttaggcaaaataaatactttattgttttaatatatatatattttagaaatcagcctttgtgtgatatttcaaacatttataagccttttagagattctttcaaagaacactgttaacaactcaaccacttttgattaaaatatcacacacaaagaaacacaataggagttgaaaaaattataaatgctagaagaaaaattctaataacatttggtggttactttacacatttatttaacacatataaaaccaaatgggaaaccattttccttttttttcataaaaacaaagttttcactggttaaaactgaactaaaatcattttatgtatgaggagaacaaatctaaattacttccattttgaaaaaacaaacaccagcttattcatttctattcattcaagtcataggccccattatttggatgatactctatttagtctagaagacagaaaaagaaacatctccatctaataaagaagtctggacaatgcaaaaagtaaaagtacatagtgtttaacataaggcacatttcccaaagaaaaatactacataagcaatgataaaattacatttgtcttgggtaaagcaacaaggcttacagtgtaagtacattaagtagttgtaggtaacctcataaaattctatcctactgctattagtaacctccccaagaattaagagcaattatattttttacaacagaacagtttttcttcttggaagtgacattaattaacagcagtggagggaaaaatcattggatgcttcaagctctgaaaaaaatgaatcagttattgcacagtaaatacctcatagaggtcagtgttttaagatgttagtctgaagaaatatgttatttataagttggataagtctggaagtcttcaagttttaaaattaattctaatagggaatcaaatgaaaaatattgacatacaaataaatattaggcttttcaaactgctagagtttttgatagtttagaaaagaaatagcaaagtgcctaagtttctatgtacgtctttttaaaatatatggttgaagaaatacacattgtacactgtatacagtagcccagctcaacagcaagtatcttctaaagcacaaataacacctccaccagtgcatatcattgataattccagtattacacagctaataggatccatgccaacctataatttctgtttaatgataatcttgcttagaattagacgctttacttgaagatactgctgccaaaagtccacttacaatttcccgtctgatttgccccagactatagactctttaatctcccgtatgacttgctgcaactcatcttagctccacatttttatgcatttcctcagcagctggcacttgatgggagctctttccatagcccttcttccacttcagattattaggtcctacaacttctggggctccttcagctgcatgcaacttcctcagaactttccaaatctggaggtgtctgcacagagcctgttctagaaggagctgttggcgttagagccaccgatgcccggccgtaatggccgaattcccgggcatatgtccggtaccgtcgactg

SEQ ID NO: 131516 - DNA, 693 bp, Homo Sapiens
tttttaagtagaaatttatccagcattaatgaacttgtgaaaatcaataaaatgatttattttatatatgcaaaatcaaaatctctttgtacactttaatttttgcaaattcatacaaacataacaatactgctccatataaacttttgtataaacattaaaggaaatatacacatattttgttcttcttgtgcttccaaagcacagaatgtataagtccatctgaagactttctatcatcacatgcaagaacaaatgtcagaggttgggggcagcctcaagtgcactttgtaatgtctctagacaaaagagaagagagttggaggtagattgtttggtgactctccctgccccttcccacagagaaataagttacccaaatagcagcttcttacttctttgattcaaactatcctgaatattgcatggtttaaaaggcacaactaggaattgttgaaaactttgttcagcacacataagattgccatttcctttctgtacacctattctttctgaaggacacagtaagagcaccaagttgtgctccacttgcaggtggcccctcgccactctgagaatgcctggaatggcaaagttcaagtgagtgacctctcattacccgtggtaggggcagtggtgtttaccgaatttagcctgtgaattaataacatcagcttcctcaattgaggaaaa

SEQ ID NO: 131517 - DNA, 939 bp, Homo Sapiens
  misc_feature (679)..(679): n is a, c, g, or t
  misc_feature (682)..(682): n is a, c, g, or t
  misc_feature (695)..(695): n is a, c, g, or t
  misc_feature (743)..(743): n is a, c, g, or t
  misc_feature (764)..(764): n is a, c, g, or t
  misc_feature (809)..(809): n is a, c, g, or t
  misc_feature (845)..(845): n is a, c, g, or t
  misc_feature (853)..(853): n is a, c, g, or t
  misc_feature (857)..(857): n is a, c, g, or t
  misc_feature (879)..(880): n is a, c, g, or t
  misc_feature (886)..(886): n is a, c, g, or t
caccagcacggcttctctccagccttctctttattttctccagggcaccagcccctctgccagcctgagtccagggctcctaggcactctaccttgcccttgctcattcccagggcctccccgcggccccgcaggggagggaggctcagagcacagtctcggcagtgctagggtcatcgaggaactggctgacgcgtttggggtgctgcaggcctggcgcggggtccactcccactcctgcctccttctgctcttcggtgtcctcgtccttcccctggtccttggagaagtacaagaatacctcctccagcatcgtctggctcacggaaaagtcctccacgccgtgctctgcgccgtgcaccgccagctctccaaagacgcgcgccagggcgcagcgccctcccggcggcagctggaagcgcaggcggcctccatgtgcctcgcgcagctccgccccagggaactcggccgccacgaaggccgctgccggctgggaccttgcggcgggcacccgcagggtcagtgtgtgacccgccgcgaatctgcccttgagatgttgcgggctgcccaggcagcggaaccgcccattcaccatgatggctaggcgcgagcagagcgcttcacactcctccatgctatgggaggtgagcatcactgaacggccctcccgcaccacggncanaaggctgttccanaggaagcgccgcgcgctggggtccatgcctgtggtcggctcgtccaanaacacacgggtgggtccccancaggcgcaggggccgtcgcagcttgcgtttgttcctccgctgtangtgcctgcagggcggtctgcgtacatgagagtccanacgcgcangccngagcagcggtctgggcatctgnngctccnggcaccgcgcaggcgcgcaacagctcccagtgtcgggggccgtcagcagtcaa

SEQ ID NO: 131518 - DNA, 1684 bp, Homo Sapiens
ttttgacttcccccaaagctttgcttttcttcatttggcttgcgtcagaaacacaaggctcggcacagcgaaggcttgcacccgcctcccgggacccctcaggccgccacctctgctgccaggcagtccaggtcctcagcttcccggggcccttgttccgtgaactctgtgctcagctgccacaccttcactgtgccctgggcatcgcccgcagccaagagctgagtctgctggctgttgaactccagacagtagacagggctttcatcctgggtttgcttgatcaaaactgtgggtttctgggagcttttctggagatcaaacagctgcacgtcacctttcccagaggcagctgcaaaaaccaagggccgcactggggaccagcgcacagcaaacagatacttgagggagagctgcagcgaagtcaagggaggggcctgcagcatggagtacaggtggacatgcccgtcagtcccagcgctcaggaagagattcctgtggaagggggaacagctcacagagtagatgggaccgccgtggggggagaaggtaaactgtgctggggcccgcaggggcacggagctgggcatccgcgtgagggctgcctctccagctgccagggaacacttgagcgggaagccgccttccgtgcccagaatgaacagcctagggtcaaagctggagaaggccactgccgtggcgcccacctcggtctccccgcggggatgcttcttgagcttggtgctccgtggcagctgctgcatgaccagggcgaagccctctgtgagctgcagctggcctaccccgatgccctgccagagtagcaccttcccgtcagtggccacactcagcacctggaagcggtggctgtgcccaggctcgggcagccacaccacctgggacacagggtctgtgtgggtgtcatccgtcaggcctgtgcgccacagcagcgggtcctcaagacggctcaggtcccacaccaacacctcaccactgtacagccctcctgcgacgtgggagggctgcgtggggtggaaggccagacacaggacagcgctggggacctccaccacggccgacggttgctggggacgcaggtctcgccggtccaggttccaggcacacacgaaggacttaagcgtgctccagtccccatggtccagccggccgtaggcacaggccaccacagagccagtggagttccaggagatgctggtcacatgcagaccctgcgcttgggctggcgggtagcccagggtatacagacaagacaccatctgctgctgctcggtccagttcacctcgaagccatcaaacgcgtggctctgccaattcttgttcagctctcggatgaccatggcctccactctccgaagaaaggctgcgagcctgggtatgtcgtactgggacgggggctgcacgctgacaggcacgggggcctccgtctgcacctgggcgtccacatgattcctggcctgggcggatgcactggcagtggcaatgctggccgtctggcaacttttcgtctccccgcggatgcctggacggccctccactgcgagggcacggacgccacacccagggtctcgtcctgcagcggccctgccgccccgccccggccgctcgcaacccgactatcgccagcccgccctcgtgccgattaacaccagctcgtactagccta

SEQ ID NO: 131519 - DNA, 1032 bp, Homo Sapiens
  misc_feature (276)..(276): n is a, c, g, or t
acaacccggggaattcgcccggcgagacccaggcgccctcccgcgaacggggcccctccgccaaaccccggccagtgggcccgcgcgggcccccgggtccccgggatctttgaagtgggccgggcaccgcagacaggcgacccttctggaccccagccgctaccccgagccgccagggtagccacttcccgtcaggcccacactcagcacctggaagcgttggcttgcgccccagctcggcagccacaaccacctggacacaggttctgtgtggtngtcatcccgtcaggcctgtgcgccacagcagcgggtcctcaagacggctcaggtcccacaccaacacctcaccactgacagccctcctggcgacgtgggaggctgcatgggtggaaggccagacacaggacagcgctggggacctccaaccacggccgacggttgctggggacgcaggtctcgccggtccaggttccaggcacacacgaaggacttaagcgtgctccagtccccatggtccagccggccgtaggcacaggccaccacagagccagtggagttccaggagatgctggtcacatgcagaccctgcgcttgggctggcgggtagcccagggtatacagacaagacaccatctgctgctgctcggtccagttcacctcgaagccatcaaacgcgtggctctgccaattcttgttcagctctcggatgaccatggcctccactctccgaagaaaggctgcgagcctgggtatgtcgtactgggacgggggctgcacgctgacaggcacgggggcctccgtctgcacctgggcgtccacatgattcctggcctgggcggatgcactggcagtggcaatgctggccgtctggcaacttttcgtctccccgcggatgccctggacggccctccactgcgagggcacggacgccacacccagggtctcgtcctgcagcggcctgccgccccaggccccgggccgctccctcgtgccgaattcagacacccaggcctcgtacctagcactagggtc

SEQ ID NO: 131520 - DNA, 1042 bp, Homo Sapiens
tggggaccttccgcgatgcccgtggtcaggtggagtccctggtgggcccagtggtctcgcggggacctttagagtggtctccgtgcacggtcagcagaccggaaagcctcttggactccaactggcttacgcggagccctgcccagagtagcacctttcccgtcagtgcacacaccagccacctggaacggtgctgtgcccaggctcggcaccaaccacccacctgggacacagggtctgtttgggtgtcatccgtcaggcctgtgcgccacagcagcgggtcctcaagacggctcaggtcccaacaccaacacctcaccactgtacagccctcctgcgacgtgggagggctgcgtggggtggaaggccagacacaggacagcgctggggacctccaccacggccgacggttgctggggacgcaggtctcgccggtccaggttccaggcacacacgaaggacttaagcgtgctccagtccccatggtccagccggccgtaggcacaggccaccacagagccagtggagttccaggagatgctggtcacatgcagaccctgcgcttgggctggcgggtagcccagggtatacagacaagacaccatctgctgctgctcggtccagttcacctcgaagccatcaaacgcgtggctctgccaattcttgttcagctctcggatgaccatggcctccactctccgaagaaaggctgcgagcctgggtatgtcgtactgggacgggggctgcacgctgacaggcacgggggcctccgtctgcacctgggcgtccacatgattcctggcctgggcggatgcactggcagtggcaatgctggccgtctggcaacttttcgtctccccgcggatgccctggacggccctccactgcgagggcacggacgccacacccagggtctcgtcctgcagcggcctggccgccccggccccgggccgctcgcaaccccgactgtcgccagcgccgcaacaccagcgccctcgtgccgaattcgccacccaggcctcgtacctagccataagtttta

SEQ ID NO: 131521 - DNA, 1000 bp, Homo Sapiens
gcgcccccggaaagggggccctcgccaagccggggcaggggaggcccgggccccgggccccggagtttgggtgggccggcataaaacaggggaacctctggacccacggcacccgaccgccggagaaccctccgcagggccacaccaggcactgggaacgtgccgtgccagctcggcaaccacaccacctggacacaggttctgtgtggtgtcatccgtcaggcctgtgcgccacagcagcgggtcctcaagacggctcaggtcccacaccaacacctcaccactgtacagccctcctgcgacgtgggagggctgcgtggggtggaaggccagacacaggacagcgctggggacctccaccacggccgacggttgctggggacgcaggtctcgccggtccaggttccaggcacacacgaaggacttaagcgtgctccagtccccatggtccagccggccgtaggcacaggccaccacagagccagtggagttccaggagatgctggtcacatgcagaccctgcgcttgggctggcgggtagcccagggtatacagacaagacaccatctgctgctgctcggtccagttcacctcgaagccatcaaacgcgtggctctgccaattcttgttcagctctcggatgaccatggcctccactctccgaagaaaggctgcgagcctgggtatgtcgtactgggacgggggctgcacgctgacaggcacgggggcctccgtctgcacctgggcgtccacatgattcctggcctgggcggatgcactggcagtggcaatgctggccgtctggcaacttttcgtctccccgcggatgccctggacggccctccactgcgagggcacggacgccacacccagggtctcgtcctgcagcggcctggccgccccggccccgggccgctcgcaaccccgactgtcgccagcgccgcaacaccagcgcttcccgcctggctgagtggccccggctgcgcgccctcgtgccgac

SEQ ID NO: 131522 - DNA, 1319 bp, Homo Sapiens
  misc_feature (338)..(338): n is a, c, g, or t
  misc_feature (388)..(388): n is a, c, g, or t
  misc_feature (406)..(406): n is a, c, g, or t
caaggccaaccgaaatccttgagggggaggtgcccgggaaatccaagggaggggcctcccccccctggagttaccggtggaacaagccgtccagtcccaggtttcaggaaagaaattcctgtggaggggggaccagctccacagagtaaaagggaccccctgggggggagaagtaaaaatgggctggggcccgcagggccccggagctgggcatccgggtgagggcgcttctccagttgccaggaacactggagcgggaagccgctttcggtgcccagaatgaccagcctggggtcaaagctgaggaagcccctgccgtggcggccacctcggttccnccgcggggatgcttcttgagcttggtgctccgtggcagctgctgcatgancagggcgaagccctctgngaaggcgcagctggcctaccccgattgcctgccagagtagcaccttcccgtcagtggccacactcagcacctggaagcggtggctgtgcccaggcctcgggcagcccacaccacctgggacacagggtctgtgtgggtgtcatccgtcaggcctgtgcgccacagcagcgggtcctcaagacgggttcaggtcccacaccaacacctcaccactgtacagccctcctgcgacgtgggagggctgcgtggggtggaaggccagacacaggacagcgctggggacctccaccacggccgacggttgctggggacgcaggtctcgccggtccaggttccaggcacacacgaaggacttaagcgtgctccagtccccatggtccagccggccgtaggcacaggccaccacagagccagtggagttccaggagatgctggtcacatgcagaccctgcgcttgggctggcgggtagcccagggtatacagacaagacaccatctgctgctgctcggtccagttcacctcgaagccatcaaacgcgtggctctgccaattcttgttcagctctcggatgaccatggcctccactctccgaagaaaggctgcgagcctgggtatgtcgtactgggacgggggctgcacgctgacaggcacgggggcctccgtctgcacctgggcgtccacatgattcctggcctgggcggatgcactggcagtggcaatgctggccgtctggcaacttttcgtctccccgcggatgccctggacggccctccactgcgagggcacggacgccacacccagggtctcgtcctgcagcggccctggccgccccggccccgggccgctcgcaaccccgactgtcgccagcgccgcaacaccagcgctatcccgggaattccggaccggtaccag

SEQ ID NO: 131523 - DNA, 767 bp, Homo Sapiens
  misc_feature (179)..(212): n is a, c, g, or t
  misc_feature (618)..(618): n is a, c, g, or t
  misc_feature (647)..(647): n is a, c, g, or t
  misc_feature (748)..(748): n is a, c, g, or t
ttttcatgagactttttcttagttttattgaaatatattttatgtaccataagacttcacccattataagtgtacagtgaataatttttagtaaattgatagctttgtgcaaccactgtcacaatccagttttagaacatttctaacacccagaaaattacttgtgagaatgtgcagtnnnnnnnnnnnnnnnnnnnnnnnnnnnnnnnnnngagaatttgcagtcaatcctcacttgttaccttcagtttcagacaactactgatctgctgtctctaaaaattttcctttcctggtcatttcatataaatgaaatcatacactatacagttttttgtgactggcttctttcacttagcataatgttttcaaagttcacccatgttgtagcatgtgtcagtacttcattcctttttatggctgaataatagtccattgtatatagataaactacattttgtttattcattcatcagttgatgaacatttgggttgtctccagtttttggctattatgaatgatgttgctatgaacatttctatacaagtgtttgcatgaatatatgttttcatttctcttgggtagatacttagtagaatcgctgagttgtatggcanatctatttagctttttaagaaactgccanacaatttcacaatgtggctgttctattttatattctcatcagcaatatgtgaaggttttcccataactcctccatcactaggtactgtctgactttttggntatagcttagtgggtgtgt

SEQ ID NO: 131524 - DNA, 1403 bp, Homo Sapiens
ggtggggcttcgccggcgtggggcgcaaaggaacgcgtgtgtgaagaggggtttcccaccccgcgtgcctggtaaaaggactcgcgccacccgccccgggggctgtcaatgttggtattatcagaagcctcgcggctggcgatttccccgggtggactcggagtccccaggtatagggcgcctcgccagaagcttgccctttgtgtgaaatatgggtttcaaaaacagcggggttcgggggtgcccccccgcggggccggtttatttgttattggtggaaagaaatgtcccaagcgcccctaatgtccaggggcgcaggggatttctcctttagggaaagggcgcggttattgggccccggggtttccacgttaacccttggggggcacccggcggcccccacaacagaaggtgtctaagaaaaggtttttggagggggccggggccgggccggcaaggggctaatcacaggtggcgcgggccggtttttggaagacaaaatgttttattttaaaacattgaaaaaacattaaaagacaaatgtccattatgtaaccaggaatgttaaatatatggaaacggtaaatctctaaaatgtggtaggtacttccagagctaaatgttgcaagttatcctacttttttctctaatatcaacaatacctgatacgatgaaaaataacaaaaagaccttactaattatccaatcaaagtcatcatctttgggtaaatttatatcaacacaacttaaagttttgtccaagatgttcctgacacatgaagcttccagttgaatttcagaaatgttaacaaaagtatcttccttttttgcctgtgaatgtttgagtattgctgtattgttggcttatatccactacagatactggttctaggccagcccaaggatcttcaagcattgaaggcttgaaataattttccaactcattagacattcttttttctctaacacgccctgatccaaatggtgtagatgtccttggagaaccctgggggtgggtctgctgctgccctggggagtagccgaattgctgctgggaccccgcgggggacctggagtaggagccagggtagccgccaggggacggagacccgaaccggccccccgggaagctgccgccgtgtcgcggagagtgactgctcccgtacggcctagaccggggcccgtacggcggcgtgtggtgcggactcccgtacccgtctcgaggggagggcggccgtggtccgcccccgcccggggttccccggaagctgcttccgctaccccaacctcctccacccggaccagggtaaggaggagttgggggccgaaaattctgtcgctgcatatcaggagccaaagccgaaaacctcgcagccgcgttctcccaccggaactgtatcccc

SEQ ID NO: 131525 - DNA, 1597 bp, Homo Sapiens
  misc_feature (267)..(317): n is a, c, g, or t
  misc_feature (848)..(848): n is a, c, g, or t
  misc_feature (1485)..(1519): n is a, c, g, or t
ctgtggtttggcccgctgtgtttccttccccccttggtgggttcttttcctgaagttttccgcgagggcggatttgttcgctgctgctcctcgttgtgtctatttgccgtcgcgctgtgtcgtgtgtattatttagttcagcccgtcttattggggcccttctttgtcactgattgtccgtcttgctcattatttgtctcgtctcctgcgtagtcatctttgtgctcgcccccctctgcgtctttttgctttctatctctcttctcnnnnnnnnnnnnnnnnnnnnnnnnnnnnnnnnnnnnnnnnnnnnnnnnnnnacataaagggtttattttaaatgttttaaggataagatagagttacatcataattataaaaattacttacagaattaacagatttatattgtgtatacttctaaatgcagagaacagggaactgtctacacattgtataaaataaaattaaaattaaaaatgaattcaagcttgaaagatgaggtcatttacctaattttaaaatgtgaacacgaagacctctgacctatacacattcattccaactgcactaatgatggaaaaacacaaagagcgcagcatttccaaggaaccacagacatttcaaccataattattttgttataataattgttctgttttgtctttggagaactttcattttgttaagacaatcagcttaagagtgttttcaggcactacaatttgtaacaatcggaacagtcttctaatgggtctacagtgttcagagattgaagcccaatgcacttcgtggtttggcacataaaacaataaaagaaatgaaatctggtttagaagtaactgtgattnttttttaagaaaacacagtcccttcaaatgctgcatgacatttacaactggaaaatcaccttctgttggcactacatttgcttcaccagtgcatttttatcctaaaaccactaaaacggcacagtaagcaaatatacaggaaactgagaaccgaatgaggaataaaagagagacactgtggtatacctaaatatctttaacatgcaattttagtcagttacattgaacattctacttagaatagagcatgcaaaaaaggatggtctgcttttaagatttttctctgaagttttacgtggcagcctgacatcacacacgcacgcacacacaatacaataatactagagcaggtaaatgagaaaggccgataaattttatacatagattcatgtcttgtattgtcacaagtcccatgatacttttggaaattaatgttgaattcctggaacaaggaaccaacattcagataccagaaaaatgcaagcaatgcatgcagatctgacacatgagcctaaaatgaagcccaagatacaagggcttgggagcagaattagtcatagcgtcattacatgtggtgtaagtcacccccggccgtaatggccgaattcccgggcatatgtccggtaccgtcgactgnnnnnnnnnnnnnnnnnnnnnnnnnnnnnnnnnnnccggccgcttcctcgctcactacttcgctgcgctcgtcgttcggctgcgaagagctaggccctatagtgagttatcat

SEQ ID NO: 131526 - DNA, 1391 bp, Homo Sapiens
  misc_feature (45)..(79): n is a, c, g, or t
ccgaacgacgagcgcagcgttgtcagtgagcgaggaagcggccgnnnnnnnnnnnnnnnnnnnnnnnnnnnnnnnnnnncagtcgacggtaccggacatatgcccgggaattcggccattacggccgggactccattccagaaaacactaacttcccagcaggaattgagccacagagtaattatattccagaaacgccacctcctggatatatcagtgaagatggagaaacaagtgaccaacagttgaatcaaagtatggacacaggctctccagcagaactatctcctactactctttcccctgttaatcatagcttggatttacagccagttacttactcagaacctgcattttggtgttcgatagcatattatgaattaaatcagagggttggagaaaccttccatgcatcacagccctcactcactgtagatggctttacagacccatcaaattcagagaggttctgcttaggtttactctccaatgttaaccgaaatgccacggtagaaatgacaagaaggcatataggaagaggagtgcgcttatactacataggtggggaagtttttgctgagtgcctaagtgatagtgcaatctttgtgcagagccccaattgtaatcagagatatggctggcaccctgcaacagtgtgtaaaattccaccaggctgtaatctgaagatcttcaacaaccaggaatttgctgctcttctggctcagtctgttaatcagggttttgaagccgtctatcagctaactagaatgtgcaccataagaatgagttttgtgaaagggtggggagcagaataccgaaggcagacggtaacaagtactccttgctggattgaacttcatctgaatggacctctacagtggttggacaaagtattaactcagatgggatccccttcagtgcgttgctcaagcatgtcataaagcttcaccaatcaagtcccatgaaaagacttaatgtaacaactcttctgtcatagcattgtgtgtggtccctatggactgtttactatccaaaagttcaagagagaaaacagcacttgaggtctcatcaattaaagcaccttgtggaatctgtttcctatatttgaatattagatgggaaaattagtgtctagaaatactctcccattaaagaggaagagaagattttaaagacttaatgatgtcttattgggcataaaactgagtgtcccaaaggtttattaataacagtagtagttatgtgtacaggtaatgtatcatgatccagtatcacagtattgtgctgtttatatacatttttagtttgcatagatgaggtgtgtgtgtgcgctgcttcttgatctaggcaaacctttataaagttgcagtacaaaaaatgttattcccaaa

SEQ ID NO: 131527 - DNA, 981 bp, Homo Sapiens
  misc_feature (725)..(725): n is a, c, g, or t
  misc_feature (766)..(766): n is a, c, g, or t
tttttttagcatttaaaaatcagtatttaattacaaattatatgttctacagtccagcaatacaaagtgttgcattagtaccaccaaaaccaaaggaattggtgaggccaataaatcttttctcagttttccattcctgtgcctttagtggaacatagttgagatcaaattctggttccgaacaatccaggtttaaagtaggtggtagtttttgataataacaagctaatgtggtaaaagctgcctcgactgcccctgcagctcccagcagatgtcctgttgctcccttagttgaggaaactgcaagggcatatgcatggtctttgaagagatgtttgatagctttgttttcagcagcatctcccaatggtgtggaagtagcatgtgcattgatataggatatctcctcaggctgcacacctgcatcttttaaagcagcagccatacaccttaaggcaccttctccttcaggatcaggggcagttatgtgaccagcatcacctgagagtccatagcccaaaacttctgcatagatccgggctcttctttgaacagcatgttcatattcttccagcaccagcacagctgcaccttctcccattacaaaaccatctctctttggatgaaatggtcgacatgccaacttgggatctgagtttgtgctcagagcccgggctctggaaaacccagcaagagaataagggctaatacaagaatctgtaccntcagccaccatcacatcagcatcaccatgggctataatctnaatgatctccacagatgagctctgtggtacagcgtggatctgcatgattgggcctgagttaatcgaagctactggctgtgcatatgacagatctaggacaaatggctacttatgtactttgctgaatcaagcatcagacactcagagacatccatgcatgaacagtgcctgatactctgcagagcgccaactcatgtattgacccatgcagaggg

SEQ ID NO: 131528 - DNA, 1135 bp, Homo Sapiens
  misc_feature (97)..(134): n is a, c, g, or t
  misc_feature (749)..(749): n is a, c, g, or t
  misc_feature (802)..(802): n is a, c, g, or t
  misc_feature (922)..(922): n is a, c, g, or t
  misc_feature (943)..(943): n is a, c, g, or t
  misc_feature (977)..(977): n is a, c, g, or t
agtgtacaagagtttatttaatgatatctgaatttagttctatcatgtggggcccacgttacaagttccatctgggtccattacaactctaaccaannnnnnnnnnnnnnnnnnnnnnnnnnnnnnnnnnnnnntccacaactttttccatgtcattaaatatattcatatataataaccataatatattagtatgcattggaaagggacattgacccaaacaatacgtcatggtcacaactaaacatttacaattctgagtgaacagaaatccaaaacacaggagggggcagagggaggaggggaagtgcatttgggaggagggaatgggaagaaacgtccaatgacaggagtgggactggtttggcttttggcaaggggcgagaccccacaagtacacattttgatcccccccggtgtgccatggcccacaggaatgtcttgtccacggaccatggccagtggccccatcaatgggtctagtctgtccactctgggcttcaaggggacttcctttaagtgttgacagcctaagcgtctttcactttcctgaaggcaggaaccattccccagtcccttagggtctcttcttgagttcagtctcattccaacctgggacaactccaagaaagtaagtccgtacccctctccagcatgccgcgactgaggcagagttccagggccttggagcagctcccagcctccctgggctgtgaccctccctccctgggttgtgaccccaggtgtcnctccctcccacatagaggcccctggggatgctgcctcctgccctgctttccanggacagaagcagtgggcagagacacagccagcaggtgaatcccggggacagccctatgtcctccccccgcaatcttcggcattactgcgtgtccgtaaagcagcactcagctgtcagggngcacagaccaccagctggtangaaaaggacactggggaagctgtttcaaaaacangacaatctggtatgttttcttcaaacaacactacatagcacattctggttatacactcttcaaatcaaatctagttcgttttacatccttcctactgtacaaccgggaactcaatccatttctctgctctggatgggcacggatggagaaggtgttca

SEQ ID NO: 131529 - DNA, 676 bp, Homo Sapiens
ctggaagtttctgctgccctgaggcctgctgctccttgctggcgggctgcccctgcgcgctcctgaccctctgcagtctctccaggtgcagcgtcctcagatcaggctggtctgggccacgctgctccctgggaggctgctctgtctgcgcaggggtagggggcactggctggagaggggctgggccaccggtccctgctgggggtcccagggctgctcggggtcgcggggccctcttgctcacagtgatgaacctcctcttcccttccccagaactgtcgtgcctcagcccgtgctcctcggctatttggtggacccgcagcctgtcgtgggaattgagggaaggaggaaactccaactgcatcttcttgctggccatgaactccactatcatggcccggaagtggtccacgccatcttggctctccactccctctgggctgcctccgttgaggctgggctgagatggagcttcagaggccagagacttcccagccggcttcttccggccctgtctggcaggtgctgcagcctcctggcctccctcctgccgctggcttccggtcctggtggacgcagcaggtccctggggcttggtggcagcgtggctggaaccctgggagttctcatgggaatagttttctgggacaatatcgtcaagatactcaaaggcgtg

SEQ ID NO: 131530 - DNA, 1363 bp, Homo Sapiens
ttttttaaagaaattatatttagtttggccactccctagattcttggtttaccagcttataaagagtacacctaagaggcagtataatatacgcactaaaaaccatttccccctttatcatctttggctagaagcctcatgaaaggaaactgaggacggcagaggcaggcaggctccgtgcgcttctgcctcacacgtcactgaccggaaggctcgcatcgtccaagtctactaggtcacaatctttttcctgagggccatttttactttgaggtcttaacagagcttgttcagtcactttggaagctggttctcttggagagacagtctggaccttgaagttccctggcttgaccttggcaagagactcgtaaaatcctcgcttctccatggtaaaggttgagaccaaagagttgctgcgagaggctgtggaatgtgaggtggcggcggctgcgttggtaggacggaaagcgtgtttggattctgaaggaccggggggatgctcagaagacgcagatctgccgggaccccgctgtgctacaatggcgccagagactgctttaatccaactgtgcatctcttcagggctatcagcctgcacatagaaagttcgagacgttgttacaatttcaaagaggttgtccctcatcattatgtcgctttgcttacattcctggactttatgaacctctttaagtggtattacgcgaagaggttccttttccagttcagatttgaagtagcctattgtgttttcatccaattgaaaatatcttctcttccagtttttcatcactgctccttgttttacacaatatccagctttgataaccgcactatcttgaggtggtttaggagtaaagtaaggaagatggctttgtgaccgtttcagattatttctgtcaatactttcaccacattcatttacttcttctttctgagtgggagtaatgatgggtacgccaccaacaatatcagttctgtaagacacttgctttttcccacattcaccatggcgacttaggttatcagaattaggctgtgagtctgactgctttggtactgtaatttttatagctttgtttaacacatttacccattccactaggtcctgctgatcattggcttgtaggaagtacttcctcattcctgcattcataacaaaacagaactccgcctttggccttagcttagtagcatcgctaacctttgaaatgtaggtaagcttaatggctccaacacgtgatgatccagaaggtaggttctgtggattatccatgtaccacacgaaactatcttctctggtatccagtatgaagtaccttcgaagaaatttcccactgttttcattttcttcaatgtc

SEQ ID NO: 131531 - DNA, 1117 bp, Homo Sapiens
  misc_feature (70)..(121): n is a, c, g, or t
  misc_feature (920)..(1039): n is a, c, g, or t
  misc_feature (1047)..(1068): n is a, c, g, or t
tagcgaggcctgggtggcgaattcggcacgagggctgccttcagcaagacgctgctctgaggcggggagnnnnnnnnnnnnnnnnnnnnnnnnnnnnnnnnnnnnnnnnnnnnnnnnnnnntcctccttggacccccggagctccccgcgccgcggagcagctggccccaggcccctagagccccgagagctccgagagctccgctcggcgtcccgcgcgcctccctgccgctcccgccccgggctggcgatgctgcgccgccccgctcccgcgctggccccggccgcccggctgctgctggccgggctgctgtgcggcggcggggtctgggccgcgcgagttaacaagcacaagccctggctggagcccacctaccacggcatagtcacagagaacgacaacaccgtgctcctcgaccccccactgatcgcgctggataaagatgcgcctctgcgatttgcaggtactgctggtgttgctggtcctcaagtggcatggagccggagaatcacagcgccaggggttccttgcattacctagatttcaatgacctgtgaagacttacttgaagaagttgagcggtctttatagaggaatgcttttggcatagattttaccttcagtgaattttaaagacatgagattgtagcctcagtctttatagagacaaacctgtagcattgctttggagattttcatactgtaataaccgtgtacattggctaacactttatagcattttccaagtcagagctgttctggcttcacgttggggtctttaactgggtagagaatgggctgcgccaccttttttctgcctcagagttggagttgacattgtaaagttaatttttaagagttgttttcgcatatttttccagatcagatcttctcctgcacggctgggcacagtgacatnnnnnnnnnnnnnnnnnnnnnnnnnnnnnnnnnnnnnnnnnnnnnnnnnnnnnnnnnnnnnnnnnnnnnnnnnnnnnnnnnnnnnnnnnnnnnnnnnnnnnnnnnnnnnnnnnnnnnnnnccatctcnnnnnnnnnnnnnnnnnnnnnnttctcgtattaaagagtgttctggccgggcacagtggctcatgcctgtg

SEQ ID NO: 131532 - DNA, 1073 bp, Homo Sapiens
  misc_feature (902)..(965): n is a, c, g, or t
ggagggacttctctgagtaggtgtctcggtcgcagcctttccctatgtggctggtttctagctccactgtggcctgtactgaggcgactggctcgtcacatgtctccaggtggatatttggaaagacggccaacgcgccggtgcccggctcatactcaatcctgttgttccatccttgccacccaggggtgcaggtgggcttaatgctgatcttcaccaaaacatcttctgtggctcttttcttcccacagtcataggcagtgacggtcagcttatattgatgttctttcccgtagtttaatttctctgtgttttttatataaccatctttgtcaacagtaaagggcacgtctggagtgatgatttcgtagctgcaaatctggctgaactgaggggagcagtcggcatccacggcctccaccctcaaaatgctgtcgtactgcttcccctcgatgaccgtggctttgtaggacttctccttgaacacgggcgcgtactcattcacgtcgttcacctgaatatgaacagttgctttatgagactttttcgcgttggtgccatcaggtcctttcccgcaatcataggcgtggatggtgaatgaatagtctttctgcagctcacagtccagtttctctttggagcgaatgactccctcaccagtggatttatccactaccactgcatcaaaggggacattctgcccgtgaattttaaatccacaaatctcacctgcatatccgcagaggcgcatctttatccagcgcgatcagtggggggtcgaggagcacggtgttgtcgttctctgtgactatgccgtggtaggtgggctccagccagggcttgtgcttgttaactcgcgcggcccagaccccgccgccgcacagcagcccggccagcagcannnnnnnnnnnnnnnnnnnnnnnnnnnnnnnnnnnnnnnnnnnnnnnnnnnnnnnnnnnnnnnngcagggaggcgcgcgggacgccgagcggagctctcggagctctcggggctctaggggcctggggccagctgctccgcggcgcggggagctccgggggtccaaggagga

SEQ ID NO: 131533 - DNA, 387 bp, Homo Sapiens
ttacacgttttgttacacgttaacgatgggtaggccccatctggggtcttggggagaaaagcaagttccccgatttattgaatgttccctgtttgcattccccatgccaggcagggcttcctaactcgtctcacaggtctaatacaaagtctctcctgtttaatcttcattcccactacggattgccacattgtgctataccaggatacctgggaggacttctcaaaggcaaaaatgcccctcagtgaggctgggagtgcctaactcccagtctttccatcctttaaataaatgttccctcttcttttctgtaggcaggggtactgatttgttttttgttttaaagggaaacaatgatttacccataatggtaatttaaagggggac

SEQ ID NO: 131534 - DNA, 685 bp, Homo Sapiens
agtttccatttttattaaagttgtgtttttctaaggaatatatcacacttaaagttcaataccataaatattagttcttaaatcttctattttacttattaaaaatgtaaacataaaacaaccactccatccctgtccctgacccaatatatattaaaaaaatattactcctctcaggtaagttcttttcttcagaatgagtaacacagacttcattaaaatctttttagtcctcctgggctgcaaggacatggcaggaatgactagtgtccactgtgacaagggtctgtgacactgtgactgaggcccgtctcctcctgccacgacgactcatgtgccctgagagacaggctcctctctgtccagtcagcgtccaaggacacggacagtggtaaggcaccgagcacagacactgtgatggacacagcacgcaggatggcgtatgctcctggaggcagatcacagccagcacagacagcaattctgggtgagtgttagtcagagggtattagagctggaaggattctgagatcacctagtcgttcacagatggcctcagtcagtaagtcttctaatgttagaaggaacattgatacaactttatgaaatactttgatatatttatttatcttcctaaaactaaacctcataagatgatgtttcagcttcacatattgataaacct

SEQ ID NO: 131535 - DNA, 1507 bp, Homo Sapiens
  misc_feature (578)..(578): n is a, c, g, or t
tggtgtcatacagtttattccttcctttgtccaacatcaacaataacctttgctgcctccaactccttctttcactttcatcttaatagcccttttctcggggggaggagggcttcctcatataaaccattcttttaaagtctgttttggttgtttctttttacactttacaagcagtgacaaattatgtccacaatgagttctcaattaaaagatgaaaatgtgaccttgatcattttagagtttttgcaaatttcaacttgatattctatggccttccaagggcaaaagacatctttattgatcaatttctgctgagacagaactctccagttctactgatttaacgacgtggaatatttcttcaagtgacagtagaaaaagctgatttacccatgatgattctattaagtgtggtctctgtcaatagagaagaatcactatttgaatgagacctcaagatgcttataaattctaaatcaacaccccaatctgagggttcagaggaagaatcattaaaaggtagtatccgattacaactaacccctagcctctgattctcctgggtatttgtttanaatgtaggttattccttggatctacttaagactttaaaccacatctctctggagcttggtaatgagcatttttattaaattccccaagtacaagccccggtgtacacaataagcaatttcagttttgagtaactgccagggaaggaatgtccccctttctgtttgttgactgccttctgatttgtttgaaagcttttttcttcttgcattatcttgaccattcctggtatgaaggatgttgtcttgtttctcctcagtttcatcttctgcagaagaagaaaccatgccaggcggcagtctcttactgttcatggcttccatggctttactctgttccctttttctctcacaagtcatcagctcagatctaaaaatactctaagggtaaatccactggtgaataaaatggttccaatgtgccatattcctttctttagaaagcaagaattacctccatatatgaattttaagaatcattgggtttctatgctagaaaaataaagaccattaataagtgcaatattgaaatgggtgaacatcaatttagagacaagtactaaactagcaaagtttttgctaggtttcctccagaacataataccatttatagaccttctaggacaaaccatcttttattgacattaacagaagaagataatcacattttttataaaggcaggcaaggttttcattataagctgttctatagtatttgtatatgtggtttttaaccttgtgcatatgctactttgatttcttcgacagctgagaatgaaggagaaaaacctcatatctagatcaatgtcttatattttatttccaacattttggactaattttgaagtaagagcaaataaagtttcacatttgctgagtatttgttatgtacaaagtgttactttaaaggtactactggatatgcactcatt

SEQ ID NO: 131536 - DNA, 348 bp, Homo Sapiens
aattgttgaaattgggaccactttttataattggtttcaagaaaaaaaatgaacagacttgcagtgcttttctgttcaaataaactccgattcaaatttcagttttgtttgttatatactttttgtgagtgttaaatgatatgggaaggatttgtctttcattaaccatatggaaaagatgtcttcctgaattacatagcatttcatggttacagattcttcctaattaatgtttgcaccatatgaaactcataggtaacaaacacaaaggagaaaagcagcctgtctgattgcttataagcttttttcacaaaatcaaattaaaagtctctgattcatttgaaagct

SEQ ID NO: 131537 - DNA, 1102 bp, Homo Sapiens
  misc_feature (61)..(81): n is a, c, g, or t
  misc_feature (398)..(410): n is a, c, g, or t
  misc_feature (490)..(693): n is a, c, g, or t
gtgccatgctcgaattaaccctcactacaagggaaaaagcttgcggccgcggctgtaggcnnnnnnnnnnnnnnnnnnnnngcgagtaacagtgagctttattttcatgtcaccgctctaggttcattcacctgttgccaacaacatgagggagtttctccacagcccttgattcctgaattgtccaacaaatcaacagtcaccaatacattgacttaaggagtaaacaagcagcttttctctacacaccaccgggcaccccaggaaggcgcagctccctgctccacccccgcctcttggtgcctgtatccagcagaaggacccagcaggaggctgaatccaagcactgctctcaggccactctatcctcatccctggatcctccagggaacaagatnnnnnnnnnnnnntcctgttttcctgctttccaaaatggagggccttaacatcaaccaaagttacaaaacaaaaacaaaacacaggagctatnnnnnnnnnnnnnnnnnnnnnnnnnnnnnnnnnnnnnnnnnnnnnnnnnnnnnnnnnnnnnnnnnnnnnnnnnnnnnnnnnnnnnnnnnnnnnnnnnnnnnnnnnnnnnnnnnnnnnnnnnnnnnnnnnnnnnnnnnnnnnnnnnnnnnnnnnnnnnnnnnnnnnnnnnnnnnnnnnnnnnnnnnnnnnnnnnnnnnnnnnnnnagggagggcaaggctgtcgtgagccaatatcacaccaccacaccctagtcagggagacatagcaagactctctctcataacatacagcaaattatatataatagttccacaagcgtgggcggttccctcatgccgaattcctggcctcgaggggctaattccttaagtgagtcctataaagtcggaatcagtgctagctgtttccggtggaaagtggtcaccgctccacattcaacaatatttgaaccggagcataattgtcgacttcggggtgctatatatagctactcaattacttcgttcctcacgcccgtttcacgtggaactggttggcagtgtataataactccaacctctggagaggtttgtatggggcactctatctccctattacttggtgagcgtgcgc

SEQ ID NO: 131538 - DNA, 760 bp, Homo Sapiens
  misc_feature (266)..(281): n is a, c, g, or t
  misc_feature (654)..(666): n is a, c, g, or t
cggcacgaggtgtgggtcagaggtgccagtagtataatattcatctccctggagttatgttgaaggcagagttttcatagggttagattttttttatccttttctagttcagttaattcatcctgttgaattgcaccatcgtgaaagatgggaaaaatcgtgatgatgggtaaggggaaaacttcccggaaggcaatggggcaaggaaaaagaaagcctatgggaaatggctgtgctcccaacatagctttgcagatgatgtgggnnnnnnnnnnnnnnnnggttgtttgttttgagagagagtcttgctctgtctccctggctagggtgtggtggtgtgatcttggctcacggcagccttgccctccctggctcaagcagtcttcatctcagcctccagagtagctgggactacaggcatgtgatatgatgctcggctgatttttgtttactttttagagagatggggtcttgccatatttgccaggctggtttgaactcctacaactcaagcattcctcccaccttggtctcccaaaatgttgggaccacgggtgtgagccaccgcgcccagctagctcctgtgttttgtttttgttttgtaactttggttgatgttaaggccctccattttggaaagcaggaaaacaggannnnnnnnnnnnnatcttgttccctggaggatccagggatgaggatagagtggcctgagagcagtgcttggattcagcctcctgctgggtccttctgctggatacag

SEQ ID NO: 131539 - DNA, 1636 bp, Homo Sapiens
tactaatcaaatctattgcttttattgtttttaagtaagtggtggtatatgtcatctttttaaatgtttcttttgggaagatcttatagaaaatggcaccctgaaactttcagctctatgtcccaaaaattatctttcaacaatctgatgaagtttcttaaagaaactcttaaaaatgaagataatatacctggcctaaatcaaaacaatctgaaaaatggatgtgtcccagtggaaagactcaagtcttttcaagtttatcagaaatgccactatacaccactgtactataagtcgaggaggatggatatccaaaggtatcatttgttgacagttcctgatggtctcaggtatatcctataatcactggttactatgcatcatttcttgtagataaatggtattcatgtgataagctgccatccaacttggatgtctctgagcattccaataatatgaatgagaagcggcagcataatattcttgccatgccctgtagtaagctctccagtactcctcataatcctgataggtatcagaaaaactcagacgtatttccctatgacagtcataccaatcatcttcctgggcttcagtctgcaatctgaaggaagaccgcctgggtaggtttctccggctctgcttagctctctggctagcccctctttaagtcttgtcttcatctggattccaggtgattcttgatatttctctggattgggggtgtcacttccatttggtggttgttccaaagaaatacgatcatccacaggcgtagattcagagtctttcaggctgattatcaggaagagccttccaagtatgacttatttcctttgcttctgggaagaggttcttgagctgtaagaatcactgtcactctcagagtctccagattggctactacttgccaatacagggactctctgttcagtaactttatttctcacaaaaccattttgaggattcacagtctgatccccagggcctgtgtagtgcctgatgatttccacaggtttctctaacccctctttaatataatgttcataatcctctaccaattcagcaaaagtcaacgtgtatggctgatggattttaaaggaagacagacaaggaatctgggggagtgacacaggtaaagcttctttgacctggtgctgactgttggtggagttttcaacgggagtctgaacagaattcttcatttgctcttcggattgcctgtcacagcccagttcttttggtgacgttgctttttctatgattccacattctgagtggcttttcacaggaagcttttgtttggtattattttttgatttgactgatagtccagatacagaattatttctagaggaagccatgtggtcaccatgagctttctgaatttgaagggttctctctattttctgaatttgcttttttaagggttggttaggtacacttgctataccatatgtatgcacagcagctttaacttccacatcccaatccacacattcttccatcagaccagaaggaatgggatctggtaaaaggagaaggttgatattacatttctgggcaattctcatcatcatattttcttcctctccccggcaacagtaggtcactgtcagccccaatgtacctaaaa

SEQ ID NO: 131540 - DNA, 1117 bp, Homo Sapiens
taaaaataagattttcctctttactctcgtccttacatgtccacagacttcatgtagagaggctgagcctttcgaccacaaagtgtgttctgtgttgaagatgttataatgatgggagagggcagttgcagcagcttctaaccaagtgtctacaacacatgtactactgtttcctacctgtgtcacctctgcaaaaaatggagctctgagcccagttctgtgagcatggtgtcagagccctccaaagtcctgagaaatcaataccagggatccaaatctcagacaccagtttgaagcaatacctggataccaagactcagagtgaggatatggattttgggagctgacagttttgctgatcctgccacactggcaggggctgaagtccagaaatggtgtgtagctctagtcattcttattcaccacagctcttatttcacagttttttcccttggtttcttctgtttcttctgttcctcatattcaagtattttctgttggaaatagcctgcaggaggattcttgctcttctcggcttcctggatgaaaagtgagaagagctgtgtcttcacaaacttcttcacaaatcggcggttggtcttggaggtcagagccttacagaaggatctttcttggaagtggccttgcccatttgcctcccgcttgatataggaagcataatggcccacaatcttgacaaagaactgcacacaggggcctgaaacatgctcgttgatttgttctgcagtctttaactcattgatcccctgaccaagagagtctaagatgtcatcctgaagcttcggtggcaggatgtctttttcatcaccaaccgacattaagaaggttccttcacaaagattgaccagcaggacctgaaataaacatagactggctttctctggtcctctttcttcatagacccccagaggatttaccgtcttgatttctgcctgtggctgtatctttcagcccaggtagcaacaaaatcaatatcttcagttctcatttcctatctagcattctcctttctcaccattcccctctggagatctcagttccattcctgaggaaagggtgtgggtgtttgtaggaagggagtaggagaaagagctaa

SEQ ID NO: 131541 - DNA, 832 bp, Homo Sapiens
  misc_feature (42)..(60): n is a, c, g, or t
ccctcactaaagggaataagcttgcggccgcggctgtaggcnnnnnnnnnnnnnnnnnnngtcccaagaggcagggtggctttatttgacattagaaacccatttaaaacggcaggtaagagcatgaacaaaagcaaagtttagttcctcgaatgcctgcttttgtaatgcaggtggatctggctctagtctttaaggttattaattggaatgaatgccccaaggctgctcttagtttctctgtgaagcattttatatgggagctctggggtgactctgggtccacagtcatgttcacaagccatctcttccgcaggagtgccctgccttgaaggctgttggctgggtccccagatattctcagggcaagatctgttgtgttataaccacctgccatctgttggtgcaaattttctggattctagatgatgaatcacttacttctcctgctgttccttctgctgccaagactaatttacctattggactttatgagggaatatactagagtaacctatcatgaaggtttgtcctatgcaaagttcctactccatcactagaaaaggtgggcaagagcttccttagcatctccagagggtgggatgaagagccagcagtaacaatgtgggatcctcactttggggtcctttgcagataaagctatagccactgacttcagtaaggtttgagttgagagtccaatggtgggttcatgttttcttggcaacactttcttttcaggacaccatgcttgtctcaaagtgtggcactgggtaaagccctcaatggcatcggttaaatgaatactgaggtctatgaccccaactgggca

SEQ ID NO: 131542 - DNA, 551 bp, Homo Sapiens
aaacaacaaaggtttatttcttgctcactacatatccattgtgggttaggtggggtgggagtgggggattctgctcatcgcttaggaccccaggctggcagaggagggtttcaactggagagctgcttctatgtggcaacctggacccaggctctcaaagcttctgcccagaagtgaccctcggcggttctgctcatgctccactcgccggggcagccccgacctaacctcccagcaggcagcgcatcacatgttacaggtgcccaggagaggagaaactgcacctttgtcaacaaagacgaccacggaggggagactgctgatggagggtggtcaggagtaggggggcttgttcctgcctgcaggttctcccctatctcccaggactgagctcgacacaggcacaggctgaggcctttggaaagctgggcttgggagcttctgtgacctggcaagctttgccttccttaaactttctcagcagatggtgaaatccaatttggaatgttcagccgggcccagtcattctaacctcatctcagccctcgtgc

SEQ ID NO: 131543 - DNA, 1164 bp, Homo Sapiens
gtagagatggggctttgtcatgtgacccagcctggtctggaactcctgggctcacgcgattctcccacctttgcctcccaaattgctgggggattacaggcgtgagtcaccatgcccagcctaggatgagtttagtaagatttggttatgctggggagatgggaaaagccaggttaggggcacgcaggctggaggaacggggtctgtgggggtggatggatagccatggaggcagaaaggagcctctgcaggaagagtctggaagagcgaggaggaagcggtgaggcaggggagcactgtggaatggccctgaggccaggaggggctcaggatgaccaggcagaaacagagcgggtccagggtggaggggaggcccgtgcagcatgagcaggaggctagaggagacagaccatgaggcccagggagacccctcactggagactctcccgtagccttcttttcagaagtcgaaagttggtttttaatcccttccaaggcttgaatggctcattatcattgtacacaaagttttcccaacaatatttaaaatcttcatagtccatgatctccacagcgaccccttcctgactcaggctgcggagcccctcctggtaacatggatactggaagtagtagaggcgggcggtgaagatggtgagattcacgttgctgtgcctggccaggaactcggccacctcccctgcacagtctgggcaagggctccaagatgtgtaccaggtgacctggtactttgtgttaggagacagtatgtcgtcgcagaaccaagagaggaagcacctttctgcatgacaatgggtctcagaatccacctggtttcggaagacgcccgtcttccaggagacaactgagcggcgctttataccttccacggtgaagcacagccaagtttcgttccgatcgttggcttcccataggtttttaaattggaagtagaatgtgcctggatacattgccttcatcgggtttctgatctgtggattcatgttcagcctcttagatatgcttgtccctgtcccactcttttctgaagcgctgtggcttctcttcctgcttacagcgtccttgccgacgcgtgggtcgacgatatcccgggaattccgaccgtaccagcctgctttttttacacactggttcatagtgtca

SEQ ID NO: 131544 - DNA, 968 bp, Homo Sapiens
  misc_feature (647)..(647): n is a, c, g, or t
  misc_feature (709)..(709): n is a, c, g, or t
  misc_feature (721)..(721): n is a, c, g, or t
  misc_feature (745)..(861): n is a, c, g, or t
cccaaacctgtcccatacccctcccactcatgcaaacagctctcaaatgagattcttcaaattttacgttttttccattctggctcattctttgcttcctcatcatcagattcaacttgggcaaacatggttttgggctgagtcttggaatatgctggagaaacccaatatgggctgtcttctgctgctttggcatgacgcaaaatggcttcccgaggattactgtcatcggtcttgtccaaagcaatgttcttcacaatataggaagagagagtgcccccgtgggttccaactcggccaccacgacctgggcctgctacaggaggttcaggtttatgcgacttcaggggatccagtctgtccttctccagctgtttccttgtactccgttggcggggctcacggaacataggcaaggcatgaggggtgatgatgtagtcctgagttagagtctcagcttgttttgccttccgctgggttttaaccacacataattttgctcccctaacgggtgtaaaagcaaattattttctttacttggtcttagaaacagaaaatttcatgttgaaaacatgagatactttcaggaacatactctgtgcatgcactccatctacacaagtacttgactttctgagggatggcancagatgggctctcagtgataaaagcttaaacttatggaaaagcaagtctgtcagtcagtggntattaactcgtngcgaatcttgggctcgagggcaannnnnnnnnnnnnnnnnnnnnnnnnnnnnnnnnnnnnnnnnnnnnnnnnnnnnnnnnnnnnnnnnnnnnnnnnnnnnnnnnnnnnnnnnnnnnnnnnnnnnnnnnnnnnnnnnnnnngttgctatgagtgagctaatcacattattgcgttgcgctcatggccgctttcagtcgggaaactgtcgtgcagctgcattaatgatcggcacgcgcggggagagcgg

SEQ ID NO: 131545 - DNA, 1098 bp, Homo Sapiens
  misc_feature (1024)..(1058): n is a, c, g, or t
agaaaccggaaccgggttcccggggtggagggggaaggccccgtgccggccagagcccaggaggctttgggggggaccaggcccctgagggccccagggaagaccccctccctgggaggctctccccgtagccttcttttcagaagtcgaaaagttgggttttaaatcccttcccaaggccttgaatggctccattatccattgtacccaaagttttccccaacaatatttaaaatcttcatagtccatgatctccacagcggacccctttcctgactcaggctgcggagcccctcctggtaacatggatactggaagtagtagaggcgggcggtgaagatggtgagattcacgttgctgtgcctggccaggaactcggccacctcccctgcacagtctgggcaagggctccaagatgtgtaccaggtgacctggtactttgtgttaggagacagtatgtcgtcgcagaaccaagagaggaagcacctttctgcatgacaatgggtctcagaatccacctggtttcggaagacgcccgtcttccaggagacaactgagcggcgctttataccttccacggtgaagcacagccaagtttcgttccgatcgttggcttcccataggtttttaaattggaagtagaatgtgcctggatacattgccttcatcgggtttctgatctgtggattcatgttcagcctcttagatatgcttgtccctgtcccactcttttctgaagcgctgtggcttctcttcctgcttacagcgtccttgcagttgagcagccctctttaaagtgacctcccagggccttgtgaatcatggcccctccccattcctgctcaggcactggtgtgggaggccccggggtgcttcatgtttctctggctctggccctctttctggttttctccgggcccctcctactggcagaggaacctccgataaagacaggctgctctgtctttatctccccggccgtaatggccgaattcccgggcatatgtccggtaccgtcgactgnnnnnnnnnnnnnnnnnnnnnnnnnnnnnnnnnnncgccgcttcctcgctcacctgactcgctgcgctcgtcgtt

SEQ ID NO: 131546 - DNA, 845 bp, Homo Sapiens
  misc_feature (494)..(540): n is a, c, g, or t
gatcattatgaggcaggacactgggtgggagagatgagaaagggaaccccagaaacagtgggggtaggggttgtctgagatgagactagacccagtgagatggtggtgtgtgtgggttgtggggcactgccctgatgtccccctagagaaagggtcactgagcaggcctggaatcagctgccttgttggggatggggatggggcaggcggtgggaagggtggcggccatcagtccccatccagctctgggctgggcgcatcctcaggttcttcctcatcaaagtacctctcctcctcatcccgtgccacgatgtcgaggttgtcgaagtcggggttgtcgtctactgtgctgtagtcaaagtccccgtccttgccatctaggaagcgctggtgcatgcggctggtgaactcctctcgcaggatcagcctctcctccgagtcgggaacccaggcctccgagtccttgcctgacctctggtcttcctcgtcactgnnnnnnnnnnnnnnnnnnnnnnnnnnnnnnnnnnnnnnnnnnnnnnngtctgttggagcacgacagctgctgtagctcccgctcctcgtaggactggagcagcaagttggagagcgggcaagcaggtctcccgggggacccgggcttggggggctggtgggttggggtgcgggcactgagctcctcctgggtgagatactgcccgatgtactgctcatatagcaggggggcccggaaccgcatctgctcatcacctgaagtactcgcccgacgcgtgggtcgacgatatcccgggaattccgaccgtaccagcctgctttttttacacactggtctatatgtcacatacgtt

SEQ ID NO: 131547 - DNA, 1610 bp, Homo Sapiens
  misc_feature (1020)..(1037): n is a, c, g, or t
ggggaacattctaaagcctttatttagcatcaggtagattatttcattataacacttgttaacttcaagacagcaattaaaatcacggactggcagctacctaggcccctgggagcagtatctcagtctggggtttgggtggataaatactataagatttaagatgaatgtgccccaattaaaggggcaaaactactgtacagtaggtctccacacatattttaagtacacaggtactttgcaaacttgaaatgcacaaggcctccttttatatagtttgatacttacatgagtgcaacttactttccctagtggcatttgccactggaagtggaagcatttaacaaggtttgtcattatgtaatggtgattaaaatctatatttctagggcatttttgtgaattgctagattttatacatattttcagttcaaatgtaaacttaaccattttaatgatactgactgcagaaaactgtaaaagtaaattcagagcactaagtaaatgaaatacttttccagtttaattctttagaattttcaaatcagaaatatctattctgaatattcaggcattttttttcttcttggaagatggaaggggtaacattgggaggattagtatgaataaaagccatcttatcaatgaagtctttataaaatgacataacctctatatctgagaataaacattgtataggaggagagttctaaatatgtcaaaggttacatctaaaacattcaagcatgacagcataaaaatattcaaaataacttgatttgggattactatatagttccataaagctaaagttacatttaggtataaaccttcagtatatatggcaacagcaaccataaaaagcatattccccagcagtgttctcttacctctatataaaatagtattccaaataagtacattttatagcaaaattatgcatttttcctaagactttcatcaccaatatcgccttataccctgcttttgttgggtgaaatgcagttatctcatgagtgnnnnnnnnnnnnnnnnnnaaaagataagtagaaaccaagggaaaaaaatttaaaaacataggtttaagacttatttgtagattagccaaacaccctgacttgtatgcattttaataaatgtcaggcaaattgaagtaatttctgtcccagtagctgccagagtaaatccagtcctgtgctccattgtagggattaggaccttgatggaaccacctcgtcttccagtcctcttctgacttggacctgtttttgcgggctgctctttgtttttcctcaagtcgttttttttcttcactagcttgatctatctctccattttccatggctctgatgtcaggccgtaacctgcagtctgtcttgggaatcacactctccatgtctttgtctacttcattcaaaaccattgcaaaactagtaaaattatacatctgggcagaatttggaggccgtggggctattcgccatagaagaacgcttccagggataatgaatacactttcagaatccggcactggcatttcatccaactcctcagaggtgctcatctgtttgctgttcttcttctcttctgtatttttcttatcatttttt

SEQ ID NO: 131548 - DNA, 1598 bp, Homo Sapiens
  misc_feature (55)..(63): n is a, c, g, or t
  misc_feature (160)..(168): n is a, c, g, or t
  misc_feature (1369)..(1369): n is a, c, g, or t
  misc_feature (1418)..(1418): n is a, c, g, or t
  misc_feature (1529)..(1529): n is a, c, g, or t
  misc_feature (1572)..(1572): n is a, c, g, or t
ttttttcactgccacaagcggcccccccatggggtgtgggtgaatgaaccccccnnnnnnnnnattttcagggggttcccatgcaagggcccgttttgttgtggtgcgggtgttttcaatggtgggggcgacagaaattgcttttaaattggaacttttnnnnnnnnngggtatccgtcccatatgtaagctccccccagcgcgcccgtgggtgccccttaaatctttagaaattatgggaagcgcttcccccccggggggaatttgccccggtttgtaattggcacccccccaagtaaataggaccctctcaagagaaaccttcccatttttgggggattttttgttctcaaggaagatcccactctcgggtttggcgcgggccgcgggggggctttattcttaatgtcgggcgggagagattcccaagagccgcttagttccaagggccccagggagtttttcgttagggaaacacaggcttatgggccccatgtttcccctttaccctaacaggggccccgggggggccaaaacgaaatggttttagaaagtttctcgagggcccgagggcggccgcaatgtttattcgcccattgctgtagtgcggttggtttaatagtacatgaggttttattgactacattgcaagcaaaagcatgaagaagaaacaatcatttaaaaacaccaaagacccttacatagcaaaggttaagaaataaattaagactcctattgggttgtgtctgccagggaggatacaggcctcattcgctccggtccttgggttcccggtatttccactggatgtaatcaaagatgtctttttcactatccactggcaggggttctcctgcaactccagtgactcccaagggacggatggtgtactcattgattgtgaaacccttttctagggcatgagccctcatattcttattgaaaatatcactcccagtgaaatagagaacaccacagtaatactgatctttgggtatcaacctgatatcaattcttctgtgtggatattctttttcatcatttttactgggaagctggcaaacacccatgaactttgtctcaccctttgacagggtatctgtgataaaatgaaccttttgtaactgctccacaacctgatgtaacagttttggctgtttggttgattctgaagtgaagctgggatgggtcaggagaacatccatgtcaccactggactctgcacctcttctgaaactgccacagactgtagcaatgtattcagaatccacttttttaacttcatttagtacaatatcttgcatttgtaacatctcttcacgaggattcttttttcaaagtccccaaatatttcagcccaatcgctganatggttcattttatctcatttttctgagatctctagtgtttaactcgtngcgatcttggctcgagggcaattcctaagtgagtctataatcgtatctgtcaagctgtcctgttgaatgtatcgctacattcacacacaacagcggagataatgtaactgngtgctaagatgagcatcacatatggtggctacgcgcttcatcngaacttctgcatgatatatcgcagcc

SEQ ID NO: 131549 - DNA, 797 bp, Homo Sapiens
ctgcataatcatcgtttcttccacgttgctctcttctgtttattttgatgtctgtgtttcgtgttcagggttttttttgattagtttcttgcttagaatcacacaaagaccaaatcctcataatgagaatccttatttgcagttttgtgtagttctctaattatcgtgaagtgtaatagaaaggtagggatagtgtattgctcacagaagctgctaagttaaaagtgctcagaattctagagctgctaacattaaaaacaaaaatggccttgtgttttacttgattaaaattaagccttaagtttagaacatctttaaacttggtttaaaatgttcattttagggtgtttgccagcttcccagtaaaaatgatgaaaaagaatatccacacagaagaattgatatcaggttgatacccaaagatcagtattactgtggtgttctctatttcactgggagtgatattttcaataagaatatgagggctcatgccctagaaaagggtttcacaatcaatgagtacaccatccgtcccttgggagtcactggagttgcaggagaacccctgccagtggatagttgaaaagacatctttgattacatccagtggaaataccgggaacccaaggaccggagcgaatgaggcctgtatcctccctggcagacacaacccaataggagtcttaatttatttcttaacctttgctatgtaagggtctttggtgtttttaaatgattgtttcttcttcatgcttttgcttgcaatgtagtcagtaaaacctcatgtactattaaaa

SEQ ID NO: 131550 - DNA, 1173 bp, Homo Sapiens
ccatagccaaagggttaagaaaaaaaattaagggctccttattggggtttgtgtctgccaggggaggaataacaggccctcatttggctccggtgccttggggttcccggttattccccactgggatgtaatcaaaagatgtctttttccactatcccacgggcaggggtttctcctgcaactccagtgactcccaagggacggatggtgtactcattgattgtgaaacccttttctagggcatgagccctcatattcttattgaaaatatcactcccagtgaaatagagaacaccacagtaatactgatctttgggtatcaacctgatatcaattcttctgtgtggatattctttttcatcatttttactgggaagctggcaaacacccatgaactttgtctcaccctttgacagggtatctgtgataaaatgaaccttttgtaactgctccacaacctgatgtaacagttttggctgtttggttgattctgaagtgaagctgggatgggtcaggagaacatccatgtcaccactggactctgcacctcttctgaaactgccacagactgtagcaatgtattcagaatccacttttttaacttcatttagtacaatatcttgcatttgtaacatctcttcacgaggaattcttttttcaaagtccccaaaatatttcagcccaattcgctgatgatggttcaatttatcttcattttttctgagatcttctagtgttttaattccttcatctacaaacttccttgcagcagatggaccaatgccactaactcgagtcaggaaattgatggatgaactcgtatcatcctgccgaatcttttccagtttacgtaattttccagttgctaaaaactcatcaatcttttcagcaatttttgttcctactccaggcaatttcttagcttcagctccactctttattttgtgtgggtattttgctataacagatgctgcttttctgtgagcatgtcggtgattcccccgttgagagtctcctgcggcgccttccgtttgctcatggcggcctgcacccgagaaccccagagtgttcagaaccagggactagagccctctcccagcttgaaggaggtaccaggacttggagacgggagcaggagcaacccagctccggcgcgaccggcggaacaatccc

SEQ ID NO: 131551 - DNA, 707 bp, Homo Sapiens
  misc_feature (632)..(632): n is a, c, g, or t
  misc_feature (682)..(682): n is a, c, g, or t
tttgtatttttgcaagtgcttcagtgtttaattgttgctaaagtcattgggggtttttgacacagattctattttagtaagataaactcagcataacccagcattgccaaaaatgaattcctaaggtagatgactaaaataaaccggcaataaatattggctgttggaatgggaattatatctctgtaatgtagacacagcattaatgactcattttcaaattactgtctctcccagggattatttgtatcagggatcagggaagaaagaagtccatctcttcttcttttagacagcagaattgaagaggaatatgaacccatcaggcaaggatgttcttatatctattcagccaagagaggtataggccctggagttcaacagggagttaacttgaacaggctgctttgaggctgatacaaggcattgatagaaaaaatactaggggctgaggtggctgattctggggatagttttctcttgttcccctacaggcagagggcaccaccaggttcacctaatgcgtcttgtgtggcatgaattaccttatcagttacactgggtgctgccctgttcctttgctgcttggaattagtgtactcttttaggcctcctttactccctaaattcanattctgatattttggcccataaggatgagttttacaacttctctggtgtnacaggaggcggtctgaggtaaagat

SEQ ID NO: 131552 - DNA, 1013 bp, Homo Sapiens
  misc_feature (783)..(783): n is a, c, g, or t
  misc_feature (819)..(819): n is a, c, g, or t
  misc_feature (847)..(847): n is a, c, g, or t
  misc_feature (906)..(906): n is a, c, g, or t
  misc_feature (960)..(960): n is a, c, g, or t
ttttttttgaagctgacacaaaatagtttattgaaggaaaaacgaggggagaggagtcaggtgggaaagtgctggaatgtgaggagtctgccccttttcttcaggaactagagcaggtggggcgctgtcggagagcacccccagcaggttcagagctgcccagagtctctaggacaggggcagaagcagaagcaggagcaggagcaggcaggttggcctccgtcagcaaagctgcatcttcccaggagcctgaaccatcactggcctcaggctctagctcctcttctccgctcaggggctgctgatctggtttctcctcctcggacagctgaccctctgtccctgagggatcttcagggctctcaccatcctctgtaacatctgattgcggagttgactcctcctggccttcaggccctggctgatgagcagagatccttcgttggacttccttccgggaattgtctctttttcggatgttaacctgcaaagagaagcggtgtcggggccagatgcccccccacacccactgcatgtagctgaagagcacgatgacgctgaggaaggtgaagttgctggcaacacctatgaaggcgcaggtcatcgggaagttgtatagcaggtatctgagcccagtgaagtgcgcgtggatgcggaggtaggctccatacagctggatgcgcttgctgtggatctcaatgatcgctccagtggtcggcacgtacgagttctctctatagtctgcgtagagttccacctccagcagctgcttctgctctgcanagcaaatagcagggggtagaggagacagtgtgtcancatctggagacgtctgagcggtatgcancatcaccgacgcgaagagtggagatgatccggcactctggtgtacaggaatggtgacangacatgccaatctgatcaaggggctcgtgcgattcttgctcgaggcaatcctanaggagcgataatcgtacagtcaactgtcctgggaatgtatcgtcacatcaaaa

SEQ ID NO: 131553 - DNA, 1457 bp, Homo Sapiens
gtgggaaaccgctggattgtgaggagtctgccccttttcttcaggaactagagcaggtggggcgctgtcggagagcacccccagcaggttcagagctgcccagagtctctaggacaggggcagaagcagaagcaggagcaggagcaggcaggttggcctccgtcagcaaagctgcatcttcccaggagcctgaaccatcactggcctcaggctctagctcctcttctccgctcaggggctgctgatctggtttctcctcctcggacagctgaccctctgtccctgagggatcttcagggctctcaccatcctctgtaacatctgattgcggagttgactcctcctggccttcaggccctgggctgatgagcagagatccttcgttggacttccttccgggaattgtctctttttcggatgttaacctgcaaagagaagcggtgtcggggccagatgcccccccacacccactgcatgtagctgaagagcacgatgacgctgaggaaggtgaagttgctggcaacacctatgaaggcgcaggtcatcgggaagttgtatagcaggtatctgagcccagtgaagtgcgcgtggatgcggaggtaggctccatacagctggatgcgcttgctgtggatctcaatgatcgctccagtggtcggcacgtacgagttctctctatagtctgcgtagagttccacctccagcagctgcttctgctctgcaaagccaaatagcaggaggctagagaagaccagtgtgtccagcatctggagcaggtctgagcggtaatgcagcatcaccgaacgcgaagaagtggagatgattcggccacctctggtgtagcaggaaatggtgaccaagaacatgcccaaatcttgattcacaggggactctggcagctcaagctctaaggtaacacgatacggctgtccatacatcagcacccgatcacgtccacccttagtcagcgagacattggcaacagggaaggagcagagtgaggtggtggaggaatcacagtcggtcctgtagtagaaatgcacagggctgaggtggctgactgtcggcatataggaatagtagaaggagccatagaggaagacagacacccagagcaaaaggaggatggtgcagaagagcaccccaaactgcagcagcagcctgcgggcacggcctgccaagacttggcccacctcctgggcccacagtaaggcaggtactggagggtcgttgaccatggccgggagagcagggtgtctggccccaggttcaggccttgcgttcctagctgctctgccacctggacgccacccctggccatgggatgcagcagctggtggttcctaatcgtgcaaccatggaaaccagcccgccggctgccacagggctgccgactcaccagcctcgcgcgctgccagggcaaccgtgagacggcctcgtgccgataacccggccta

SEQ ID NO: 131554 - DNA, 1468 bp, Homo Sapiens
acgcagaaccacgtgacaatttttggcacaccccaaaaaagcggcaggtcttcggggaaggtggctagccagggtctcaagcccacgaaaaacgcgcgtcaaacgcgaagtaacgctccaacccagcggaatgccttcgcggggattccaaagattggtcccactggtcggccggtacaagttctctcaaaagtccggggaaagttcccacttccagcagttgcttttggtttgcaaagccaaatagcaggaggctagaaggagaccagtgtgtccagcatctggagcaggtctgagcggtaatgcagcatcaccgaacgcgaagaagtggagatgattcggccacctctggtgtagcaggaaatggtgaccaagaacatgcccaaatcttgattcaccaggggactctggcagctcaagctctaaggtaacacgatacggctgtccatacatcagcacccgatcacgtccacccttagtcagcgagacattggcaacagggaaggagcagagtgagtggtggaggaatcacagtcggtcctgtagtagaaatgcacagggctgaggtggctgactgtcggcatataggaatagtagaaggagccatagaggaagacagacacccagagcaaaaggaggatggtgcagaagagcaccccaaactgcagcagcagcctgcgggcacggcctgccaagacttggcccacctcctgggcccacagtaaggcaggtactggagggtcgttgaccatggccgggagagcagggtgtctggccccaggttcaggccttgcgttcctagctgctctgccacctggacgccacccctggccatgggatgcagcagctggtggttcctcctctttgtccggtcctttgatctggtctccgcacacctctttttccccagcttcctccttttggtctaccttttctgtagacatcttcctgacgagcctctgttgactctggatcttccactgagtcacttgtggctaaaacgtgaagtggcgatccagacgctgatacctgtggcgcatcacattttcctggatatggaaaatggagggtccctggagctactgggagggtaaagccatttgaagaataaagtcatccagagcctcaggacagctcctgtgttagaattcttgggggggagaggatcatcaagcaatagatctgccatacccagggaaaagggccaatcaatgcaggctagacatcgtcaaggatcggagatcagaggggtcgggggatggcgggcgcgagagagcgtccacagtgtaagaattaagtacaacagacgctcaagaggctgcgaagagcaaacacacacacacaacgtgcaacgaagccaagttaaaaggtaaacaggccgaagaggggggatttaggggagggtgcgggagtgcagtcgtacagcagaggactctagcctcgtccgattaacacccggcctcacctg

SEQ ID NO: 131555 - DNA, 1315 bp, Homo Sapiens
  misc_feature (130)..(170): n is a, c, g, or t
gagtggaacttaaaaccagtgtactgtatgtatgcattggtaatagctacttttgcttcatagcttcataccaacaaaatatatttattagaatagtatgaaagtactggaggagctgaaagaaaaacannnnnnnnnnnnnnnnnnnnnnnnnnnnnnnnnnnnnnnnntcacaattccttacactacctctttttcattgttcctcatcactacaaaaaggagagcaggaagggtaagataggaaagcagcatttctttctcttctgaagtataattttaaaaagagattaaccctgaaaatcatggttttctatggtaatcaagctttgtacatcagaaaataaaacatcccattattaaacaaatatttattaaccggcccataaaaataatgaagttactcacactgagtcctagtccattctgtttttctgatttgcataagcaaaggtctaagttctggagccaacccttcagaggtcttgagaatgaatgatgggtaagtttatttggacaaccagaaggacttttcatcacaactgaagccattttataatgtagaaatttctttttcctattttaagtaaggaaagtccattcttgagaatatgttgtccaacaattaaaacactctcaggatttgttacttgttggtgatttatgctgactccgccttctgttatcattcgataccctcggggaccatctggaatggcatttgctttgcggcaagtatctaggacacttgttccaggatcgagaaaaaattcagaaaatggagcttctttaaacaactcttttaactcctgatcagacatgacctccagtgcatctatgctactgtgataaagggcttgtgtacaccttttagcagaatccaatccttctcgtccatgaacaagctttgttacttctgctgccagtcgtttctgaggaccccgcctttctggctctttgacatgcagctgcatgatatgatcaatctctggaaggggcaggaaagtgaacagcttcaggtacctttccactgaatcgtccggttgcctgacaaagaattgatacaattcaaatggagatgtcttatctctgtttagccaaacagcgttgccagcagactttcccagctttgctccagttgtacttgtaattagaggaacggtgattccaaatacatcttctccagtcaacttgttgatgaactcatatccggacatgatgttgcctagttgatcaatccgcccagctggacctgcatccataacgctggaagagcctcggccgattccacaccagggctctcactagccttaat

SEQ ID NO: 131556 - DNA, 690 bp, Homo Sapiens
  misc_feature (600)..(600): n is a, c, g, or t
ccttgtactcctacgacttactccctccttgtctccacccactcctccatgagaaccgagttgggaatttccacgggaagtcgggggtggcggggagaaacagggtagaaataaagagcgcatccttgagagggggtaggttctaggacaagggtggggctcaaaggccttgtctccacgacaacacaaacacagacttcaggcacagactacaaccacctgacccctgaccctgtgactgcaggatgttcaacacgccccctctccctccctccatgtgcaatctactctgtggagcaggggcttcagtgtacccatcagagggaaaggaagggtttagttctggaaataccttgggggggaggggttgagtagtagaatgggcgggtgatggtgaaactgtggttccccttccagaatatatacaagtccacagagataaaggaagacagtaagtgtggtgggagatcacccgggggccacagcgcccttgcatcgtgctccttattccctttcccgaaagctaccccaccccagtagcctgccccttcagtttgctcctccacctccaccgaagcccatctccaccttgtggactcntgggtggggaccagacacgtctgctggacgggggcgtggccgcactcgcttcgtcgccgctgcccccgccactccgggagatctctcttg

SEQ ID NO: 131557 - DNA, 1330 bp, Homo Sapiens
  misc_feature (200)..(212): n is a, c, g, or t
tttttgtgttacatcaaatcagtttatttgtgatcagtgtttgagactctatacatccttcacaaatttaattttacataatctgatacgtctcttaaaacttaaactttgaactgctagacttttatttccctagaacagaagggctggtataagttattttccagaaatgaggtaccgttttcacagaactggtttcnnnnnnnnnnnnncaagttttagagaactaaatttgcatttgttaaaatcaaaaagtaggaaagatgttctttacaaataattttgatcaagtatgtgttcaaagaaagcaggataaaaaggctttttctctaacattctgtgttgtactgtattgttgttcaataggaattagcttctgtcatttgctaaaagaatgagtagtggggaacaggatatgttggaaatttcataacgggtaacagaaccattctcttgggtaaaccataggcaggggcagctgtgctgtaaccatatggtgttccatagcctggagctatgtagccaggagcagctgtcgccccaacaaaagctccccttgttagagttcctcttcctctgccccgaacagcttggactgctgcagacacagctgtattcacaacgccctttgcctgagggataatcttctttttcttattatttgccgcattgggtccagaaaacagtttctccaaggcagctaaagctgcactcgcctttgccactttcttatttggacctgcgcctctgaatttctgtccatctacttctacctccattacaaagcgcttgtcatggcttccaccagtctctgagatgagttcatacttgagacctcttcttttttcattgagctccattacagggtttttgccacttgctgtgaggatagggccctgagttcttacctctaaggtactggaggtttcagttgtagaatttccagtattattgcttgagtttgaagacactgtttcatttttactttcattatctgatttttcatcggaactcatacattcaatatctgcatcaaagcctgttggatatcccattgcctgcaataccttcaccgctacgtgaagttttgctgttttcttggatggtcctgaggcttcatatgttgtgccatccacatctacagacattgtgaagactggggcatgaacggggccagactgagataggagcttatactgaagcccaggcctgatctgatttagcctcattagtgcattcataaggtctattgctttactatccagaattttccttaagtttcgtttcatcttcttgttggggtctttatcatcccctaatccatcttccc

SEQ ID NO: 131558 - DNA, 742 bp, Homo Sapiens
  misc_feature (259)..(317): n is a, c, g, or t
  misc_feature (702)..(702): n is a, c, g, or t
gcttgggaaaatggattattctaataaaactttattttttcaaacacagccacagaggcagaacctcatgtttaacacacacagacttatggatttttcttttaatataaaacaaagtttacgaaaatttttttccactttttgtatttgtaatcccattagcacagggactttggcagcaggtgggagtgaagggcagctgagctgccactgggcagtcactgggcacaggaggagagcaccagcctggggagtggcnnnnnnnnnnnnnnnnnnnnnnnnnnnnnnnnnnnnnnnnnnnnnnnnnnnnnnnnnnngatgcagacattgacccagtgtcagccacatgccctggaggtgtgctccactctgggtaagcccaatatgtgaaaattcaaatagtcaaaacagctaaagtggagggaggttgcttgctttacaaaaagaagcaatcataggctgcttttaaatggtcagcagtccaaatgcattgaaaaatagcatttggtttacacagaactgttggaacagatctactgtgtaaagcaaaatgaaccaattcttgaaaagtgttccagggccacaggttcttagattgggaagcaagatgacagttctgactagcttagttttccagactgaaagtaatggaattaaaataatgataactgtagaccttctcccctaaggatggtgccctgnggctttggggaaacaggatggaggcagatcactgcctcac

SEQ ID NO: 131559 - DNA, 516 bp, Homo Sapiens
atggattattctaataaaactttattttttcaaacacagccacagaggcagaacctcatgtttaacacacacagacttatggatttttcttttaatataaaacaaagtttacgaaaatttttttccactttttgtatttgtaatcccattagcacagggactttggcagcaggtgggagtgaagggcagctgagctgccactgggcagtcactgggcacaggaggagagcaccagcctggggagtggcttcactcacacacacagggatactcacctactggccaaccacactacacacacagcacagatgcagacattgacccagtgtcagccacatgccctggaggtgtgctccactctgggtaagcccaatatgtgaaaattcaaatagtcaaaacagctaaagtggagggaggttgcttgctttacaaaaagaagcaatcataggctgcttttaaatggtcagcagtccaaatgcattgaaaatagcatttggtttacacagactgttggac

SEQ ID NO: 131560 - DNA, 943 bp, Homo Sapiens
agctcaaattttttttaatgacattgggatacggtcagataacgacactgattccttgaaatatcttaagacttcttttctggacaaagtaggtggtcagtttccatccatgttccatatatgcatggaaagagtatgtattcttttcagatactgttgtgtctgtctctcagctcaagctcatgctcacctcacatcctatctttcacagggctttttcatcagttgcctctgtctggtaacagtcacaccagctcctgttcagttacagtctttgtctcataaccggagagtttcatcaaaagaattttatttacagctttatcatccatatgccactaaaattcacctgttttctttcaacctgcactcattttgattgcctggaactctggatttaattcttccatcccactttgtatcttgcattcacttcactctctctccagcttttattctttctttctctttccctaggtccaatgcacttgacccaactcacatgcgtggactccgggaaggtactgctccctccctccaaattctgagcagtaaaatgccgccccggggcacgtggggaacagaaaggaatgagaccccaacaggcagaagccaagagagcggggaggagccatggcgttctgccccaggatgcaccacgcctggacgtgctcccccgactcccagtgccaggtgcccatatgccacacctcagggttgtcctctgttcgggtgagctgcggactaacgtggcccggcagcagaggccaccgtcttctgtcccgtggctcctgcgaacacaggcagtggggaacaggcagtgactgctcagccccaccgtttcctcttccctgaccctgcaaacctcggggaagctttcaggcccgggaaagcagaccaggcccagtctccttacctttccctggtctaaggtctggatcgg

SEQ ID NO: 131561 - DNA, 1374 bp, Homo Sapiens
  misc_feature (731)..(743): n is a, c, g, or t
taccacctatcacaactcccagtcaaattttgcagaaaatccttaggtcactggattcgtttatcaaaattaagccttgtgattatgattcagcccttgcttcatatgtatgacttttatgcagaaatgtttctatttacaaaggtagaaaaaagttagcagtgcaagatagtggtttaaagtttgttttaaactgtaggagtctaattgtgtaatggaaagaaaacaaaacaagcaccatttcaagaagaaatgaattggatattttggaatttatttataggctaggcaataagttactcagattaacacagatcaataccaccttgacttgttgacccagagaattctaattagattttaggtgcatttttctttatcttggtatttaatacatcatctaagtcagtaaccgtgttaaacaaaattaaaatgacaagttacagcttacttcacagtctatttcaaattcagcttgtccactaggtcagttttacaggagatggtcttttaacatgaagaggtctgataatctggcaggtctcttctctcccaattaaaaaaacaagagtttttttgctagcttgacaattttataggtgaaaaacatgaagtgagtaaataaactaaaccacaaagatggacaaaaagcaatatgatataaaacacatcactttttctatttgtattcagtgaaagtttttacatttcaagtaaatgagccttcattnnnnnnnnnnnnncaaatatatatgaaaaattaaagtaccttccagttctagcttgctgaagtttcttctgcaaaagtacaaaaattaacccactaagaactaaacaggacagggccacggcaaaggcagaatggctgccatgttaagacttttgcttgccttatactgatgggtatattttaggtgataaattttctccactatctatcacttaaaatgaacattttcttacaaactttatttgtaagaaactgatttttattaattagcaaacacactgagaggtatctgttgatctaaaattctctaaatccagataaatctttttaaaaatttatttcacacatgaggctttaatatttttagttaggaaaagatcgaatctgaggctataatggttcaacctacagcatcccttttccatagtggagtaaatctgtgcaaaatatttttccttatctctgaaaaacaaattaagtagaggaaatttaaaaatgcactttagccaatttgcaccaatcataaaagaaataagatattctttcccttaccctcactcaaccattccaatcaggggagaatactgcaaactttaagcggacgcgtggtcgacgatatcccgggaattccggaccggtccagc

SEQ ID NO: 131562 - DNA, 572 bp, Homo Sapiens
ttctgaagtgctctgctctaggctgggtcctgttgccacctgcctgttctctggttggcttttgcaggagggcagcttacgtgtttgtcaaccagttagaaagccagttcctgtgggtcgagtttaggcctttttggccatagttgagaattttgacttgggatactgggttgttggtgacaaataatgtcttccttttcccccttcccgcctggctcggttatgggaatagccgtcagtgcatccatgtctgtgaccaacacccagccagactaatgtacacagcagggagaaataacattcaaatggtggttcacacatctcatctcaagataagattcttagggttcactgctttattcaaaagtgttttcactgtagctccttcatatggaatatcaaaactgaagaaattcacatgtggaaatgcaaatagacattgattaatcaaggtagcatctttatgtaaatatataaataagtttgggcattgaaatgtaaactgtacagctaatagacttttctcctctgcaatgtgggttgctgtcatttcagtaatgtgtatgtttaca

SEQ ID NO: 131563 - DNA, 796 bp, Homo Sapiens
  misc_feature (1)..(1): n is a, c, g, or t
  misc_feature (36)..(59): n is a, c, g, or t
  misc_feature (778)..(778): n is a, c, g, or t
ncatacagaaactaagtttattattttttcttcttnnnnnnnnnnnnnnnnnnnnnnnncctcattgtagagaagcccctcccccttcccctaagggtggggggctgtgtgaaagacagctggggaatcaagtacaagggggtggggacagagactatcttgccacccttaacactgcccagccacgtggggtgaaggggaaggggactgtgatgatccccatttccatgacaaccagttgcctaccccctactttggtgggaagaagggagaaggcccctatgtctccctggaggctttccccctcaagacttcaagtagtggttaacagagtcaggcctggtcatggagggagtggccacggtggaaagcctaggtggaggggcagcccactcacgtcttggccttgcggcctctgtgactaacagcagggccagccagggagggaggggcgctgctgcgcaggatgcgctggtccccttggttggtggtcccaacaagccggcgggggccaggacgtcggcgtggggtcccatccccttcctcctcctcacctgaggcttcagcctcagactcctctactgaaccctcaggccccaggggacttgggggctgtaggcggccccgctttgccagcccaggactcccaccaactggggcccctgctcgtttgcgaggcaacttctcagtctctagtggggggactagagaccctggacgcagccgggtcgagcgcagttttggggttagtgagacacaggtggtgtcattccaaccngctggccgctatctgcta

SEQ ID NO: 131564 - DNA, 1809 bp, Homo Sapiens
gtagtggccaaaaaaactttattagcttagtctccacccttttaaatgtactctaggtacaaaataaacattatacacatataagatcagtctttccaactttagaatgtataaataagaatgacattttaaaataaaatagtttagtcacagtcacacaaaactaccttctaaggaaaactgtccagtgaagccgttaaatttgtgctttcagctatgaagaattaaacttaaaatgcattcattcttcttttaatgaaaaataacctacccttggaaacagcataagcattgttatggtagtctagctcctaaatgaaaatgtggactgagttacagtttactgtagtaacctacctaagaagcctttgaaaattagcaatcgatcaaagtatttacataaattcaagcctttttcttaggacaaaaggtaacacagttccttaacctcttttaaaaggaactttgaaattaaaccttatggtcacaactttcattcaaaaatgttgcttaaatatcaaatttctcttcacagacgctatgtccattttcttcgtaatcttctcttgttaccaccatatcttcagaatcatcattctctgatatcaattttccaccttcccaggcataagtaatagggttttcaggcagcacaacagaaacatcataatctgttggagtaagacatcgaacttctgagtaaacccgatccctaaatcctgggaaaagggaatttcctcctgtcaagacaatgttcttaaaaaaatgcggctgcatttcttcaggtagattttgaattgaatagacaatagcttctggaattcccatttcttgaatgcctatatcagaaggattaaagagtatttccggaacagcaaatctctcattggccaaacgaagaatttgttccccagatttgtattttccactcaacaccatctcttcccttggcttacaaaagccctttttaattgtactgaagtcaggcaagacatagtctatcattactgtattttcttctcctttcaactttgcaatatccatgtctctatgaaattcctgagacacatagcatacatcttctttcacttgattaatcacatgtgtttcatccataacatgtagctgcctgtaagatatgatctcctttagatgattggttaagagttttcctcccacatttatccgaataattgcttctttttttctttttacttctacaataaggaactatatgtgtaaaggaatatccactatcaacaatgatacagcataattcggaaggattatctcggaaatacctatgtgcactgagagccccagcatttactcttaatactgcttgaaactggtattcttcaaatagaatttcattcattgattcttgaattgaagtgaagttaaagtatggttcagtgataataatattagtatctaaaaaatcaacctgatacatttcttttccaaaaaggtaatcccgaacttgtctctgaacatcccagttcaccaagtagcccttttgaaaagggaggatgtaaaagagtccagaagggtcttttatttcatctatctggttggcagtaaaagttttaagacgtgctgtttttgaccggaactgacaattaggaataaccgacacattttcatggctgtaaccgattttggcgttgtaagctccattatccagcactaaggtcgtcatctcaccaccaaccacaccgcagccgtagttgttttccctttccgacccctctgctcccccggccgtaatggccgaattcccgggcatatgtccggtaccgtcgactg

SEQ ID NO: 131565 - DNA, 611 bp, Homo Sapiens
  misc_feature (505)..(559): n is a, c, g, or t
  misc_feature (584)..(584): n is a, c, g, or t
aaaggaagtagcagtgattgggaggagtataaaggaggctgtgaagtgttgacagtgttccaatttctttactgaatgtggttattcacgtttgctttgtgttaatgaactgtatacttgttttgggtattttcctatatgtatgatatacttcataattttaaaaaaaatttgaaatattatgaggtccaagataaaagatatgaaaatccattttaatcactcaaatctccatgtacaggatggttgttgctgttacccaactctttcactcctctctcagctctggaaccaaactgtctgggttcagtctcagctctaccatttagtagctgaggaccttgtgcaaatctgtttgtttcttcaagtataaaacgagaacactgtcattttagaacatttcttccagttttcactcagatagttggtacctatcatatgtgatatattcatatgatggatatgatagtacagacacctactgagtgactgaaaactggaggannnnnnnnnnnnnnnnnnnnnnnnnnnnnnnnnnnnnnnnnnnnnnnnnnnnnnnagtagcagctgctactactcttggnctcagagtctctgtggacgtacaaggg

SEQ ID NO: 131566 - DNA, 770 bp, Homo Sapiens
ttttctctataggaccagtattcagagcggaagactctaatacccatagacatctaactgaggttgttggttaggacattgaaatgtgcttttaattaccattaccacgaagttatggaagaaattgctgacaccatggtacaaatattcaaaggacttcaagaaaggtttcagactgaaattcaaacagtgaataaacagttcccatgtgagccattcaaatttttggagccaactctaagactagaatattgtgaagcattggctatgcttagggaagctggagtcgaaatgggagatgaagacgatctgagcacaccaaatgaaaagctgttgggtcatttggtaaaggaaaagtatgatacagatttttatattcttgataaatatccattggctgtaagacctttctataccatgcctgacccaagaaatcccaaacagtccaactcttacgatatgttcatgagaggagaagaaatattgtcaggagctcaaagaatacatgatcctcaactgctaacagagagagctttacatcatggaattgatttggagaaaattaaggcttacattgattccttccgctttggagcccctcctcatgctggtggaggcattggattggaacgagttactatgctgtttctgggattgcataatgttcgtcagacctccatgttccctcgtgatcccaaacgactcactccttaaattcacactttgccacttaactcccagtgtggatgacagagcgagaccctgcctca

SEQ ID NO: 131567 - DNA, 887 bp, Homo Sapiens
  misc_feature (176)..(176): n is a, c, g, or t
cagtcgacggtaccggacatatgcccgggaattcggccattacggccgggcaaggtagggctgagcctacatttgcttttgatctatctagtataagaaatattcacagaaattgtatgtagataccctttgttttgaaaatgctgttcagaatcatagtgtaatctttgggaccntatgccatgttcatttcactccttcccatattttttgtgtttcttttggtaaaactataatggttttcattttttacttaatatcacacagttaaactgtccatatttgagctttattttagcttatcagtgataaaaaacaggtagtaactgccattgtttgtttgttttcctaataaggcctgaaaacagccattccttgttaagaaagtgtacaatgtaacatatttgctagagttacatggattatatatttcttaaagggaaaaatttgagagtatcatggactaccaccagcattattattacagtagttactcagatttggttaaggaagcccaagcaatgtatagtgaaaggattattatctctctgctaagattcagatattgtttcagaaatctcagctccagtaattccacaacatctaaaaataaatgtttgtgatcatgtgtaagcatgaaattgttccaagtaagtgaggatattttagttatgtgaaagacagtttcatggaaggtatttgttttataccagtggctgggatggtggaattggggttatttctacaattattcttagacgattactaaactgttaagaaatgccccatatcatttttgtatctaggaaagaaaaaaatcagtttcatactgttgtcatctgtcagaaatgctcattttattttgaattaaatgtggcttttgaagt

SEQ ID NO: 131568 - DNA, 1933 bp, Homo Sapiens
ctttatagcatttataaatatatcatacaatactgtttcctgttatgtcatataccaatatggcattgtacaacaagcataatgccatctgattcttacaaaagcgaatcatttaaacaaggtcagtaaaataaacggtagtaccccgcttttaggcatacagattgtaaagctgaagttcactgtttctttgatcggttttgcgtagccaacagagaagtataaatcaaacaggaatcaaaatggctaaatatgcaagaaatcgttattcacagtgacatggctacatagaatgcattattctatgcatattctttccgttggttgaatttcaagataaaaagcacttgttttctacaggttcacaaaacagcgtaataacaagaacgatcaaggagaatgtaatgtaggcgttagttgagattaacaaactatggcccaatgcttatgtccactgcagagtacttccaaatccaaacaatggttacagaaaccatttcccatctttcctaacacagagaaaaagtcttgcctgctttccaagaaaccagttctttataacaaccatctttcttttcaattaacgtccataggagtatcacatgtagtccatcttttatagccaaatttaatgtcactacaaaagaaagcaaattggacgatagtcacatgtattagcatctagaaagctgtaatggcatgaagatatctatataaatcaggggtttaaaatttttttccttaacagtctcaggtatcaaccagaagaagttgctgatgacccatttactgatgattttcgaggtctattggcaaaagaagattggtggttaccgctggggctgttgctggttccattcatagtactggaaatgtgaggaaactgtggatgaggagactgcactggagtactggggctaggcaaacaagaagaggtggagggaatacctcctgctgggctgttggccttgtcactcccagagtcactttccagttctccagcatttgtcagtccatctctctggtgactgatcttcattcttttacaagtaggtcgaactctgtatttcaatggaagtggacgattccttctccaggtataaatgtaggcaatatcgattagtgtataataatcctttaaaggttcctcctcatacatgacatcaatctggaaagtattaggtatgtccattttacttctgagaaactttcttaagtgcatcacagtcattgctgctgggcatcgtaagtatcttttatcattcacctcctccttagatttctctttgtctttgtttactttccgatccaatctgttctggtcaaagaattcaatggataagcttattatctcatcatcagttataattctcttatcttcatctgcaacctctcctctatcttcattagagccattggcagcatcagcagaaggatgagctgcataaaaatcccttcttctcttcatttcatttttgaaaagccctggaactaatttgtatacaatatcttggagagttttatctgaccttatattcagtagtggtctggtcttgtgaacttggacatcacaaataggacaatacttgctggtctccaggtaacgaacaatacacgttttacagaaggaatgtagacattctattatggttgtggcatcaatgaagtaccctccacaaagcacacacatcaggtggggatttagctcagtgatcttgattctcgttgttcgatgcatttctgcttgataaaaaatcccggaaagagcagccggcgcgaggcgatcgaagcgggcggaaaagacaatgaaagttaaaagtcgttcagcagaaaatgaatgcgagccaagcggccatcttgaagcgagctgcagacgccgctgtcaatgggcaaccagcgcggccccgagcagccgcggccgccacgctcgtct

SEQ ID NO: 131569 - DNA, 1420 bp, Homo Sapiens
  misc_feature (82)..(116): n is a, c, g, or t
aagactgatcatccactatagggcgctagctcgtcgagcgaacgaccgagcgcagcgaagtagtgagcgaggaagcggccgnnnnnnnnnnnnnnnnnnnnnnnnnnnnnnnnnnncagtcgacggtaccggacatatgcccgggaattcggccattacggccggggcattctatgtagccatgtcactgtgaataacgatttcttgcatatttagccatttgattcctgtttgatttatacttctctgttgctacgcaaaaccgatcaaagaaaagtgaacttcagttttacaatctgtatgcctaaaagcgggtactaccgtttattttactgacttgtttaaatgattcgcttttgtaagaatcagatggcattatgcttgttgtacaatgccatattggtatatgacataacaggaaacagtattgtatgatatatttataaatgctataaagaaatattgtgtttcatgcattcagaaatgattgttaaaattctcccaactggttcgagcctttgcagatacccataacctatgttgagccttgcttaccagcaaagaatatttttaatgtggatatctaattctaaagtctgttccattagaagcaattggcacatctttctatactttatatacttttctccagtaatacatgtttactttaaaaattgttgcagtgaagaaaaacctttaactgagaaatatggaaaccgtcttaattttccattggctatgatggaattaatattgtattttaaaaatgcatattgatcactataattctaaaacaattttttaaataaaccagcaggttgctaaaagaaggcattttatctaaagttattttaataggtggtatagcagtaattttaaatttaagagttgcttttacagttaacaatggaatatgccttctctgctatgtctgaaaatagaagctatttattatgagcttctacaggtatttttaaatagagcaagcatgttgaatttaaaatatgaataaccccacccaacaattttcagtttattttttgctttggtcgaacttggtgtgtgttcatcacccatcagttatttgtgagggtgtttattctatatgaatattgtttcatgtttgtatgggaaaattgtagctaaacatttcattgtccccagtctgcaaaagaagcacaattctattgctttgtcttgcttatagtcattaaatcattacttttacatatattgctgttacttctgctttctttaaaaatatagtaaaggatgttttatgaagtcacaagatacatatatttttattttgacctaaatttgtacagtcccattgtaagtgttgtttctaattatagatgtaaaatgaaatttcatttgtaattggaaaaaatccaataaaaaggatattcatttaaaa

SEQ ID NO: 131570 - DNA, 1260 bp, Homo Sapiens
ttttttggagttgaaattctcataattttaatgatcaatagcttctggtgggctctggatggtacagttaaacaatagacttaaagacctcccccaaagcacgtccacaccccctcggcagcgtctgcctccatcagcattccactgcccagtcggacttccacagcctcagacccccctcttgggttatggaaatccacatcttagtgtaatgagctgaaaaaccctgggtacacccgtgatctgttattttttaaaaataacaaatactaagccaaacacctgcccaggctctgctgcctcacagagtgtggcgatctgaatactctgttgtctcttgtgggccgggtggttttgcttcgctccctgttctactgaaatcatacggcatagagttcgtaaatcttctttacacagtacaccagggcggccagtgctatcgtgttgtgcagtctctttctgtgcaggtcgtccttccggaccagcaccaccggggtggaggaggtgagtgtgtgcagaggcaggcgcgacagtttataggcgtcgtactccacttggtacttgcagcaagggtcaaactgccaggagatcccatagagggtgcagcaggccaggctcagcacaccagcgggcagggaaatgtagtgggaataatctaagggcagcgccaacggggtgaagaggcaggcggtgcccgccagcacggccgtcttgtgcaggcagttgcccacggtgatccagcgggctgtctcgtcgccaatgcgagtgggctcaatcacaatgtacttgtactgggcttccagggcctgctccagctcgtactcaaactggtcttgggcattctccccattgtagatctcatgcacaatgtagcagtctgtggccgacaagctcaccattccaacaatcacggagggctctgggaggttcaggggccctgagacagtgaagccgagcagcccaagtaagacaggcagggctgtctgtgagctggtccgggctggcacacggtggcagaacacagatacctgcactgtgctttcctagatgggcaagtgtgtctcaaagacgccgacaggacaagtggcaatctgtttgatgtgctcgttgccagtgtgctgaattttggacaagaattcaggttacagctcagagtctgatgttcttcattacaaacactgttggttccctctctcgggcgctgccgccaatgctgcccgggccaagacgcatccggaaaattccggaccggtccagccg

SEQ ID NO: 131571 - DNA, 1025 bp, Homo Sapiens
  misc_feature (736)..(736): n is a, c, g, or t
  misc_feature (797)..(797): n is a, c, g, or t
  misc_feature (845)..(845): n is a, c, g, or t
  misc_feature (854)..(854): n is a, c, g, or t
  misc_feature (856)..(856): n is a, c, g, or t
  misc_feature (903)..(903): n is a, c, g, or t
  misc_feature (912)..(912): n is a, c, g, or t
  misc_feature (930)..(931): n is a, c, g, or t
  misc_feature (953)..(953): n is a, c, g, or t
  misc_feature (989)..(989): n is a, c, g, or t
ttttcaaggaaaagtatagcaacagactttgttattggtctgagatctcccccagggaggtcaccccacacagggacaggaggtgcttctgtagccccgagtcttagaggcaagcaggtgggagggggctaggggaagaatgccatggcctcatcctccctgagtttggccttgatgggatcccttggcaacatcagctcctggattatggcgtacgcaggacattgtggggcgaagcaatttttagccagggacagccacagcagccccactggacccttggatgcactcttggccttggagaactgcatctgatactgcaccgtggcgaggaagccctccagccccacctctgtgatgcggttccggatgaggttgaggtgcaaaaggaccttgttcccaggcatgaaaactttcccatctcggtgctccacaggctccaggagagggttgaccacctcagtagcctcaacaaccagctcggactccaggaggatgctgcgcttctctctgctcccgatcttgatcccttttgccctgcttggcttctgttcagggatggttaccttccccttgcctgcctttgtggcatcttccttcttaggggttccttgtgtgggtgactgcccagaccccaacttctcctctttcttggccaattcccatgatttctcctttttcttgcccaggcccttaggggttttcattgtctgcgtcttgtctgtcttgtccacantgcactattgctgatccctacatctgactcttctcaacggtcgttttggagtcccgtgtcnagaggaggagggcgatcgcgagcgctcctgtgtccctttttccagcangaggcgtcngngctccacacttcggtgtgtgtcagctcggaagcgcgcaagactcaancagcttcanggcgcctttttctggatnncggtgtggggcagggacagcanagcagggaccggtcacccggaggcgtccgcgatgtncctgcgctcctccccattgtgtttaaaccaaggtga

SEQ ID NO: 131572 - DNA, 689 bp, Homo Sapiens
gccatctcacatgttggtgttcatttaatttactaagtattttaaaaaataatgccttccctccaacaagctcagtttgcaaatacaaacagtaggtgcacactgaaaaataataatctctaaatctttttacttgcaaagactcaactgttatttaaaaaagtctccctttacgggtatgcaaatttcctacaaaatttcctcacaatcttcaatcaaattaaagttggattatatcaagtggctgtccattcagtttctttctggaaatgttgagttatcctcctgggaatattcagagtttcagggttttagcacttatggcattatagatgtcctcagtcataggcacatacatttttgctgtgtcatccaagaaatacaaggcatctttgatgacagcagggttaaagccctcctccaccagggtcattttgcggtgtttaaaagttccagtgatctcaatggtgtcctgtattcttagaaaccggggccttgcataactaggtaggtaatcagcaatgtgctgaaagagtttctttccatcaaattcatggttttctttcattttgatggaggccatgccaatgcgaccctcatgatctggcacatgcactccataaacatttacttcttggacaaaatcaaccagtccaactgtatcagcaacttcagtggtggccacattt

SEQ ID NO: 131573 - DNA, 1025 bp, Homo Sapiens
  misc_feature (728)..(728): n is a, c, g, or t
  misc_feature (766)..(766): n is a, c, g, or t
  misc_feature (772)..(772): n is a, c, g, or t
  misc_feature (818)..(818): n is a, c, g, or t
  misc_feature (833)..(833): n is a, c, g, or t
  misc_feature (845)..(845): n is a, c, g, or t
  misc_feature (850)..(850): n is a, c, g, or t
  misc_feature (867)..(867): n is a, c, g, or t
  misc_feature (907)..(907): n is a, c, g, or t
  misc_feature (912)..(912): n is a, c, g, or t
  misc_feature (921)..(921): n is a, c, g, or t
  misc_feature (944)..(944): n is a, c, g, or t
  misc_feature (957)..(957): n is a, c, g, or t
gcaagataaagaaataattgttttatcgtgcatcagactatgtcatgggacgtcacaatggcaaagagcctagtataaaaattggaggatggggtggggcagcagagtgggttagcagcatccagagctgggctttatccagccctaggcctcagggcatcacctttgccttgggacgagaggagagtggtttgggcaggatgtggaccctctggccaatttccaggccacggtgaggccaagagggggtgggctatgtaagggctgtgccagttccccctgggacagtttggagctgggcatgtccaaagaagctccttttcctgtggctgtggatttctttgatctctgcagcactggcggtggttggcctgggcagtggttcctagaatttggtctcattaacctaggtcgcaaccttcagaaccccaggaagatcagctttaggaactccctggcaggtgaaaagggcagttcccatcataccagcatccagcctggacctactgttccctggatggggagagtggctcagctctttcctctgggaggggaggggtcctcattgttccctctttctgggtctagcctctgctagtgaggcatagtacttttttttgggcttagtagacagctgaacagccagccaggggagcagcggacccagctgggcagctgtggcgacagttggctcagctttcatccacatcagagctggcctgccccangattatcaaccacatttgaatgtggctccagcactcancttggntttggctcctccttgtaggacatgagcaaaatcttggctggggcanggtgttgaccctctncatgaggagcanactangaggacaacacatgctngagaagagtctgcagctggagccaatccgactcggcgttnatcancatgaccangaccagagctgggtcgggacccnatggggataaaancaaaactcaactgaactaacccatttggggatctgaatggctaaaatcccgggattgaccactaaaaa

SEQ ID NO: 131574 - DNA, 1144 bp, Homo Sapiens
ataatcagtgttttatgcaatagttctatgatcttactaaacattttcaataccaaccctttattataggtaaatgatgagttatagcatttaagacatacattttaattttaagctatcttaaggatattactatgcaaagtaagagttaaaacactggagcagcgatattgacaaataactctgtgtttatcccaggaataatatgcatatggtctctacaccaaccaaaactggacctggtgggtctcagccaatggcaacgcagccagatgtttcaaatcagcggaggcacttcagggttgtcttcaaaggttgggtcttcctcacttggtataattttgggttcaggtcgtcttctgggtgtgtgttttttctcttgaactatgttagtcacatcagggaatgagtgcttgctagggtctacttctagtttctccatgtgcttgcttcttgtatttgtttgttctctgctcctgtccgaggtagttttcatagatttgaatgctcgctgaccacctgtgattacttctcctaccttgggcatgcagatgaccaaatgacccgttgtctgagatcttttagcagaactactatcgggtttcacttctgcaggaaggacaagctgaaatggctttcctttgatcattactcgcacgtaagttggttgcacatcaacatcgattaaagaggtatccatatacctatagacagcaaggtccaggatgatctgcttttcgttatctttcaaagagaagtcaattttagggctcattcacatttagggctttcccatcttcagtgatcaaagtcctgggtggtttcactttcttctttaatgcacttaaatttttccctgttatcttcacgtatgtttctaccatgtgtctacagaagtttccaatctttgatttcagcgagtaaaacaaaccaggggcttattccagaaattctcagatcaatctttcactgtcatgtctaatttactgttgatgatttgtgttccctcataatagtccagcgtgcctggtcataggtgagcactatacactcttaaggacgcaagacagttgccttcgagaatctctgttcaaacagtctttaaaaccctagttaacatatctagttatccacaataaaccat

SEQ ID NO: 131575 - DNA, 860 bp, Homo Sapiens
  misc_feature (99)..(99): n is a, c, g, or t
  misc_feature (101)..(102): n is a, c, g, or t
  misc_feature (124)..(140): n is a, c, g, or t
  misc_feature (168)..(168): n is a, c, g, or t
  misc_feature (173)..(173): n is a, c, g, or t
  misc_feature (175)..(176): n is a, c, g, or t
gcagtgtgcacctttccctaacgggggcccccgccgcccaaaaaggaatggttttagaaaaactttttggggggccggagggggcccacacatgtttantnngaatttaatataggtttataannnnnnnnnnnnnnnnnaaaataatgataagtggggggggataanttggntnnggtttttcagaatcgacgtttttattatgagggtcgtgggtgcggggtctcagaggcctggccggggctggggctggggctggagttgggtctgggctcacgctccaggctggtgttgggctcaaggctgggcttgggctcaggctcagggctgggctcaggatctgggctgccgtcctcctccgggtcttcatcccaggggaaggtcggcatcccccgcatctgcttgcggtaggcacgatcgaaggcttcgctctgggccaccgtgaagtggttcttccagtcgccacagacccctttccggaggaaggccccgcgacggtggtccagcaggctgggaggcagcagcgtgtagttggacatggtgttggccttcatggcgctgaaggttgagtgtgccacgacggagcccagtgcctccttgcccagcggacggcccaggaacccacagatgcgctccacggagccctgtaagtcctgctgcagctcctcgtaggtgataaataggaagttgtctttgcccttcatccgaagccagcccttaatgtggtcgaaccaggagccaaactgcacttcgcctttgaggaagtccctcaggaactggtcgggtgtgcccgggtcctttaactgcccggcgatctttggagtaatgatagagggagaccacaacgtcccgggggttgc

SEQ ID NO: 131576 - DNA, 718 bp, Homo Sapiens
atagatagaacttttatgatgtgttttatggtttacaaaccacttaaagctcaccatttcttttgattcttacaagaactttctttatggaaggaaacattatcctcttttcatctcctagataaaaaggtaaattatttagcatataaatgattttcccaaggctaattcggacgagacagtagagctgggatttggatctagttttctctgagtcaaattcctctgatctttcttgaaagtcactttcattttgtcccaacacatctgagcagacaccagtggtttcagaacacgtgccatgtcttcttactttccttgcccctttctttcttaacaatattacacctgaggaacagcgcagaggcggtgactgactggggaaatggtgatacccattctaaacttcaggctcagcttctcattgtttgggggcctgaaggtaaatttttgcataagggaagtgaagaaaataaacagctcagtcctggccaactgttctccgaggcatgcccgctttcctattgagaaaggcataaaggcttcccttttcttaaactgtccattctccagaaaatggtccggattgaatgtgtcaggggtggcccactctgtggggtccctgtgcagcgccgtcaaattggtcaggatcatggtacccttgggcaggtggtacccagccaaagtggtatcaactgtcacttccctgggaacgttc

SEQ ID NO: 131577 - DNA, 717 bp, Homo Sapiens
  misc_feature (701)..(701): n is a, c, g, or t
ctatattttgacttgaaagaagactttattatactgtttgaattttttcaccatgtgcactggtaaagataagaggaccatccatattagattccagctcattgttgacttgtgggaattcaactcatgttattagcttctcatttttaaagggaaacaagaagtctgaattttatgtgaaactccctgatttttaaatgttggcaattaattttttaaagcactgtgtgggttgaacaacatttctgtataaggccactgtgtttagatgtaccctgaagaaggtaccccagcaacaaggtgggagtgaaattcaaacttctagagaagggctgggcctgcctagagaattctcacaaacgtgctacagagactgtgacaactctgcttctatgcaacctctggattatatggtaggacattacagctggagataatttaagtgccatattctgcaagaatgaccttattctaacaacccaagttgcccatctgctaggcctatttattcttctagcaatggcaatagattgcatgaagcctattttgtttagcagtattatttgtcactaatagtgcaaggtgcatgtgttaactgtatagtgatatatgtgtaatatacatgtgtgaatatatattcagctgaatcctaaggttttatgactaaataagggacacaatggcatttgtttttgtcacanagcttatatcatgttc

SEQ ID NO: 131578 - DNA, 867 bp, Homo Sapiens
gcggctctacttcctttattgaggtctcaagttccagcctccgcccgtctcgggcacaagaccaggcggggttctgcacgcggccgcccgggcaagcccagcagatgccccgtcaggagtactcgcagaggtggccgcagcctgcgggacagtgggagctgccttccagccacttcatgatgtgctgcaggtggccgccgtggctgcagccctggcaccacacgaagagacccttgactacgtggtggcagacggcacacatgctggcgcagcggtggcacctgtcgcagacccagccccggctgctcatgggccgcttgcagtggctgcagttgacgtgcagggtggtggaggcctggttgaggcagctgacggcgcggctggtgctcagcttgaccacctcgttggacacgttccagaggcggaagcgctgcagcaggtcgatgtaggaagtgtaccagtgctcctgggtctgctcgtcgatgtccttgcgcacccgttcacccaggacgatgagcacagacacagccatctgcacgtcgccctgctcagcgtagaagtgcagcatgtcgcgcaccagcacgccgaagaagtcgggcggcaggcggctgtcgtagagcgcgtgtgagacagacaggagcgagaaggaggagtccacgggggccagggaggccacatccgcctcgctgccgctcacgtgcggggagtcggccttgtcctgcaggtgctcgggcccgggaggcgtgtccacgatctcgtggcgcagacggaaaggcctcctgcggcagcacgcacctcagggtcctcggggtgcagcgtgttccggatccaggcagtacaggtcgtcctcctcaccttacagttgac

SEQ ID NO: 131579 - DNA, 1149 bp, Homo Sapiens
  misc_feature (95)..(113): n is a, c, g, or t
  misc_feature (934)..(934): n is a, c, g, or t
ttttcagagtttacggttttattttaaaacagtagtaaacaatttcattgatttttcttaaatcaaaccacctcatactcggcttgtctcaggcnnnnnnnnnnnnnnnnnnntaacgggagggaaacatggaaaccgacctaccttccctagaaataagcccctggtcttggcatctggaatggcttttggacactgcctttaacaaatgagaaaagaaagcaccaaaacattgtgcttcagcagcaggttaggaaactccacaaagaaaggggtggggaggattcgaacacagatcccgagtgacccagttcagtcctcaaaacttctgagagtctggaggcgtctcctctccacaactccctttcagagtgacttagagatgggggtccctttaggaagagccctcccacgaaccaggctgatagggatctgtgagcccacaccccagacacaggtttgagggggaccccaagcaggttcccagctggtcagagatgggtcaggaaggacaaggacatattcagagcacacagagggaaggacgagggacttcgggtgcctgttgcctcactcctctcctcacggctccttcccattttgttcacgtggggatgaagactaactgctactggatggcaggacaagaaagagctgtaaacagcttgggtctgctcacccaaatgtgcaggctcctttgtcagaaagcgattattgtcttagggacaggggaccagagaaagcccttgtggtgttgggtcagtacggggtagaacacaacgacagcagccgccagacgcgtgctcgctctgggccctgcccccagacagggaaacactgaccgaggttctggaacggcaacggtggcagggagggtgtggggtatgctcccctcctcctggcacccagcgcaccccggcccagggagaggcangtctgccctctgggcatagggcgaagggcctgggaagctgaccgggagccctctgttcacagggcagccaccggagagcagattcttccagctccaaaatcctgcctgcctctgactaaaccgaacgcgtgggtcgacgatatcccgggaattccggaccgtacagcctgctttttgtacacactgggtcatattacaatgtttccggttgccgc

SEQ ID NO: 131580 - DNA, 1209 bp, Homo Sapiens
  misc_feature (842)..(882): n is a, c, g, or t
gtagcttcccttatgacctccacagtggagtacattaactacattttcacaaacagaaaacttacatacattcaactgtttacaagacatgtctccatataacacatttacattcatgtgaaatctatgaacttctttaattgcatatatttatgactcttacatctggtaccttttaaaacagctaacatatagtatgcttatttcctataagttaattaatatatgactatttaaggtgagaagagtctcatttgaagaattacaatagttatattcataccatgggaaatcaatagtttttctaaacataaatttcaagctaaagctttagcaatttaagttatttaactaccaatgcatgaaattcttatcagattgtcccatttggattacagtttaagtcatttcaagctgttcacaattatttgtgcattggtgggggggaaagcaccaaggataataaattgatttttcacatcacagatgaaatcacagcgcaatgatttcaatatcccttcaaaaatctaatcatttataaagagcatttatttcaaatgctcaatctttaagctttcttagtgtgatcaactgatacactagggataagaatggaaatggttaaaaacagatgctatacataatacttactaacttaacagaattcagatttctcctaacattgttgatttccatttttgaactgacttctttagatctaaaaagaactctgaaagtaagtgtaacatttatacacttgtcaactatacttaaaaagaaactctgaaggtgcctttcttgtcaaaatacaaaacaaaagttttcctgatgaacaaggcacnnnnnnnnnnnnnnnnnnnnnnnnnnnnnnnnnnnnnnnnnaattaatatataaatctatgtgcacaaaggtgtagttctcccagctgcatatgtaatattttaaataacacacaataaaaaaattcaaaacacagattgaaaaaataacccatgtggctaatactccagttgttaaatattgcagcatatatgtcactgtaacaattgggaaagatattctaatctaaacggttaatgaaatctctttggaaagacactttaaaagtccccaatatgtaacctggctgtcaaatttcaatctagaagttttaacagccccggccgtaatggccgaattcccgggcatatgtccggtaccgtcgactg

SEQ ID NO: 131581 - DNA, 677 bp, Homo Sapiens
  misc_feature (562)..(562): n is a, c, g, or t
tcttttttaaaattaaattttattattttgctctaacaaagtaacctcctactttttcaaggctcagaggtggtcaacaatttgcccaactcacatggcagatagtggcggagtcaaacagggcactcaggtagggctattccagcccagagccgtttgcttggcctgcagtaccgcctttggccataagagccactcatggctggtcctggaggaggcaggacatccccaaagatgcttattgacgccagctggacgtggctggcgggaagactggcacctgttcatgaaaataaaatctcctgataaggttttcttgcggagcctggttgagcctgaatcaacaaacaacatcctgaacctgagcaccccttgctgagctaggaggaaaggaagggtgaggggaaacgtactccagctctgtttgtcagcttcattagttcacagagtttatgacctgctgcagggaacatttttgtgtgtaattcaaacacattctgttttatcattccctccggtaccctggctgggacaagaatgggctgatgacagccagcccctngggtggtgacttcagggaaaggcaccagcaagatgtgtgtgtggggagcttggaccgccagtcacaggcacaggtgtacggggagcaggggtgagtccagccagccacttacccc

SEQ ID NO: 131582 - DNA, 647 bp, Homo Sapiens
ttttctcaggcactttttatttcatgctgtgcgggggccccttgtcccagatttgtggccacgtgtccaggtgtctgggggagtgggccaagcctgagagaggagggccctgctccagagatccccaggttgtccctgttgacctatagggaggtctgacttcaggcgttgccctcctgacccgtgagcagtcctgagtcgctggctcctattctgtcacacggggtgggtagtgccaaaagcagcctcctgcagcccttggcgtccggaagagtgacagccacattcaagtctccctggcacgtgaggtccatggtgcccctgactcatgtcctggctccagccaatagcccagacccccatggaaggttccagcatgtgcaaaaatgcacattggccaggtggctgccccccggagacatgtgtcagagaggcacgggtcaggtgacccaagtgtccaaaactctcatggagggtcccagcccattggccaccccaagccaaccacagcagggtctgagcctcagacgcgcagtggcctagtggcttctgctctgacagctcacgtccaggttataagggagacgggcagcgttaatagaaactttgtacatacacatataaaaaccatttggtcttccattaag

SEQ ID NO: 131583 - DNA, 1060 bp, Homo Sapiens
  misc_feature (61)..(80): n is a, c, g, or t
gtgctaagctaaaattaaccctcactacaagggaataagcttgcggccgcatacgcggtcnnnnnnnnnnnnnnnnnnnngtgagaaaaagagactttattaggcacagagggcgactggtaggcagttacaaaatggctactgggcttcctcccaagctggagagtagtaccccagggaaaggaagggcagaggagcgtgtgttttctctgccttctcccttcaaggctgcatacgaatggccccatccagccggatgacctctccattgaggaatgggttctcgatgatggcctgtacgaggtgagcatactcagcagggtcacccagtcggctagggaagggcacttggctggccaagaagttgcacactttctctgggaggctggtcagcagtggggtgccaaacagacctggggcaatggtcatcacccggatacctatgggagccagatcccgagcaatgggcagtgtcatgcccactattccccccttggaagcagagtatgcagcttgtccaacctgaccctcgaaggcagccacactggcagtgttgatgatgaccccacgttggcctccctggtctggttcattctggcccatctcaccagccaccaggcggatcacattgaaggtgcccatgagattcacatcaagaactcgctggaagtcttccaaggtatgggtctggcccttctttaagttgtacgtcttgctagccaccgcgatgcctgcacagttgacagctacatccacacggccaaactttccttttgctagagccagagctgtttgcacatccttctcagaggtcacgtcggctggggcgaaaacgcagttgtttcctaacttcttggcttgggcctccccacccgagttgggcaggtccagaagcacagcagaggctccctgccccacaagtcgctccgccgtggccaggcccaggcccgaggctcctccggttattaccgccaccaggcccttcacgctccgacacgctgctgccatcttgtcgccggccactccacgcctcgtgccgattcacacccggcctcactgc

SEQ ID NO: 131584 - DNA, 1036 bp, Homo Sapiens
cccgtgcctaaaggtggctgcgtgcagagtttcgcccgccttttttgtgtgtcaaaaagctctttcgcacacgggcctctgtagcaatacagtggtacgggttcccccgcgggtggttccgcccggtaaggaggccagggccgttttttctgcccttccccctacaggcgaatccgaggcccatccacccggaggcctccccattgagaatggttctcgatgatggcctgtacgaggtgagcatattcagcaggtcacccagtcgtctagggaagggcacttgctggccaagaagttgcacactttctctgggagctggtcacagtggggtgccaaacagacctggggcaatggtcatcacccggatacctatgggagccagatcccgagcaatgggcagtgtcatgcccactattccccccttggaagcagagtatgcagcttgtccaacctgaccctcgaaggcagccacactggcagtgttgatgatgaccccacgttggcctccctggtctggttcattctggcccatctcaccagccaccaggcggatcacattgaaggtgcccatgagattcacatcaagaactcgctggaagtcttccaaggtatgggtctggcccttctttaagttgtacgtcttgctagccaccgcgatgcctgcacagttgacagctacatccacacggccaaactttccttttgctagagccagagctgtttgcacatccttctcagaggtcacgtcggctggggcgaaaacgcagttgtttcctaacttcttggcttgggcctccccacccgagttgggcaggtccagaagcacagcagaggctccctgccccacaagtcgctccgccgtggccaggcccaggcccgaggctcctccggttattaccgccaccaggcccttcacgctccgacacgctgctgccatcttgtcgccggccaccgcacagcgtgggtcgacgatatcccgggaattccggaccgtaccagcctgcttttttaacacactggtcatagtacaaaggcc

SEQ ID NO: 131585 - DNA, 607 bp, Homo Sapiens
  misc_feature (534)..(534): n is a, c, g, or t
  misc_feature (577)..(577): n is a, c, g, or t
tggtaccttgcagtttagtctcttcatttatgtcctcctgaaatcttcaggaattgcactattttgtcaatacttctggggtcgtacttagggggacttaaaggagatgtgatgtggcagcctttgactcaagggagtatcatactagctcaaagagatctgggtacatgccagttgaaccaactcttttgaggatgtgatagatcctgggaggccactctgatcctgccaacgttgaggccagatgagtctttgaaaaacatggtttggcttaacaccagcacttactttaacaccccccatgaatcttgctgaactgaagctatacaaataccttttcaaaagattttttttcattccagatccttcttagaaattcctaaggctcaatgctttgtggaagattttgagaaagaaaatagtttccgatctttgggattcccctgagatggtccaatttgcaaaaagttcattgccatttccatcaaggacactgagaacaagagttttatccgggttggttcctgggaattnagaagcttcagcagggcttccgctgggaacttaggattcaggntgtggacaaccccaacctgggaccatctgg

SEQ ID NO: 131586 - DNA, 795 bp, Homo Sapiens
  misc_feature (771)..(771): n is a, c, g, or t
tgtcgcacctagccagcaatatacaaccttgaagggttaatagtgacatggacagaggcaaggtgcccagttacacattttcagacatcatcttgtttattacaaaacttaaaacaccttccaggcaagatccaaagcaattttattctaacattgttcaccttcatctgtagagtcaaatgtatctgccagcttgtgttgacaagggggaatgcttcccatttggtcaaggttgagggacagtaaaggaatcttgtattctaatgagtacagcatcctttcattgtccaagccatccaccttaggctttgaggttcaagtccaggtctggagaagagaaagtttcatacccaaccttgtggtctttccttcggtagtacattcgtgtcagcacagtcattagaaaagtctccagtatgaggaggtggcaattcatcacttgagacctggttttagaggaatagggaggcgaacaagcaatctgcccaccgttggccaagactgagaagatggagggctgtagggcagtcaggatgaggagaacctggaacagagcaaatttggctcccatgttctgctcacccaggtgtagcctggcttgacgggaaatgatgcccagggtccagagagccagcagtgtggacacgccaaggaaagtgttgatccatagagctgtgctcccctcagaaatgtctgctgggtcatagatgccgtcggggatgagaaacaggcccaccagggtcagcgttatcttcaagaaggcgtattggnaagggcccaacatcagcagctgaa

SEQ ID NO: 131587 - DNA, 692 bp, Homo Sapiens
  misc_feature (566)..(566): n is a, c, g, or t
  misc_feature (620)..(620): n is a, c, g, or t
  misc_feature (657)..(657): n is a, c, g, or t
gaggttagtaagtattcttttattgtgacaaaccctctcccaggcttagtcagctactcctttctctggccagagaatcccataaggaaatagcccccacagccagggctgctctgctcagaggaagggaaggctgggctgtgggtttaggagcaggagaacggggagggctgaggaggccgcagtgtaccctgtgagcccagcggaggtgctggctcctgaggaacaagctgctggaggctaaggacaaaaggtggccagagtagtggtccccagttgccctctggagctgctggctctcaagatggcagagctgggggctgtaggctgagatagcagccccagccccaggctggttttccagggacaaggcctcttccactatctgtgctgccctctgatccaagggctcctctgtctgagtgtcttcatcatctgctacttccagggcccccgctgtctccttccttcggtggggagctccatatactcctataactcctgatgggaatgagagtgtggggagcttgcttcttggctgaatggtctgctggggtctggcatanaaagcagatggcttaattcggtctggttcctttggagagggctgggttacctgngccctgtggccttgggccccctgcctgtggggcctanacttcgagcctggaggtttgcagcagcccctgggc

SEQ ID NO: 131588 - DNA, 902 bp, Homo Sapiens
tttttttccaagggatcttatattatccagctctaagccctcccaagaaatgagccagtgagcatggggcatggtggtgggggtggggaagcacagtctggtttcactgggcatcgaggagtgccaggcatctactgctctgtccctggataagtcaggctggtgggaagaggcagcaaggagggaggacgtactttgtgaagacagacggtgtctcctctgccatgttcctgcaggcgtcaggggctctctgaagcctgaactggggagtaggaaaggtaagaatggccagcaatcagggtccaagcccagtgtcccttctctaggcccaaggccacagggcccaggtaacccagccctctccaaaggaaccagaccgaattaagccatctgctttctatgccagaccccagcagaccattcagccaagaagcaagctccccacactctcattcccatcaggtgaggggtccctggggctcaggcccttctcagctgccctttgacagtgacataggttggtccctgctgttgttggggatgtccatgggagcagaatgctcagacacaaagccggcactcatcataactgtctccagctgcccccgtctgtatatcctgtcccttcttcacagggcctcatcacatgaaaagaagcacctggaaagggcagtgcttaaagcgataagacttcaggggtgggatatagaggggatgggggtgggaccaaaggcccacctctcacttccttgccatcctgggaggtggtggggaatgcagaaccaggttcaggggagggaaaggggctagcatgaaggtccagggcaggaatgctgagggctcttccagcctgggcatcacccagtgctgcctcccctctttaggagttataggagtatatg

SEQ ID NO: 131589 - DNA, 391 bp, Homo Sapiens
tccgggtctacacacagtgactttattactctatggatgctggtgaactgccctccccaaccagcttcacgggggcaggcatctctgtccatcccatgcctttgggtcacagggggcagcaagaccaagaagaccacagccaggccctgggttcagcttcagagccatcacccgctgcctcccccaacccccaatctcctgagggaggagaattcctagggacaagacccagacccctttccttcagcctctgcttcaccaagggggcctggcctgcgcccgagctcctcctggcctgcccctcaggggtcccaggtcctcacctctgctcttcaggcaggaaaagggcagggagagaggaatggaggagggagagggaggctggccccca

SEQ ID NO: 131590 - DNA, 1294 bp, Homo Sapiens
  misc_feature (44)..(44): n is a, c, g, or t
ttcagttgcccgcaaagctcctccctcggagtcgaaccgcatcntgaaatctcctctcgtccatcgccttctgcacatcctgagtcatctgcacgcactccatcagcggcaggcgcacggcgtggttcccgttcagtgacacgacgcaagctggggtgtccggggtggcctctagcaaggcgatgactgcctccactcccatgcggctggccaagatcctgtcgaatgccgaaggggtccctcctctctgcacgtgcccgaggatggtcacacgtgtgtcatagcccagctgcgtgacgacaagctctttgattttctcagaggtgatgggtttattttgggtatcaattgctccttcagccacaataataatattcagcctttttttccgggcacggttctccgagagttttgacacacatctgctcctccccagccttcctctggtggagattctggaaggaacacccagtccgcaccgcaggccaaggcactcaccagggccaggtacccacagtgtcgtcccatcacctccagaacgaaggtcctctggtggctctgggccgtggtcatgatggcgtcgacgacctcgatgatcctgtgcagggcggagtccgtgccgatggtcatgtcggtgccgcagaaatcattgtcgatggagcccaccatgcccaccacgttgaggtaggcgtacttctgcacggcctccttatcgatctggccgttcctggccagctcctccagcagcccactccactccttccggaagaggttggccccggtgaggctcccgtccccgccgatcacacacaggttggtgatgccgcgctgcagcaggttgcaagcagccttcaggcggccttcccgcgtgcggaaggcctggcaccgcgcactgccaatgatcgtcccgcccacttgcaggatgctggagacactctcccagtcggcctctgcgatgtttgagcctccgtccaccatgccctggtagccctcgtagatgaagtacaccttggcccccacgtagatacccatgcgcaccacggcacggacggcagcgttcataccttgagcatccccgccgctggtcagcacgccgatggccttgccggccccggagaggtgctccaggaacttccgcaaggagcccttgggggcccgggagtcgtccgcgtccatggcgaggaggccgaggggagccgcacgtccgggtgcgcagcaggcaatggggaccactgcccgcgcgcgcctgacctcgtgccgaattcggcgcgccgtcgacttcatactctctccc

SEQ ID NO: 131591 - DNA, 2765 bp, Homo Sapiens
  misc_feature (275)..(283): n is a, c, g, or t
  misc_feature (549)..(604): n is a, c, g, or t
ggtataattacaacaagccccccgggtgtaaaaataattggctctgcaggagagactaccataatgcccgcgttagtgcaccaaaagatttcttctctcgccacgccggcagcaaccataatatgcgccaggcagggtgtttattcacccccgctgctttagcccccctctgtctaaaaagatgttgtatatataattaggcccccctcagcggcgggccggtgaaaaatattcgcttcgtgtgtgttgtgttgttgcgcccactatttttgctnnnnnnnnntcgcgagtgatggaggtgttcttctcctccacaggaaggttcccgacggtctgcgcgctgttttttccccccgtactcacacggcttgttttaaaaagcgggcccgctgccgctgctcgcgctttgtattataagatgcgtcctcccattttatgggtgcccctccttgttgccacaacaagaacggtcgggtgtcgtcggttcatcaactggcggcccctccgccggcgggatatattttgatggctgggcgccgccccctctcnnnnnnnnnnnnnnnnnnnnnnnnnnnnnnnnnnnnnnnnnnnnnnnnnnnnnnnnggagttgtaggcaaatgtttaattaattctgctcatatgcacatctgaaagcatgagacacactccacagacagcacgcactggagctggtggggcagatgggcactcgccgattaggtattaatgtcaataatacgtgcataaagtgctgataaaataacttaagtgttacaaaaacagacagtccacggtggctgcaggcacatgcaggcgggactgggtcagacactccagggctgcacatgttccagctggcctgagtccgacacgtcatagctggccttgtacttggccaggattttcatgaggggccgtagcttgagccaccactgttctttgggaatcctgtgctcaaaatccgtttgcttcttcagctctgccacaggttgaaaaataacgtttcttttgcttattcccagcacacaaatggaatcatcggtggtaaatttttttcctctgccccgggcctccttgagttttgcagtgatccactccatagctctggcagagattttggttccaaagtttctatcaaatggagagggtgccccaccctgctgcatgtgacccagcacgttcttcctgcagtcaaacacgcctttgccctcttctgaatacagctggtaaatgaagtcggtggtgtagttttcactgcagctctcatttctgagcacaaggcctctctggatggtggtcttcattttctccgtcaggtgctccacgttggactgcagatccctgatgtcgaagggctcttcgaaaatgtatgcggcatcagctccggccgcgagcccccccatgttggccaggtagccacagtagccgcccatggtctcgatgatgaacacgcgccgcttggttccgctggcggactgcttgatgcggtcgcaggtgtcggtgatagtgttcagggcggtgtctgccccgatgctgaaatcggaacccggcacattgttggacacagtagcgggaaccatgaccatggggacacagaactcctcgtgcttctcccgggcggctgacagctccaggagtcccaggtaggcctcgaatccaccgatgatcagcagcgcgttgatgctgtgcgtgcgcatctgtgtggcgatctcttccaagtacttccccgggagaacgcgttttgtcccaagaatggagcctccttggccggtccagcccccgacatctgtccagccgatttctttgatctggcccttggcgaagccgtcaaagccatcatagatggcgagcatcctgtggccgtcggcaatgcccacgcgcacagctgagcgtacggccgcgttcatcccagccgcgggtgcccccacgttgatgacagctacgttgcaattggtctttgggatctgatcatccggcagcttgatggcaagtcgcttgtaggtgttcaggttgcccgcaaagctcctccctcggagtcgaaccgcatcttgaaatctcctctcgtccatcgccttctgcacatcctgagtcatctgcacgcactccatcagcggcaggcgcacggcgtggttcccgttcagtgacacgacgcaagctggggtgtccggggtggcctctagcaaggcgatgactgcctccactcccatgcggctggccaagatcctgtcaaatgccgaaggggtccctcctctctgcacgtgcccgaggatggtcacacgtgtgtcatagcccagctgcgtgacgacaagctctttgattttctcagaggtgatgggtttattttgggtatcaattgctccttcagccacaataataatattcagcctttttttccgggcacggttctccgagagtttgacacacatctgctcctcccagccttcctctggtggagattctggaaggaacacccagtccgcaccgcaggccaaggcactcaccagggccaggtacccacagtgtcgtcccatcacctccagaacgaaggtcctctggtggctggaagagaaacagagggagccccggacacagctcagaaagcagagaaacagagggagcacccactcagtcctggaaacagctcagaaagcagagaaaaggggctttgacagctgagttagccaggaggcctgcagggacctaggcttcaaaaatggtccattttctactaaggcaaacgctatgcagtagccttccagactcc

SEQ ID NO: 131592 - DNA, 1473 bp, Homo Sapiens
ttttaacagaaaaaagtcaaatgacaattttaatagactttaaaacagtgtacaagtaaaaaacactggttttgtatttcaaaagttgaaggaagatatccagtcattaaacagtctacaaaacatatgccagtaaattacataaaagactatgtacaatataaaaagagctgaaaacagtcttcactgtaaaaataatttaaaacaaacttttcaatttaaaatatcatctatagcacacaaacatcatgcaaatggaaaactaaatatactgcattctttagtgtagccaaataaattcagattgagacatcttataagtagggaaatggccattcaatacgatttttttctctggcagtaatggtcctagctgggtgttttatgcataaagaacagctatatttcaaaccctttttattgtaataaatactaaagcaacagaggaatactttattaatttaggagtgatgttcaaaaatggtctgaaaaataaatgcttactgtgcaatttcataaagtatgaacttcttgaaagactagaagcttttgcagctgagaaagttgatctctagttttaaggcaggctaagcttttaaataaagataaattataagaactagtttcattcattaactattctgctattacaagttacatcatcatgttcatctccataatactagggctagcagtttggtatttaacaccaaatcctcccaatgggagacatgtactttctggctgaattacaattaacatcttattactttggaactgtataatcaggggcctgttgctctcctcattaatggaaaacagcagtccaaaatattacactctccccagtagaagtaccattattatagattcagaaaggctttgcatattcacattttggcagtttaatacttgtggaaaagatcaatgcaagctctaccacagtgataggtatttaaacaacaatggcaaatatttcaaaactaaggggatccaggcaggcactaatgtttctaaagcaactgaaacatttccaaagcatttatttgtttttcaggttagttttatgagccaatatagacattactacatgtccacaggaagtacaaaagccatcttcatttgaacgtaaatacaataatcctgaaattcttagcaccaagtattacttttaaaagtaaagacaaccgagtgctctccccacatattgttgacttccttctactcacactgcatgtcatttgagattttaaaaagttagctgccacagttttggaaaatgccagtgtttaaaaataattgtgttaaagaatcaaaagtttagcgtaacagattttgagtacttcaaaccattcaatgttacaaagaaaagtgaaaataccattctttggtctagattagctgttccctttacattaatttaacattccgatggctttttgaaaactttaaaaatgttgaaactcactagac

SEQ ID NO: 131593 - DNA, 1040 bp, Homo Sapiens
  misc_feature (903)..(903): n is a, c, g, or t
ctttgaaaaaagatgtttattaaacaactttaattgtcataaaatgactaaaatgggttttaaaaattaaggctcttctctttctgtggattgccagaacaatgtaaaaataatatcaatcaaccctgctaaatgttttgttcctaaagttaaatttcatagattcctaaacattttatgattaagataaaaaattggactataaatgacaattcatggccatctgtgctgaacacacattgatcaggtgtacaatattctaattgagtagttaagcaaaaaatattccagttaaagcataaattttaatttcagcattttaaagtcattgtttccccacatggtcatgattttcctaaaattgaaatagtctaatacaggagcgctaaccttgggactctatatactcccaggaggatgactgacttggctggcaattagtttgattatatttttttaaatgctctaaggtaaattatcaaatgattcagaattacatggcatgcagtatccaaaattatggctctgatgcattgagatttacattaagaataagaagtgtcattcacattcattgtacaccccacccctcccacgaaaaagaaaaaagtcactacctattcaagttctagatctggtgcagcattaaggattaaaacttaccactttaccaggccttccccatgtgcaaataaatccctcctgacaagcagtgactatacagtcttcaagaaatattagtacagtcagtctctcatgtgctatctttttacatatcagcggctctaacaagggaacatcttccattcgaggacacaggggcgttcccagagttttagcagggtccgttttggttttggtaactagattcagtttgtcactgctcttgctagaaatgtgtcncatgctatgatttcgcttgtgatctttctcgtggtgcctctccttccggtcatgtagtgaaagtgttgcaatttgctgacccagaagcatggcccgtccatgaactgcttttgctgcagcattgagactgtgaatgt

SEQ ID NO: 131594 - DNA, 1835 bp, Homo Sapiens
  misc_feature (431)..(431): n is a, c, g, or t
  misc_feature (1046)..(1060): n is a, c, g, or t
tttttcaggacagattggcctttatactaaattccacaatatacctggtattagtacagcctgaatccggggctggtcacagaaggaaaaaggttgtagtccctgaaaacagagtgttacaaggacatacacactacagatgtctccacggtgggatctgcccacactggctgggcaaaatgagggcctggctggcaggtgctaatatatttcagggaagagaagggaaccaaagaattagagatactaaaactagagctgagactgtaattggaaaatcacaaatctttgcctacagctactttctaaggggcaaaggcccacaaagcctgggcgcaggtgccaagccacagtctctgaaccttaaaagccaaccactctattaacaactagaaaaaatcagtgactagggtcaagactgaacactcccngggaaataacactggcctcactttagaaaagagaaacacccagctgtagtgtggaaaatcttacttgttatcggcaatagcactacatcttgtttcccctaggtagctgcttccagggaatggtgacaagtattggcagtcagtcatctacatgtcactgaggcacaggggagggtggccaggagcacgaggatgtgaatcgacctactatttaatataatggctgtgagaaaaggcctctttcctttcctttccacttttgctccaccctatcaggagccagaaaggcctgatggtgacaaggtgtgaaccgtgtggacagtcctgcacacagggctcactgtggacaccttcccagggcacgcatcagctgtgtgaacaaagccaccaaagccattctttccctcccccagtgagagcgagagtgagagagacagacccgggacttctttcatttcctaagcaccgcgcatggtggtggcactagctccccctccaagatgtcacagaaaacagagcaggttggaaattagaccacaatcactcccaagtgtcttcacagttcagacaggcaaacatttcaaaaggcggcctctgggcccccctctctctttnnnnnnnnnnnnnnnttgcaggctgtgggaatgctgttcagccactgagcgtggctggctcatgtcaggtactgcaccacgaggaacatgaccacacaggtcagcagcatcccacctatcataaagtacttgtcctggaaagcccgcttctcgatgagccgcatcactgtgttggacaagcccagcatgttggcaatgtcaaggatcttcttctgagtccccttcaaggtcagtctctgggtcctcagtccatctaaaatattgtgcccatctaaaatgaggtcatccatgccgttgtgaactttctggagggaggagttaaactgcagtgattcgtccattggtatggtggtgtcagagtcgttagtggtgaaggttcgagacagaagctcttctcgctgtctctcctgctgctcccttgcatggcgccgatgctggaagtttctgagcgcagtctgcaggtgctggacatcatactttaactggtcaacccgaagtctggcattttgccttttgttagggggctccttgctggacaaaatctccagacgttctagacggctgaatatctggtctatgcttgcttggatttcgttttctactatgtgcacagactgcttgtctgccgtctccaggcgtcccatgcaagactggatctcgtggacctgcttgtgcgtttgctggaacaggggatccatgtcgccggcccggcaggccacggctccggctctgcttcctcggaaccctcgtgccgaattccaacccagcctcgtacctagcctaagttttt

SEQ ID NO: 131595 - DNA, 611 bp, Homo Sapiens
tttttgggggaggcaggccatttattgaagaactgcttgcagacatggacacacacagccatggtaaccagacgccaccctggggccagggagcacccagaaacagccctgggctgccagcccaggcctggacatttgcccaccacgggtgcgagggcctctcttggcatcaaccatccacgacctcctacggcaccatctctcctgccaagttgcccatgggggtctccaggaagaaaaccagccttgggggattccaaggcccagggagggtgggaagctgcccacgccctcaggctgtgtccagtctcatgctcaccatttctttctatggccaaagggaagtcgctggacgagggaggtccctctgctgggatgagcagcacagcacggttggggccccaggtcacaaaaatgggtgcagggatcctgggacctgggctggatgggcacccgctttgggatttcctctgcttcagcctgtgtatggtccagggaacaatgtaggaaggggcgtggcatggggtggggctgccatgtccggggcttctgcgtagcccaacaaagatgctacaggaggaacatgaggacagggctgggaggggtctggg

SEQ ID NO: 131596 - DNA, 899 bp, Homo Sapiens
  misc_feature (158)..(160): n is a, c, g, or t
  misc_feature (171)..(172): n is a, c, g, or t
  misc_feature (178)..(178): n is a, c, g, or t
aaggctcaactctttgatgtcaacctcgttccccgcgttttatgggggatcaagcctagcatgccagattcctagaaccagtatgccatgtcatttctattggcccggcgccaacgaatgtctagaagctctggaggccgaggcggccgacaaggcannncaatatcattnngttttntccatgtaagaaaatttatttctacttctacagcagaaatacggaaatggtacaggtttgggcaaatcatactttatgaaatggatcctcataccacatcctttttaatacaggcacgttataacataattcctggattttcaaaatccagccaacacggatacctctgctactctgttttggccttcatagctgcttcctctttcagacgagctttcttttctaagttcaagcttgttaaagtctcgtgtctttgggcagccttcttgccctcaataaccatgaagatgcatcctaccaccgtcagggcaatcattagatagctgatcttcactcgcatcttgttctttgcagcatcaagcatctccaacgagacagtctctgggatttcatcttcctttttgaagcgacctgaccatatgaggatctttttctgccaatccgtaggtttgtgtaaaggcactctgttgtaagtgcgggatggagctccgggactttcctgtggttttgtgcaaaatccatttattctcttcaaatcagagcttctggtaagccttagagatgaggaaacatctctttcacataacctaaaacagcttcctgctgccaggcgcagaccgctgaggctccccatggccacttgctactccgccgaccagcgcagaacttcgccggggacggtggcgctggtgagctcaatgtcacccagcgttggagtccc

SEQ ID NO: 131597 - DNA, 688 bp, Homo Sapiens
taacactgtgcatcctccacagcacacatggcagcctgcagtctgaaggtggacccgagcctttgcagagaggcgccgcagagccgcaggcctgcgccccagccttctgctcccgactgtgaggacacccagttctagtagagcactttttttaaagctcccattttgtaaccactagtttgcggttgacttgagtactctggtgacttcctgcgtcaagcgttctcaagctgtgagaatgtgcgcagctccaggcaggttttctctcggagagttaagtcttcccttgaaggcagggaagcaggatggatacacatatatcacacgcataaaacaccaggtgcgggagcagcccagactcaaggctgactaaactggaggctgaataccgtggaggtccacatgcagcttccctggagggcaggccggaggcgctcccgcccctgggcttgaggatgctgcaccccgtgggcttccaggcctgcccagatgatgccttcaggcctctgtccctggcggccatcctcaggccgattttgaccagcaatgatagactcttcttaaccctttcaaaataaatttttcagtgggacagaaaggagagttaaaaaacatttttttaaaggtggtaacatctgacccacaaagggaatgggtctgttttatgcaaaataaaagtttttcaaat

SEQ ID NO: 131598 - DNA, 728 bp, Homo Sapiens
  misc_feature (676)..(676): n is a, c, g, or t
ttttgacttttaagtagctgtttattgtggtaaaatataacaaacataaaatgtattgttttaaccatgtttaagtacacagatcagtagcattaagttcattattgtcaactgtcaccaccatccagctccagaattttttcatcttgccaaacagaacttctgtacacagtaaacatgaaccccccatttcctcctcctcacagccccaggcaaccactattctactgtccacctctatgaccttgactgctctaggcacatcctatgaatggaatcatccagtgtttgtccttttgtaactggttaatttcacatagcatcatgccttcagggtttgtctacatgtagcacgcatcggaatttcattcctttttatgtctgagtaatattctactgtatggatatggcacattttgtttatccatttatctgtcgatggacaattgagtgtctgtcacctttttgctactgtgaaatttgctactgtgaataatgaacgtggataataacactccctcttctccaaaatgaagattaagcttcaactattccctagtgctcccactcagagtttctcctcttgactgtacatgaagtcacaccaaggaaataccatgatcagaaacaggcactttcctgcactcatggtgctcacagttgcattggggaacanataatccacacccaaaaggagacgttgctgccaactgtgactatgtgctatg

SEQ ID NO: 131599 - DNA, 664 bp, Homo Sapiens
ttagtaataacatgtttattcaaaatactaacactgttacattcttttcattctcagggcatattctactagagatgtactgtcctatgttttgaagtcacctggaagagttcttagtgtggttatatgactacatcaagagttttttacttttgatgattagggactgctttttaaaacttactttactccataatcttaaaatactcatacagttccacagtcacatttacactaacaaggcatatttgaagtccagctttcatccttgatcctgctactctaggctctcctttctcctaaagataagcattttcattatgtatcatgtttatcgtataggcatgaacacacgcgcggccccttccaggcagtcttcagtgatgtcacgtgttcccatggcacctgtattgtactcttatcagtcattatatggactttaacttccccagatattatttgggctcctccataagactgtgagcatctgaccactggagtgttgcttcccattatatccctgttatcaagcacaaggtcaggcacagagtaagactcaaaacatgttttggaatgtatgactggtatgaactacaaaccagtaagctgatgttttcattttgagtctataaatctaattttgtggtggttttgtgtattgctc

SEQ ID NO: 131600 - DNA, 887 bp, Homo Sapiens
gctcaacaaatatttaatgagttaatgaggtctgtttccattccttcattttacagattagaccagcgaggcacagagaggtttagcaccttgctccagtcacacagccaggccccggagcagttctggaggaaaggcccgcttgggcttgggcatggtcggattgaactggggtcagaggccaggctggagtttcctggaggaaggagaaggagtgatcaggggcatgcaggctcctggtgatgtctgtgaagccaagaccttggtcggaccacggacccttgcccccatttaactgatgagaaaagtgactttcagaggagggcagagctcacctgagatcagtagtagaccccgttcagaatgcctcccagagctccaggcagcccccaggacccctgcttctcccacctgcatccctagagtatcaggccaggagcagggggccgggaggcctgggtactcagggccgaccttgccacttacccgtgcttacgccccttaaagtctctgggcctcagtttccccatctggatgacaagagggctgcagccttcagcctccccccttgcccagatcatgaggaccaagctgcaggagctggtggttaagaatacaggctccggaatccaaaagccatggttgagtcctggttccagcatttattgctgaatgatcttgatcagtcccttcaccccctgagcctccatttcatggtctggccgtgcggaagatgaggctgctgcccgggcccctctcatcctcgtggagacgttggaaggctatcaggaggctgtaatccagcacgttgagctcccggaggaaggtggtatccagttccatctggcggaggaaccagctccgctgggaccctgccggagcatcag

SEQ ID NO: 131601 - DNA, 969 bp, Homo Sapiens
  misc_feature (12)..(12): n is a, c, g, or t
  misc_feature (768)..(787): n is a, c, g, or t
gatttcggcacnaggtgtgtcttcaaatttctctcctttggttatataccttgcgtattccgcacattgataaagtttctttcttacagaagttctgatattgaattaaggaatgggtcactacttaagactttatcatttcagctacacataaaaggtttctctcccctatggattttgctaatggttgagtgatacctaaaggccttgttgcattttttacacttggggtttctcttcggtttgaattctctcatggttaccaaaactctgttaaaggacttttcacagtcgttaaatgtgtatggctctttcccaatatgaatttttttgatgttaactaggcttttagacttagttaaagacctgtgtgctctgctgcatttatagggttttgggctgctgagaataattgatgctgattaaggtgcaaatcatgactaaagacttttctttcttcttttgcatatagtagagtgaggtgagggtcgtggctaaaaccccacaataactttacattcctagctttacagtcttgctgtgaattctctggtgttcattaaagtgtgagctgtgttaaaaggcattcttagattcattttaaccacatttttaaaaactcacagttggttaacatgatggtttcagattgcttgcctcttttctctttctaccttacagggctccttttctagcttaaataagggtactccatctgccacagaatccaggattctatagttttttagtttcacttccctatgttcnnnnnnnnnnnnnnnnnnnnaacaatgagatgataccatgttacagcggtattacattaagatacatttaatatagccacaattaaagtatgtattatgtatttatgctggtgttctttcatgttatttcttctagtgaaaatttccaagtaaactgttattgagcatatacatttttaaaaaaataaaaccatacacccct

SEQ ID NO: 131602 - DNA, 454 bp, Homo Sapiens
catttccactaaaatatttatttaattgatatcttacagaaataaataaaaacagtttttgtctaatacagataggtttttttatatatatgtaatttgattttacaaaattgaagcatatcaaattgttttctctaaaacatagctcagaaaggaatagtaggaaaccaacccaaagaaatactgaaatagtctcatttttaaattataagcatgggccttctgaatctcagcatgacatgttattagtaaaagaatgtaagatatggagtcaggggacctgggctccactgtttacttgctacatgtcctaagaaagtttcaatatatctgaacttcagttctctacctttaaaacagtaaagatattaattatatcaacttcacaagattgttgggtaaattaaacacgtaaatgtacatgaaagctctttttaatatgtgaagagctata

SEQ ID NO: 131603 - DNA, 1520 bp, Homo Sapiens
tcttgatgcaaatgtttttatttgccacttaaactacagtttccctgtgctatcctgatggtgtgggggtgtggaacaggctgctggaaccatggtttacagtagtagcaggtagatgattagtagcatgagtggtgaaatgctgcatctaagtgcctgtcactttgctcccaggggaatatcatgcagcccaggaatagtgttagactgggaaggactgtggcaggaacagtcactgtctctcctcattttggtgaggaatgggtcccacataatggagagctcaacagaagcatccagtcttgttctgaatggagcaggtcagtggcagcagcctcttgctttcatttacccctttgggctgcttgcctaaagtctctcttccttcacctccccaggccttttggcaagagggaagacactgccattcctggctctttccctggatcagtgtctgatctggtggaggtagcttgtggggcctgacttcctccagttccggcggatcctggcacttttcttcctagagtgcagatactgctcactggaggctgtctctgtggcactctgtgggttggccagtgcagagtggggctccaggattctgaggcggctgcagtggtgtagcgagtggcccaggggtttctgccttgggggcctcttcctgcgcagcctcttgagggcctcagccacacggtggtcccctgcacattcccagatgatctgtgcccgttcctcggccagctggtccccgctgcgttgaaacagggcttggatctgcagcagctcggcgtcctggaagatgttggccgaggcctgcttgcggccccgggcctcaatcggggcctgccaagggggtggctcactgaccaccgaggctggggtacccattgtggatgctcacactgaagggcagctccgacagacctcaaatggggatggggcaagctaagatgcgcccactccaacctcttccacagccttcagaaagggcaggcgcagctctgggcttcctgctgcgaaggtgcttacaagggccagtcggtgatcacgggcagcacaagagcatggcagagggtatcctggccgaggtcctaaggcgacatctgcagcacgaggaggccccgggactcagacgtggccgcttcgcagaacgacggggtcctaagtggatctggcggtcgcgtcccgctggcaccccggctctgactgtcgccctccggctcccaccgcagcgccgagctgggccgccgacctacgtacctggttgcttgaggcaggccgcacgcagccccaaactggtccgggccacttgggtcacagccgcggttcccgggagaaagcgctccactagccccggaacagccaatcctcggccccagccaggtatgagctcccaggcgagccttccaaacccaaggcggagttccgtgcgccaatcatcggtgggagacagggagggggcgtgtccatccccgccccccgcctccgctggcctcgaaagcggagtgcgaagcttc

SEQ ID NO: 131604 - DNA, 930 bp, Homo Sapiens
gcataataaatgagagtggatcttttaattctgagatggcaatgtactttacaaggaccatttacagactacatcaaacctttttctagataaaaaacgtacttcagtaacttgcctgaattgagagagcaaaacagtccggagagaaaacttaaaatgtttccacattatcaagcccccttcagaagtactgtggtctcggcccctcctttgaacagatgtccgctcgccacagtccaatcaggtttaaagcaagagtatttgtactgaaaacaagcttaaagtgggaagacacacacaaagcaggcctgtatcattcctttggtttcagttttcacgatgcacccttgaggctaggcacgctgattcaacacacttggagagcttcaccgaaacacactaaacacacagtgatgaactgtgccctggcagagatgacctggcaaaattctcaacttcttccctgaggcagtgcacccgcagttctcggcggcgaagtctttggggcagaagtcccgagccttcagaacggcaggcttctccccctcaggactccagtccccgcggccaaggctgtcgctgcgggggccccgcgcgggactggccaggctcttccattaaccctgtctggtccggccgatcccgccgcgacccgagcgcctctcggccccgcagcacagggcgcccaggacccgccaccctcgccgcccgttcccctctccggagagcccggcggggccgtcaggctgccgagacaaagggtaccgcggcgccagaggccgaggcccagccgcgcctgccttcctctttctcccgcccactgccaacctccagtcgcccgcagaacctccgctgcctcggcgcgaccccatcgccaccccggggctgccgctcgggaccggcaagccgggtagccgcgaggcggccgca

SEQ ID NO: 131605 - DNA, 1506 bp, Homo Sapiens
tggggcgggcaccgcccgggggttatttttgtgttggggggggtggtttgcgctcccccgccccccaataattttccccgctgggtttatgggcgcgtatttttcccaaaaatttgcggaaatttccaaaaaaccatttcttagccccccaagcatttcaccataaggggatactcaggactgtattgctgatctggattcctgagttttttggagcccctttaaattttgtgcgtgaggcaaagcgttacttgccacccccaagtctgggacctattcaattttacttttaccaggaaataaacagggtgagaaactgcaatgatcttggaccacacacaaatctgtggctgagttccaggtaacacagtgactcattttcttactcaaaattacttacagcatgttccctgccatcctttccatacaacacagcaaaggcacagtgacctggactcttgctcgtcatcctaacatcctgatccgctggacaaaacatgaacacactttctccccagtgaggttgttgggaaaaatttaatcagttacagatattttaagtaccaaaggctgcctctggagggaaaagaaaactacccctctggttctggttgacagaagtatgtattatcagattccctgtgaggctttacatcccatgtttgctggagaacagagggattctctaagagtgtagtgatttcttcagatagttccttcatcttgccttcaattatttcaagaggcctcacaggcagtccccattattcccagtcatgtattcatttcagcttatttccaactcagctatccttggctctgaaaagctgtcatcactggcatcactgtatctatcactggaagacagtttgcaaccctgttgcaagtaggcattcaggttcccagttgctgcaagtaacagccccatatacggaggggaaggcttcatcggcctataagaaaactcatgatggaactggacaccaacaaactaaggatgatttgccagttcaatgatttccatcctgtctccatcaacatcctgacctacaaaacttaagtcattctgctcaaattgtttgatcaggttagggtttacctcgaaccgatgtctgtgtctttcttctataaaaggaacatcaccataaagtttccttaatattgaattttcagttttgaaaacagttcttcttattcccagtctcattgttcctcccaaattgccagggttgtgctcgggcatatcaatcaccagaggaactggggcatttggcctaaactctgtggaatcagcatctttcaagttaaggcagtttcttgcaaactctatcactgctagttgcatcccaagacaaactcccagaaaaggaacttctttgtccttgcccaagaaatcgcctggagttttcccaatgttcctctgattccaaagcctccaggcacaagaataccatcagctttgcatagcttctgccaagcttcatgaaatttcacagggtcctcggt

SEQ ID NO: 131606 - DNA, 804 bp, Homo Sapiens
ctccagtaaagttcttttattcggatttaacctaaaatagttcgcttgatctctctttgatagagaaatgaaatctccagttctatagactataatggaaaagtattgaatttgcatatttccaataaaagatatttgcttcatgctttgggcatctatcatagttgcccaaaagactatgtccagtaaacataactgtcacagtactgaagcgcaaacttacaaaattgtctttgtgttaccacaacacacacagtctttagtcagctgactattcatgttgtttgaaaagcatgaaaatacaggtttttagcatgcacacccagttggaaaaggacttgctcctccggaaacaccattcattcgctttggcagagctgagagcacctgtgcatgtgaacaagcaggtgggtatctcactggtttctgcagtcatcactttccttgataggtaagttttgataccagccaggggagagtccaggcatttaactcagcttatgatttaattttccacagtcttatattaaatcctagaagatcacttataacacctgagacagcagaaaggataactactcttgtgatattgtagattaagggattcattgtcagtccatagagtctaaatggtgtgtccagctctttcaacaacttggtggacagctttaatacattgtttactagagtaagctgttctttcttatttggctttttttccatcttaagatataaattaatctgttctgtaagtaatattgaaacattgctgtatttcttattggtttcagaccccagtgaggc

SEQ ID NO: 131607 - DNA, 1082 bp, Homo Sapiens
  misc_feature (957)..(1040): n is a, c, g, or t
gacaaatgaatgaggagctaatgcattgctctggtttattgaacaacagtccaactttacagcattaaataaggggcaaccgttcaggaggggaacgatggcttaaaaataaaaatgaagacagagccgggacagttcacatttccacgtgagtgaggaaaagcaaaggattgttagagacgtgaagagaacgctggcaatgctacagaatggagcccacggaggcgtgggctgccctgcgtccccggcctcggggcagaacagggagcaaccccaaagcctgccccactgtgtcccttccagctgcccttctgccgagaacacccggagctgagggttccaagttcacggcggaaccgcttcccttaaaaagaaagcaaaggttacgtggatttctcccgtgcttccttttccacagacttaaaccggctcaggacgtaaggataacattctgtgctgcttgcagccctgagaagtcagcagccgtgaaaggcaggtagttcctttgccctctgacaccccgagttcttggggtctcggcagaacactgcctggagctgagtggggtcatccctcctagacaccgtcctccccagcccagcttgtcttcacggaggcagagaacccgctgcacgtagaatccaagcaatatgctaagcctcctgaagtatttttcctccagttaaaaagcagttctacatgttggaaaacgtctttctgtttccctgaatgactgaaagcaactcgcaggaatccagccacggaaaacccctccgggggcaatattttaaaattcatttcccctatggtattcagtttaaaagagaagaatcaagagtcctttccggtaatcaaatcaaaaacaccttatgtggaaaagctggccgcacgggggaactggacttttagggctgagacaccgaagacataacctccggacccgtgagccacccactnnnnnnnnnnnnnnnnnnnnnnnnnnnnnnnnnnnnnnnnnnnnnnnnnnnnnnnnnnnnnnnnnnnnnnnnnnnnnnnnnnnntaatggccgaattcccgggcatatgtccggtaccgtcgactg

SEQ ID NO: 131608 - DNA, 478 bp, Homo Sapiens
  misc_feature (433)..(433): n is a, c, g, or t
aacattttaaaatatatatatagagagagaaagaagacagaatcaggagttctgtgaggcagaggagaggggagtggcaatatcaacaatggtttctatgcgtgaaaggcccttcctaaacctcctaccatagcaaagctcccccggtctatcagatgaacagaattctagatttgttttctctttctctcaaaggccactgacaagaaagcagctatggtatattttccttgactgagggctggagactcaaaaacaaaagctatctgcccagccagagccctctaaaaggttgctgggcttggggctattttacactggataagcccttcctgagtttggaagcatcaattagaagactgcggcaatttgtcctttacgctttatatcctacccattgccccgcactccctcacccctaggatgtacatangaaagtcgacactaggggcactgggactctcaattctagggtggc

SEQ ID NO: 131609 - DNA, 1332 bp, Homo Sapiens
  misc_feature (143)..(161): n is a, c, g, or t
  misc_feature (170)..(299): n is a, c, g, or t
gggagtagtgtctttattcattaaagcctgaggtctgaccacccctgtaaaacctcgtgcccacacagtgcctgtctgagtccttctgtgcccaaatgtggagcaggctgcagagacttgaagcctggggttttgtgcctccnnnnnnnnnnnnnnnnnnngagacagannnnnnnnnnnnnnnnnnnnnnnnnnnnnnnnnnnnnnnnnnnnnnnnnnnnnnnnnnnnnnnnnnnnnnnnnnnnnnnnnnnnnnnnnnnnnnnnnnnnnnnnnnnnnnnnnnnnnnnnnnnnnnnnnngcatgagccaccacgcccggccatcttcttgccagcaactcttagaccaggaagcctcggatggcagctatgaagtcctgtgggcggtcagcgtggatccagtggccagcgttcggcaccgtctgcatctgggcccgagggaagagccgcatattctcagggtggtggcttggatgcacgaactgggagtttccaccaaggagaaagagtgttggcccgaggtaggactcctgcctctgtgggaaagccaagatcttgtctaggtgctgggtcagggcatccaagttcaccctccacacgaagcgcccgtctacctctaccaggttagtgagcaggtgctgccgcacggccatgtcctggatgacagaactgagctgttcatccgccagttttcgggcacgggagcggggcagctcatctgcgatgttgatggccctcatggctgccacgtaggttgcaaagtgggagacacctgtgctttccactgggctgatatctacagcaatgagacgttccaccagctctggcctctgtagtgccagcagcatggctgtctttcctcccatgctgtggccaacgacgacgcagggcaccaggcccagctggggcagaaggtcctgcaggtcctggctcatgatctcgtagctcatgtctgggctgttggggctgtcaccgtggttacgagcatccaccgtcagcaccctacggcctgtctgctgggccaagatcttggcgatggagttgaagttagttttgctgccgaagagcccgtgcaaaaagacgacggccgggagggctgcctccccgtccagaagcctgtaggaaagcggaagcggcctcggctcggcgccccctcggccgccgctgctgctgctgggtgcgacaggcaccctcgcgaagctagggccgtgggggccgagtccctcacgcgggagcctccaggctcggtccagcggagcatgcttgcaagctgttggccggcatcgcatctcacaagcctcgtgccgaattaaacaccgagcctcgtacctaa

SEQ ID NO: 131610 - DNA, 877 bp, Homo Sapiens
cgggccattcttcttgccagccaactttttagacccaggaagccctcgggatggcagctatgaagtccctgtggccggtcagcgtgggtcccagtggccagcgttcgggcaccgtctgcatctgggcccgagggaagagcccgcataatctcaggggtggtggctgggatgcacgaactgggagtttccaccaaggagaaagagtgttggcccgaggtaggactcctgcctctgtgggaaagccaagatcttgtctaggtgctgggtcagggcatccaagttcaccctccacacgaagcgcccgtgtacctctaccaggttagtgagcaggtgctgccgcacggccatgtcctgtgggggtgcagcagttagggggaggttccttgtgcggtctgggggtgccactcttcccttgacaggtcctggtctacaataccatccggggcaccttgggtgtatcaccctctgtagtgccagcagcatggctgtctttcctcccatgctgtggccaacgacgacgcagggcaccaggcccagctggggcagaaggtcctgcaggtcctggctcatgatctcgtagctcatgtctgggctgtgggggctgtcaccgtggttacgagcatccaccgtcagcaccctacggcctgtctgctgggccaagatcttggcgatggagttgaagttagttttgctgccgaagagcccgtgcaaaaagacgacggccgggagggctgcctccccgtccagaagcctgtaggaaagcggaagcggcctcggctcggcgccccctcggccgccgctgctgctgctgggtgcgacaggcaccctcgcgaagctagggccgtgggggccgagtccctcacgcgcccacgcgtcc

SEQ ID NO: 131611 - DNA, 1057 bp, Homo Sapiens
  misc_feature (61)..(80): n is a, c, g, or t
  misc_feature (760)..(760): n is a, c, g, or t
  misc_feature (786)..(787): n is a, c, g, or t
  misc_feature (805)..(805): n is a, c, g, or t
  misc_feature (807)..(807): n is a, c, g, or t
  misc_feature (814)..(814): n is a, c, g, or t
  misc_feature (842)..(842): n is a, c, g, or t
  misc_feature (1017)..(1017): n is a, c, g, or t
cagtgccaaactaaaattaacctcactaaagggaataagcttgcggccgcatacgtggtcnnnnnnnnnnnnnnnnnnnngagttggaaacaactttattgatacctgagaaaaagtgcaggaaaaatattcctcctgaccaggtggcctgtcccctgaggccagatcattctctcgcctctcccttaagccctgggtcatttgggacctcactggccagcacccagaggctgaagacatccacagccagagcctggaagccagacccagagaccaggagagggaatgtctacagcgtggctcctgaggtcagggccaaggtcagcgtgggaccctcatcggtcaagggccagcgcctcttggatcactgtccggagtccgatggaaaacagctcctcccatggttcccggatccaggcaagcagggctgtcagctgctcctgacacaccacacggagtgcccaaaagctctccagccgggacacctcatcgtagaagagcagccgcaagtcctcaggggctgagcggtagagcagcacggagctcaggctgctgagtggctgctgctccctgacacgcacagcagggcccggccccgagggaggcaccttctcagaggcttcgccagatgctgctggaggagagggctctgccggggaccctgcagcatcctcatctaacaggaacagggtggacggagtcagcaacagggatacgaggcaggtggaaggggctgcagggaaagaggatccagtgtggnaggtcatggaggggccagattcctgnnggcagcgtccatgctgtngngaaaaanagtggtgacaactctgaggtggtcacangcagctgtgcccttgggcaagactcctttcccagctcatgatcctacctggaacctttaagctacgggccccatggccaaccacctatcaaaacaggtcacctctctctgtgatgataaggaggcgaccaaccagctctcactcataaagctgggccgaagcaagcgggtataangtctgggggcctaaccaccaagggaggaacctagtgtttc

SEQ ID NO: 131612 - DNA, 464 bp, Homo Sapiens
ctatttaaaactgcattttcttctatttccattcgcgtctttgggacccaaagcctgctgcggtggtgcaaaccacatggcacctatcccctgtacctctcccgggcgtctgggcctccctcattctggcttcatcactcctgctgaaagcaagtctaagcatcatttccacaatcaggcctcggctgcttctctctggtagccttccaaatcctctggcctcacctccttctttctcactcttcccactttctctgtatctgaagtcagttattatgactcttccatgcaaaaaaagaacaccaagtgatttttcttcctccatgaacactcgcaaagcagcagcaaggggtcctgattccatggagtggaccctaagggccttggccacgagacgtcgcctctgctaagttaacagttctttaaactgaccattgcagggaaattcagctattgcataatac

SEQ ID NO: 131613 - DNA, 439 bp, Homo Sapiens
  misc_feature (403)..(403): n is a, c, g, or t
ggagacaaattgtgtagtcctttattagccggcaaccgggagacagctagcgctcaaaattctctcggccctgaagaaggggctagattttcttttatactaaggtctaaataggggaggggggtttaactgaagcagttttacagaagcagaataggcaaaaagttaaaaaagttaattggttatagaagcagttacaaaaaataaacagttccaggtacaggggcttaaactatcactaagagataaatgcgggggctttaggtaccttccaccgagcacattcccaggagctgctggtacagcttgcctcaatatcttatcagcaggtgaattcctggatgtgcttggagtcagcttgcactagttactcccttagggggataaagagggctgcaagcanagaaactaaaatggagtctgtccggctctgtctgct

SEQ ID NO: 131614 - DNA, 739 bp, Homo Sapiens
ctgtgttccatctagtttattggtaaaagtgaatacaagtcaaggctttacaagtattttgctcagatgtgcagaaaggactagctctcctgcttgaaacagtgaaggaaagcgcagccagccccttgggctgaggctgactctcggtgtttctttggagagcgttgcttagtaacagttgcaggggacacgcacagacagggggatgaaagaaggatgcaggagatgagggagggtgcatttgttttctagcatgccccacgagtgggagcagtgggaaaaatctttagatcttttaaccaccaaaatcatgccggcttactgcaatcaacaatctaaagtaaaataaagaaatcaagaaattaagtgaaaagtcaatctcaatcctacttccccgaagtaatgatcattaatagttggggcaatagtttgccccattttataggagagtaacatggaggcaataggtaaggaagcgtttttctggggtcctaagagacacccactgggaaatcgggattggggggtacttaaggctatgctgctcaggggtcctgagaagagggcagtgcagggagctgggaacagggagagggggctggttcctgtgcgcaagtggcatctgttgcctattatcaggagcagaaatcctagcacttctgctcactgagtctcgtaactggagttgccaggggcaacagcacagtcaagcccgggctactccactttactcatacta

SEQ ID NO: 131615 - DNA, 1450 bp, Homo Sapiens
ttttttgccatgggatgttaactcttttattaatttagggttaacattgtacttgcttcattgatttctctttcagagttgtagattcaataaacaacatctgggttctctccagctcacaggtgacaaggcaaatgcactgtcgtcaaacaggggagcaggacaatatggagaaagacgaggtcgaaaaaatttaaggcaaatgttacttccctattcaagggaattgatcaagcagatctgtgcatttcaatgaaaatatatgaaatatttgtcaaaataattaacatcggtaaaaattagaacatgtagcttataaaatgcctacacaggtttggcagaataaatccaactgtgtcatgtaggcttgtaatatacacagacacaggagtttccaccttaaaaacgagtcttctgaagggcagaggccaaatgtattttaaaagcaattccataaaatgggaagtgatggatgattaacaatgcatggctggctttacattttgttcagaggaattgcttggccatcggggtaccttttggctggccacagaatgcctcctgttgcctctcctcagaaggctctgcatcaggtcgaggtggtcgttcaggccatgagactcctgaagacacagacagaacacggtaacaaggagagctcggcttgctcaaaggagagcgctgcgggggatagaatcttctggtctggctttggaattggactttctaagccactgctgcagtttcagaagtagctgactatgtagaaatagatactccggccccagtggtcatacattttatgccctcaaacctatcttatttatagtctgaccaaaccgtccccagactgctcagtggcaggcaacgagcaggtagactgctggccctttgtcacatgtgaggatggcccagggttcgccagctgggccggggagatttactacacagccgcagaaaagcacggggagaagagtgatgtgtgatgccaagcgcctttcttttctgctttggtcttgaagattcagtaaacttatggtcccagaagctgctccaaagccagagctgtggattcccagaattcattttgttcctgttagtttgtcggaagactggagccaacaagcagcatttgagaggatatcaccattttaggaacacctccttaagagccaccacccacctggcttgggtgctcagagatgctgctcctggggagataaagctgtgaggtgcagggcgccgctcctgaaacagactctggccgacagtctggaggaaggtggacggatggatggatgggagtgcctgccctctgtgggcagctaggcacccttacccggccaggaggcacgtgcggcagcagaactgaatgaagagcttccgttcgcacagccggttggacttcaccatctcgcagaattctcgtcaatcccgggaattccggacc

SEQ ID NO: 131616 - DNA, 1370 bp, Homo Sapiens
  misc_feature (624)..(656): n is a, c, g, or t
aagttcaacaagaaaactttattatttaagaatttctttataaaactgaactatatgttcatgcattataattccaggaaactaaagaacataaaattacctttaaaagctaatgtggagaatttcaggggaaaatcagtattaacttatagttttattattgatataaaagaaaacttcaaatactgtacagtaaggtgtgctgtagaacactataatacactattaccaattattcattactcaaatgtaatatatacagtaatcacgaaatcggaaaataatgggcaacagccagtgccttaagggtgaaataacatctatactattttattgagcagttaaagcacttgctatttttctaaatatttacactattactgcttatgtttacaaattctaagtatcatttccctccaaaaagtagactttccagttcttggcactaattcttagtcaaataagcctgaaaatactggcaaccttttcagtcttgcattgctctaccacaggcataataagggctcaggacgagatttctgcattctaaagaaaagtaggcaataccttaaaaatttaaaaactaagtaattgatactcacaagcaggtaacatcaactaaannnnnnnnnnnnnnnnnnnnnnnnnnnnnnnnnacaagagaataatcattaatattatactacaaaagcatgtagtctccataattaaaaaattaaatgtcagatatacaagtaatggcattttctccaataattcataatttttacaatttctgctattttggaacaaacattaaaattcccacgatttaagtatcattaaatatgaactgaaacacttagcatctcaaagaattatcaagaatggtagaacttgtaattaactctataacttacatgggtgatatagttcccctttgttgttttatttcttaaatatacattctactaaggaatattttcatgtgaacagctctggtttgaaaaattaatttatactgtgaagagccttaaggttgtacaattttgttaaattatatgataaccttgaatggtaggatgcatttactcaacttagaatatggcgctattattattataaatggtggtttttaattcacattaagataggtggaatttaatccaattttgcaaaggctttgtgtttataaaaatcttaagatggaaaccttgctttgagaaccataaaactcaaaatctgtgtagtatttaagtatgaaccaattgaaattactgttgaaaaatgaagacaaaactgtattgatattctgaaataaaactttatgctgccactatattgaccagttgaagtgtaattaatgacagaagtaaattttttacctaaag

SEQ ID NO: 131617 - DNA, 454 bp, Homo Sapiens
ttttttaacttgttaaaaacatttaatttagttaaaaaccaaacaaaaaagagctttgtttcttttcacattcatttctcagtttagatcatctttaattaaatataaatgtaagaaagttggaaaatgcaaagaaacgactcgttgtaagcacataactcacgtggggggaacagacatgggtgggcacactagcaaacacctgccagctgcatgtggacccaggtgggcaccggactgttttaaacacaggagagggcccattgtctaactggtgagttggttgagtggaagctggttgagaacttttactgcaaaccatttacagtagaccacaattttatagtcctgtttggcactttttcatatcactgggagcctgaagaaatagaagtgggttggatctctttcagcctcggaaaagcctgccattcccccatctaaaaaccctttc

SEQ ID NO: 131618 - DNA, 703 bp, Homo Sapiens
  misc_feature (278)..(314): n is a, c, g, or t
  misc_feature (640)..(640): n is a, c, g, or t
gactgtgtaaatacactttattttccatttttcccgcctgggcgacatgtgaacaggcagtgtgcaaaatggtggcgggcagtgtagggggcgtttggagagccccgtgggtgcctgccccggtccccaggcttcgtaacactgaaaagtgggcagctaggaagcggggacggagcaggggttcccacccaggaagcgccagggagattgcttgtgacgctactctactggaggctccgggagcaccgaggggggcagcccccagggtcatgaggccnnnnnnnnnnnnnnnnnnnnnnnnnnnnnnnnnnnnncatcgttggattttggcaccgttctcagctctgattcagcagagacaacgggaccaccaggaggaagtgaggggaggccgctcgctgggaagctcctgcctgggggcctggctctggctgagggtggggctggaaacacatgaagaaagggaagtagatggagaccgaggacccctgtagagataccctccatcactggccaggatagggggcgcgagtgtctcccagagaaagatgtggggcactggggagaggggtctcttcacttcctggaagctgctctggccccagagaagcagggaggcttcccgttagccactcagtcnccaggcgccccgcacatagtagggggactttggtttccgctgcaggggcacggtgcctgcgca

SEQ ID NO: 131619 - DNA, 1137 bp, Homo Sapiens
ttttaatgtaaagtaagtttattaaattaaataagatcttgaaaatatgtatgatgggtcctgggcaggatgttctttttcatcaacgtaatctttctttaggagaggagtactcatttgcttgcaaaggccataatctgttctttgagtggagacactgcatttgtggcctgcaagccccacgtcctgagcaacacaagcggggaggcactggtagaatagagcctttttagtaagtctgtagcagccagaagagcagtgttgtgacgctgtctttctgtttcataacctgtgaggtggctcacggaacctaagtccttcccattgaaggctgccgtactgaggtgatgggccaagctggagatatccccaaagcccatgttgacaccctgtcctgcaagcggatggactctgtgggctgcatccccaatgagcgccacccgaggcctgacgtactcagcagcatgtcccaacccagagaggaaacagaactcggctttttgcatccaccctggctacgcttgggggcagctggcgagccgagaccttcagtgggcttcagtacaggctgacagcatactgcagcattggcaccagctgtgtcgatgaagtccgtgtggtcagcatcactaccaagaggcaagagttaacggcatccagcaaatgtgttcctcatccagtgctaacgtagctactgctgcatgttcatggggacgtggaccaaagcaagggaactcaacggtgtctgagagcgggacgcagagcaataggcccagaagggaacgagatctctgccagtgacgtacgtgagatccaccatggggccctcttggagtaacttgctgacgtagccgacaacagccagactgggtcataagatcccacagctccacgattcatggaatcccagccaggcctggccgtagctcccgggagggttggtagaacgaaatctggaacgctactctgcgatgggagcgaagtgagggcctggtaggggtcttacgcgagcaaccttcaagtaaagagctgggcatcagggacgaggtgagggacgatcgtgagcaccccagaaaggttcttgccgggcgtcggaaataggttgaacatgagaggcgggaaacggtacagatcagg

SEQ ID NO: 131620 - DNA, 739 bp, Homo Sapiens
  misc_feature (263)..(273): n is a, c, g, or t
  misc_feature (606)..(606): n is a, c, g, or t
  misc_feature (617)..(617): n is a, c, g, or t
  misc_feature (690)..(690): n is a, c, g, or t
aaattttattgcatgtcctggcaaacaaaaagagattgtagattggcttctggctccccaaaagcccataacagaaagtaccagaagacaagcaactgaagcttaaaaaatgtatcacatgtataataccttttgaaaacattaataaagcatataaaacttttaacatttgcttaattttgtacaattataaaaataatagaaaaaaatatccctttaacattcaatatcccacatactgttattttaggggattaccaagnnnnnnnnnnnggtaaaaggatttaatgaaaactctgctttccatttctgtttataaacgtctccaaacaaaaacttttcaattcttcagctaactgcattgagctgaggccacaagaactccattaagcccactttctagtggtttctatgcttactatccttttaccccttaccctggctactcatacactcaaggagagtaggctgccatgaggaggtaagccagtaagggtgcctcgctttggctagtgccaaatccatgagacacagtacaggaatttccaaggccctagtgttacctgaatagtactgacatagctcggaagtcctaggtttattcanaccctcagcanagtaagggaagcagtttgtcttcttactaggaccaaggaacagctttcattcttccccttaatgggtttgcanagctgcatgcttgttgcagaagtttacagtgcttattaccatttaagta

SEQ ID NO: 131621 - DNA, 733 bp, Homo Sapiens
  misc_feature (715)..(715): n is a, c, g, or t
aatggttctttcattcttttattcatttttcttgtttaactctcaggaaaatttcaaaagtagcagtgcccttagttcacaagtctggctaagctgatgcactacacatgaacagcagtagacatctttgctttctttctccctccctcctctgtaacaagcttttcttggttgtcttcacttctccagttttggccaacactcaaggttaaaccacttgtttactaaaggcactcttcatcacacactgatccagattaatttttgtaagtgcctgttgtaaaagtacacagagagtttgaaaaggcaggaagctgttagaacttgtcacaaaaatcagcacaaaggcagcaggatttggaaggcaaatttttcatttgtagtgagatacaacttcacttccttgagttttggtgatgacgccatttgctagcatttttcatgaattttaccaaatcagataaaaccaccacagaattcctctgccatttctaattgtgccaactgcagtagtattggatttgtcttcatgctatcaccttaatgttttctgctgccattaaaaataggtattttgattgcactaagagcaatgcgtgagaaatggtatgacctgctgtctttgttcagcagatgatgaattgactgaggctgcagaatgcactttttactatatacaggtgagactaagcttcacctgtttaccttctcacangtctccactgagatgcct

SEQ ID NO: 131622 - DNA, 660 bp, Homo Sapiens
  misc_feature (545)..(545): n is a, c, g, or t
gccaggaaaatatcatgactttatttgctacactgacagcagcactgaggggagctgggggctgccacccctacgcgggatggtccaaggtaggggacagtagtcaacgcttccccagggtgggggtggtctcgggggaggagtgtagacagtcgccaacctcagggatgtgggaggtggtggcggtggtgttgctggagaggggtccagttggtggctcaaaggcagggagttccagtgtctggggtgcccgtgggcctgcactacctcagggggccggcgggcagcggcggccagggctgctcggccagctctcgttccagctgcttgaagcgcttcttggcggcccgcttgggccggaggcggcgcaggcaggcggggaggcactggtctagcacgctctccagcatgaaggcccccacgaagttgagggtgaccagacccagcagcagcagcttgaagccggtgtcagtgatgttcctcagcgccagcggcccctgcaggaggccggggaccaggacaaggcccaccaggacggagctcangaagcgccagggccaccagaagggcacattggtgtagagcggccggcggaagggcgccctcttggcacggctgcagccaggatgagtactggaagctggacagagagaagaccac

SEQ ID NO: 131623 - DNA, 1036 bp, Homo Sapiens
  misc_feature (409)..(409): n is a, c, g, or t
  misc_feature (750)..(750): n is a, c, g, or t
  misc_feature (776)..(776): n is a, c, g, or t
  misc_feature (871)..(871): n is a, c, g, or t
  misc_feature (880)..(881): n is a, c, g, or t
  misc_feature (883)..(883): n is a, c, g, or t
  misc_feature (886)..(886): n is a, c, g, or t
  misc_feature (914)..(914): n is a, c, g, or t
  misc_feature (924)..(924): n is a, c, g, or t
  misc_feature (941)..(941): n is a, c, g, or t
  misc_feature (958)..(958): n is a, c, g, or t
  misc_feature (970)..(971): n is a, c, g, or t
tttttttagcattccatcatgtttattgactcctgggggacaggtcacaaagtcagtttgtgggcaggccagactgccctagaaggaagtcaggggcctcaaggggtggcactcttccttaactcgtaactcttggaggcaagcttggaaggtgctttatttcccgctatgattataccaaccctgtggcctgctccaggcttcaggatctttagggccttcttgcgaacctactggtggggggtgctgcaagcccctccccttgcccgaaggtgccaagccccatgtgggcaaggcagttgtctgttgcatagtcaagtagttgttgtctccaacttgcaccccagagcagttgtatatgttaacgagcggtcgccctgttactggatttggctccggggtcctgcanggaccagttcatgccttgtctctcagccccctgattccctcggggtccaggacttggtgttccagttgaggtagggctgggcatctggtttctgaaagttgaggtctctggagtctggggaggttgggccatcgaatctgaagatgtgcctgctgtccaggcttgtggaacctgctcctcttgtgccctgctcctcttggtaaggctcgggcattttttaggaacagagctgggaggctcctctagattcagtttgtttagccactcagaaaccatgacatcattacgagagtgctggttttctatggttctcctaaagcatccattctgtcctccttggnctgactctgggatagaaatctcctantgctgctcctgagctgagacaggaaatccttttacgtggagacagcagcatcatattgttttctcacatctgggagactcatcagtttttggtangcatcctgnnanganggtctgtctttgggccactgctcagcanagctgcatanctcctcagtccttctanccggagttcaagccggnttgggcactcanncatgaggcgtctgctgtgcaatgctctacacatgagtcgtggatcactcctcacagatgcaatag

SEQ ID NO: 131624 - DNA, 446 bp, Homo Sapiens
  misc_feature (252)..(322): n is a, c, g, or t
atttaatatagaaatttttattgaagtgatgacttccaaatgtgatttttgggggcattatacacttgcttcgaggtttaatcttcaatccacatgggggggcaccataatcactggtgcccagggccctcgtctagcccctgtgaggccctttgcagtccctcccttgccagcccctccagcctccgccatttgccccgtgggctctccaggttccacttgaggagctgccccctgccccagcccagctcnnnnnnnnnnnnnnnnnnnnnnnnnnnnnnnnnnnnnnnnnnnnnnnnnnnnnnnnnnnnnnnnnnnnnnnggttccagtggtaggtactccctgacgatgtgcaagcatcacagaaatgacacaagacacacactgagaacatgcctcgcgcgtggcaagtgctgactgttacctgcattattaggctccccgc

SEQ ID NO: 131625 - DNA, 371 bp, Homo Sapiens
tttgacagaagcatttgtttgtttttatttatccaaatggggagaatgcaacatgtcagggcattacagacaaactgcagcagccagacaagagggtcagtctatggcagagtccaacatactcagtgcgaaggagccacagtgcgggtgctgcctggaggacttgtggcagcagggtccctttggatgaaggccaggtatctctgggcgaggcactgatgaccatccacatgtgcaggctgctgcttcagtcacgctgaaggtttaaagttcagagtcctacatgtaataattgcctcagaggggaagggcagtccatggtggtcacggtttccagtgtttttaaacataatacacaaagttattgccaa

SEQ ID NO: 131626 - DNA, 1034 bp, Homo Sapiens
  misc_feature (877)..(877): n is a, c, g, or t
  misc_feature (889)..(889): n is a, c, g, or t
  misc_feature (916)..(916): n is a, c, g, or t
actcaatgctcagggtttatttgcaaaactgggctgggttgagcagagggggctttgggatgctgacccctctctgacctggccgttgcgacctcagccctgagttaccctgcagcaggcatggacaggcggccgccttgcctgtcgcagcttcctggcagcagctggccttgcctggaccagcctgtctgccccagcggccggacgtggccagctggaatccgtgctgcgcgggcgctccggccgtggcagggacacataggcccgcacatgcttagtttgttccagggcgtcccagtgacatcagggaggggcaaggccaaggtgggccacaggctctcccagggtaggactcctgagtggcgccctcccgaaaggggtcctgctggcccctcacccttctggggccggtttcacccacggggtgggcagcaggagcacggagcgcggggtgccacacacaggccggggggctccgcagaggaggcccaaggttttcatgatcagacaatgcacatcctggctccaggtggacagagcatggggatggaggcagaacgttctcagacagcagtggcctcctgggccgggaagccacgggtgtgtgggggagccatgggcgcagggacacagaagggcgtgcagccacactcatccacgtgggtgtaggtgtgcaggatggctgagccgttaggacagtgcaagggcaccgtctcctccgtggacccgcctctcctggcagcaggtgcactggtgctgcatggcctgggcctctgctgagtacttggacgctccggggcatgagccctcgcagaaggtatgttgactaggtccgcagcctggtgcacaggatggctcgtgccgattctggctcganggcaatccctanatgagtcgataattcgtatcagtcaanctgttcctggtgaaatgtatcgctcaattcaacacatacagcgggacaaaatgtagctgggtgctatgatgacatcacatatggtggccatgcgcttcatcggaacggctgcatgata

SEQ ID NO: 131627 - DNA, 1658 bp, Homo Sapiens
cacaaaaaaacaggttgttttgacatgtgatgcgccagccaggagatagaatactacctgcccttagggttgggggctgtccccacaagacttgatacttcagaaaccctttttattgacccacaagcagatatttgaattacttcttactttattgctccaggattctggatgggctgcatttactgtgtgaaggataaaaatcattagcctggattctgatttctataaattgccattaaaagctttttttcccctaagaactgaaatgtgctcaccagccaaaacattttaacttgtaaattttgagggcagttaaccaaacctgtgactaatcatatctcctcctaccccccatttccaaggacatttgttactcagatacttgttatactaatacttgaacttgtaccttatggtatttgctatcttttaactagtcatgatattcttatactttagttacacttttggaatttgatacaaggttgagtggggtgtgtgggtgtatgtatgagtgaaacagttctcaaaagaatgtaagaaaaaccatttttataaaattgtgactttttaaaaacatagtctttgtcatttatagaattaacaagctgctcagggtatattttatagctgtagcactgatatctgcattaataaatactgtcgaaacacaatggacctaagtataaaacttccctgaaaaatcatctaatacttttattattaatatcagtggcaaaggtttaagcctgaggaaaaaagcgtacctctacgtattgacaactttgagttctgtagataacaagcagatttgggtctcctgtgattggctaatggtctccatctcccagcagacttaattcaggttttgcttctgctacatcccgccagtaaggaagcagcaaaggtagagaagagacctttttctctatcaaaggccagagatgcgagaacaaaaattcattcccctttggagacaaatgtagtccatctgataaataagatgagaagtcctggctgtcctgcatcagggtccacaggtcaagtacgtcagtcccacagtcttgggccacttgtaaacacgcattggcatattcaccaacaacagagttcaggcgatttagtttgcaaccttgtatgatgcactgttcttcccaggctgtttcacaaagtggggtcggcgtgatgagaatgactcgattctcagggatgtccacggacttcaggtactgcaccatgctctttaggttcgcagcgtactcctccaggggaatgtgctgcttgggattctcatcttttagtgcactgtcattggccccaaagaaaattgtaactgctactgggatgtccaaactgtttcctttcctgattaatcttggaaggataattttggcccacctggtattgtaacctgaaaatccacgattcagaacatcacattttttgaccagcctgtcagccagcgatgctccccatccaccctgcttgaaggaaaactgcatttagaagaccgttcccttcatgggaggtgagatgatcttggatgaacggatggtccttttctacctaattcctgaaggcgttttacttccaaggtcaacctctaacggccccacctgtgccgcagggaatggggcgagagagctcctggcgcc

SEQ ID NO: 131628 - DNA, 604 bp, Homo Sapiens
  misc_feature (477)..(495): n is a, c, g, or t
tttcctaaaatgagtatttgctggtcatgatggatagtctaatgtgacagagatgattatccctttaaaccagtgttctaaacaaaggtgagcgctgttccaggaacccaaaaacaaacttggcacttccttcctaagaactgaaatacctgaccagtcacactgtattagagatacagtaggtttgtaattgtcattaattgataacaactagcaaatcaaagtgagagaagactgaagtagaagaagcaacttcactttgcagttattcacttctctgtaaatcatgagaaagtgcatataaccttgcctccccctcccaccaccccacttgatacatcccttcactacattccccctccctagattcaagaagttcacaattctttatgaaataaacattgccaggtaccgtattttaagagtcttaaaacaacattgttggactcagcaatactttgtcatattcatatatcnnnnnnnnnnnnnnnnnnnattgaataaagcagctttgaagcttatcaggcactgcccaacaaaacagtcccaaaaaaatctgttatgaccttttttacctggggctaacagccaagtactctgtaca

SEQ ID NO: 131629 - DNA, 779 bp, Homo Sapiens
  misc_feature (641)..(649): n is a, c, g, or t
  misc_feature (693)..(716): n is a, c, g, or t
tttccagtttgttttattactttgtttgggatgcttcttcgctggtgcagtctacccagattgggttccctttgcaaaacatcccccttcctggagatgatgatgccatcgaagcccgggccagggcctgacctggcaggcacacacctggccagtggctctgaggtccccggggaccgagtcccctgcgagggcaggctgcccgaggccacacctgcccaccttccctactccaggccaccagctggtgtcagattgggccaccgggagagaacaggcctaggagggaatggaaggctggcggggaggctgtcatccagaagcctcctccccagaggtctccaggaggaacctggctcaactggggggcagtggtttacttttcccttttttcttcctttcttttgtcctctcagctgcccacagccagaaagccaggaccacccgaactggacagggagcagggagggaggagtggtcgcacggagcgtacctgattcaacaggaaatcagttattttctaaaacagcccctaccagagcctcctgaactctgtgggcaccacgtgctgctgtgagcatctgcccagacagtgacccgccacaggccccgggcgtctgtggaaggagttttgtaaaggnnnnnnnnncacacacacacaaacattttttcaatgtagcaaaatcaaacttnnnnnnnnnnnnnnnnnnnnnnnncctgagcaggcggccgcaagcttattccctttagtgaggttaattttagcttggcactgcccg

SEQ ID NO: 131630 - DNA, 834 bp, Homo Sapiens
aggtctgggaggtgtttaattccacctcgaacaacttggcaaggtcagcagagaagcaaatggataaaagtacttcacaacagcagaaaagttccatcaggggcgcgtgattcccacaaaaccatggcaatgtgtcctactctcaggaacccacaatggagggcggctccggaggattttccatgaggcagtacgaggcccgtacatgcaacgctgctgagccccgcctcaggcggtggtactggccgccccgagtccccgaaacagcgaccagcagggggccaaggccgacagccctgacccccgcctcctccggggtgtgccccactgctccagacaagacagaccccagcgtgcgggcatgggaggcggagctgccaggccacggccgggtttcctgctctcggagtcgagcagaggcaagtgaaacaaaggtcagtgaacaccgaggtccagagcagccgccgcctctggcacctcccgagtcccaagggcccgatacgagagtccttgcggcttcgtcccgcacagcgccctgcatctgagacaatcgtgttccgatctcctctccggtggctgtcgtcggctggggagggcctgggggaagagggtcacagcccctcaaagcaaggcctccagccagggccagatgcagcccagccagtggggagaaagcagctcccaggccaccgggccctggaaccctggacatgtcaccagcactgctgtgtaggcacagcctggagcatcactgagaatggacagtcatcgtctgtggctttgctcttaacagcacgtctgaccctgctggagcctggctgagcccacggagtc

SEQ ID NO: 131631 - DNA, 1549 bp, Homo Sapiens
tattgtttttatattgtaaacaaatttaatgaccaaatgatagactggtaaaaaatgtgcctatcaccaagggctgatacctttcctgtggcccaggccctctgctctttaaaaatggggcacaaatacaggcaggtaagagacagacagctctcatcctgcactcttggctttctgagaggtatgaccccaaggtcctggagtctagctgctgcttcctcctctgggaaatagaggagtgatattggtagtacctagggcatagcactgctgggacaattcagtgatttggggactgatctccatatcaagatgacctgatcctgtctgtgtgcgggacagtggctagcacggagcccttgttaggcccgcctaccatctgacccttctcaaaccttcccgtctgaggacatctgcatgcacacttgtccctccaatgctgtctcactctggatggccctgacacctgagaggccagacagccaagtggtttctaggacctttgtgattctaggcctgggttcctgtttcatttctgcctctgatggccgagtggccttgaggaagcaacatctttccaggcctcctttgacccacttcactagttcatggggccatctgaggattcaacccggtgtcaggcacttcgctcgggcctgacagaggacagaagcgctccgtagcagaggctttcgttctttaatagtcgctctgagcatcttgtctgcctccatccagctctcactttccctgtctggctctaattctggttgacccagagggcatagctgaggctcggaggtcaggaaccgtggactccaggaggcagttttgagggtccttcaggcttggccacggcaggataccaccattccatctcagaggcatgaggagtccctaggccccgacttggtgacccttgccctgtgtgccccctcaacagtggccaggccctcctgtgtgtgtctgctgggggagcaggagccgggtgtgggggcatgggaaggcgggacgcctgggttcccacaggcccggtggctgagtcaccaggcggccatctggctcccattagcccagggcggcagggggctccatggggcgggccctgcggccagctgggggcagggacgctggggcaggctgtgtgtgggatgactcaggacccatgataacagcctgtgtgcatttggggagtgtaaacaggagtgggagaggaaggcggaggaagggaaaattgtggttgggcagaggggggctggtggggctgagaagggtagagtcccccctccctctacactcaagctggcaggccccgtgatccacagcctgggtcctggggagagaagagagctgcccccatcctccctgcctggggtctcctccctcccctggggctgtattactcagtggtcagggttctgctgccatatagcagccaggtttgagggaagggggaagaaggggcccagagcctggagtcggggatcaaaacccagagataaaggctgagcctcgtgccgattcgcacacccagcctcgtacctagccg

SEQ ID NO: 131632 - DNA, 616 bp, Homo Sapiens
ccaccatccacccaggaggcctctcccactggtgatatggctgtaggatcccccttgatgcaagaggtaggctccccgaaagaccctggaaagtccctgccacctgtaccaccaatgggcctgcccccaccccagggagtttggccgggggaacccattcatgctgttcctctgcctggccatcctgctggagcaccgcgaccacatcatgcgcaatgggctggattataatgagctggccatgcactttgaccgccttgtgcgaaaacaccacctggggcgcgtcctgcgccgggctagggctctctttgctgattacctgcagtcagaggtgtgggactcagaggagggggctgaggccacagccgcatcttgatcaggctttctcaagccctccatcggccccaccagatctccattctttgccatgagggccaacacatgagaccccacctccctccctgcctgccagccctagacttgttggagcatagagcccttcctccccaggcctaagtatgtggagctctgctttggcactgccccgcagaggccacgcctatttattctgtttctgttgttttgtttttaacaactatactttgcacccatgaag

SEQ ID NO: 131633 - DNA, 1394 bp, Homo Sapiens
ttttttttaatcagatttagcagatacgtttattcaacacagtgcatgattcaaagcatcggatattccacagccaacaaggtttcctattccctattacaaaataccggataccctgaatatagctcattcaaggtcctcgttcctttttccctatatctagaattaaacaggtttccccgtttagcgcacatttcacgttcgctgaaggctttggggagagggggaaacagagcttatgactgcccctctgaaccaaaggcacttaatgttaaaagataaagcacagtagagtcaccccacagacattcctatgtgttcaacggctgaactgcagcataccatcaccggccccatgtgggattcatcataacaacgtaaaagacactgatttccttggaaaaacaaagtgcagtacgaatataaaggagtcaccacacccctcttccgaaaataatacataagagaactcttactttacatgattagtatcactcaaggttcacacatggaaaaaatagctaaaaaataatctatcataaattctcactatgaagtcacaatagaatctgataccctttttagaactggtgagttggagagacacccagaggtcatgctgtccatcccttcatttgataggggagggcacttgagggccaggaaggtcaagcgtcggacctggggtctaacccctgtggcagagcctgcgtaggatgcgggcctcctgaagcctagctcagggttccctccactccccttcctctttaaagactctcaaaagtaaaatatggcgatgatctccaaagatgcaccacaccataaagcacatgcactgacccaggtcagcaatttggtctcacaaggcggttcctttggccattgggcaggtatgtaacccacctcagggtgggaattctttgcatgggatcgttcaaagttctgagaaaagcccaatgtaggtcagacacgactgctccttggactggggaagactttccttggttgtcagtccatagtgggcaggcggtcggctgcacagcggaatcccagattcgaagcagagctatcaggtgtgttctggctccgagcagcacagcgatacctgtaacaataagacctatggcacatgtaggatccacctttcttcactcggtctttcccagaagggggaccttttgggttaagcgtttcttcaacagaatgatgaacagtccaccagtctgaagtccattcccatgcgttccccactatgttgtataagccataaccattgggagggaaggcatcaacaggcgcagttccttggaagccatccccaccagtgttggtcaccggaaactcgccctgccaaatgttggcataatgctggcctttgggctgcagtttgttgc

SEQ ID NO: 131634 - DNA, 1152 bp, Homo Sapiens
  misc_feature (1056)..(1080): n is a, c, g, or t
ctggggaaaatagtttaatgtatcgctcagaaaaaaatagtttatatttttccatctgaaacagtgctttacgaggtccaacgccaccaagcgactttcattctgtcccatactgccgaaagtgaatctaaggcaggacggacgtccaggatggtgaactggtagtccttgttgacttcaccaccatcataataatcaatcacatatctaacttctgtcccgcaacggtttatgatccaatcgtgcctatcaaaaggcaactcataccccatccaggaacgaattcgtgcccttggtgaatactcttttgctttccctccaaaccggatcaatgatggaccacaaggacactctgcagcatgaagggcttcccacttcaaaatctccttccaagcctgctcgttattctgattgtgaattctaatgatattatacatatccttctgactgatatcctcatccttccacttccaccctttctttaacattgcattccagaacatctgctcagaagggtaaacccactttttctctgaatctgctctcggaatggatgactcttctctgacagtagacaatgcaaatggctgatctggagctggtgtttgatttggtggtggcatcagatttgaaggatctaggttctccttattctcagccgcagtgcccctaatgggacactccacgtactcataggcgcgttcctggtgggcaggcacagagtatgttttcttctcacaggttgggccagatggctctgtattcactggacagcctttcattttcccttcatgcatcgggcatcctgaaggtggggacgctgaagcatttgaggcctgaactgcaacagcaggagcagatggagacaaacccatggctggaaacagtgttgactgtaaacaattttaaatttccacctgctccagcccgtggtccccagaccaaaccggccgcggccagcctgcccttctgcacctaagccctcccccgggctgttccgggaggccggtaccgccttcagtcgccaacccgaacccagagcagcagtgacttcannnnnnnnnnnnnnnnnnnnnnnnnttcctctcactcggggtcaccgctgtgctgcctcgttgccgaattcacacccagcctcgtacctagccgtac

SEQ ID NO: 131635 - DNA, 1126 bp, Homo Sapiens
ttttaaccctgatgagaagctttattgctaaaaagtcagtgagggtttattgagtccccaaacaccagctctttaaaccactccaacaactgctgtgaaggtcactgtgcagagaccctgggtaggggaggctggagccaggtgagtgtgacaggtcacagatggctctcaggccacctgccttcagctccttttgtttcgggttctagccagaagccctggggcctgtctcttgcctcttcttgtagcatgagacacccttgggggccctggggaagggaaggccagtggtgtggcttccctttcagcctagcaacgcccaaacccttttcctctacctggctccacttgtccccagatgctatctccaaattccaagtagcaaaattcctgggtttccccttcccagctcagagtcacttatggctggaatgtgggacaaactcttctaccagaaggtccagggcggttgcagcagctcaaaggtggggatgctggtgacattgactgggatggaaatgatggcccatggcagcccatgctgttccagagagcggcggatcatgtagccgtctcggccgagcaggaagagggcggggatgtcagctgtgcgctgggtactgtcctggatcatctccacgtagaagctgtcattgtcaactgcgttgtcagagatgatcaccgcccgcccgccgtgctcctggaccacccgagtcttggagaggaaggagcagccccccctctccaccagagcaatctggtcctggatgaagaaaccgttgctgagttccccgcaggcctctggaggttcagcggggacaaggtgaatctgctcataccttgtgtgaaagataccaccaaagtccttggcaggtgtggctgtgaagatgtatcgaatgtccccaggactcagcacttgaaagtacaaataatcatggatacggaagccgtgggccgcgacgcacgcggggagccagagcacgagacaacaccagcccgcggcgccggggaccatctccagggcccggcccggcgccgcgtttcctctcgccgccccgccgcgcgtcgctcgcaggactcctcgtgccgaattcaacacccagcctcgtacctagaccgtaatgtt

SEQ ID NO: 131636 - DNA, 929 bp, Homo Sapiens
ttcacggtcccttttggttttgggtttttagcccagaaagccctgggggccctgtttctggccttcttcttgtagcctggagaccccccttggggggccctgggggaagggaagggccagtggtgtgttttccctttcagccttggcaacgccccaaaccctttttcctctacttggctccacttgtcccccagatgctatctccaaattcccaagtagcaaaattccctgggtttcccctttcccagcttcagagtcacttatggctggaatgtgggacaaactcttctaccagaaggtccagggcggttgcagcagctcaaaggtggggatgctggtgacattgactgggatggaaatgatggcccatggcagcccatgctgttccagagagcggcggatcatgtagccgtctcggccgagcaggaagagggcggggatgtcagctgtgcgctgggtactgtcctggatcatctccacgtagaagctgtcattgtcaactgcgttgtcagagatgatcaccgcccgcccgccgtgctcctggaccacccgagtcttggagaggaaggagcagccccccctctccaccagagcaatctggtcctggatgaagaaaccgttgctgagttccccgcaggcctctggaggttcagcggggacaaggtgaatctgctcataccttgtgtgaaagataccaccaaagtccttggcaggtgtggctgtgaagatgtatcgaatgtccccaggactcagcacttgaaagtacaaataatcatggatacggaagccgtgggccgcgacgcacgcggggagccagagcacgagacaacaccagcccgcggcgccggggaccatctccagggccgggcccggcccggcgccgcgtttcctctcgccgccccgccgcgcgtcgctcgcaggacttcagc

SEQ ID NO: 131637 - DNA, 486 bp, Homo Sapiens
ttttttgcaaggacagagtgaatttattccaagaatgccagtcctgagaacccacttcccacaggcaccaggtcacttggcacgctccgtagttttgctagttaaggcctgggatggcagtgaatcactgggtcactgctaccaacttggcaagggaccgccaccctcactcccacgctcacatgagggttgagtgtaagtctacaactctaagccatagggaatgcctcaaagggcctcttcagggttggccttgctaagggactcccagccatatgccaaggctggctgtcaaccctttccagggcccttgtggaatgagaaggccagccataggatttgtaaaggccacgtgggatactaagcttgggaccttcctatgtccaggaggaacagaggctacatctaggcccctgtccaccaggtcacagtcctgtcccaggcactctctgcttgcccagatcttgctctggtcagccctcgtgc

SEQ ID NO: 131638 - DNA, 1101 bp, Homo Sapiens
cacaattaatgaaggattttatttgaagataaagtcaaaattatggcaccgaggaaggtaataaacatttgaaatttttattgatttttaaatttaaaatccagttttaaccacaaaattgtttgaatcacaagtggtaatacaatgtcttcaatatttttctaaagttatttttctatataataataagacaacagcatagcatataggaagttttcattccagtggcttttttatatatttatccttcttaggaaggacaaattaaattttttaaattaaacttttaaaatataacaacatctaacagaactgtacaaaacaaagagacattttttaaacaacttgccaaacttacttatgagtgtgttttaaaaacaactttgtaaatgtctgggcaaagaagcaagctgtcgtcctccctttaccttcatagtgagtttgtaaggctttgtctttgtaagcagaaagagtagactgtgttgttttttgccaaaaactgtttatacttaatctcactgaagtattgctatatggagaacccatactctgatcaacttgattttttgtgtgtaatgcttgatctaccaggtaacttcccaactgctcctaatgctagcgggctaatcccacattattattccactatcatccctgcagaaaggtcttggttttgatgaaaatcagccctttccttacctgctactgcctcaaaaagggaccaggaagattctagctggctaattcactgttccctttgagcaagaaaacggcacagggagaaaaggacttatctggtgagagatttggcatataccttcaatgtgtgccctataacacaacattgtctccgatctcatctttctatcaaatgacttccaacactcttaagtctcaggtattcttaaatctgtatcatcaaacatgaagcttctcttgtttgttagagtaattaatctttctttggattaaagtttccctttgaaataaaaccacctacctaatctgactgctaaatttctagcttctttgttttaaatatgctcaggagtcaacccaaattctgcagcaaataagtttgcttattaacaaaaaagtaaa

SEQ ID NO: 131639 - DNA, 674 bp, Homo Sapiens
  misc_feature (13)..(22): n is a, c, g, or t
  misc_feature (624)..(634): n is a, c, g, or t
  misc_feature (642)..(642): n is a, c, g, or t
aactgttggcccnnnnnnnnnntttattttcctttcaaataaaatgtacaaccaaaatttagggtttggagcagtagggaagacaggagataccagggagcccattttacagtagagatctgcatctgacccctctatcccatacctttgcaaaggaggggaggggtctacaagccagaactttcagaagagaagaaaatacatgctgtgctggtgctgtttctggagcaggtcatcctttaggtatagaacaccacctccacccgatgacatcagaaccactgactggtagagtccttggaaatcatacagtccacccatcccccaccagacacatggacacaccgaggctcagatggggaagggtacataccctagggcacacaccaaatcaaaaaggtgaagtcaggactagaacacctgagcaactttagcaggggactgtggccacaggcctggatgtgcacagtagatcatgaaatacattagtcctatgaatgacccccgtgcagagaaatggctgtggttgtcagggagcagccactgctcaggggctcctgacctcagtgaaaggtgactgtgtaaaggccagaaactggatggtggtcatgaacctcaggacgnnnnnnnnnnnagcaccanatggtggagctctctgccagctcagcttcttg

SEQ ID NO: 131640 - DNA, 753 bp, Homo Sapiens
agaatagttttttctcatcaaaacatgatttattaattttaagcaagagtaagcatatgtgatagtggccagcttggggatagaactcttcctggttgatgcacagttcagcacctgttgggtcttggctgttgggatgataattcttttgggtgaggggaacagccgtggtcaaggctgcctgcacccccatccaggcacaggaccctgggcaaagtctcaaaagaggtagtgtttttactttcgcaccaacaatacaacataagtattgggtacaaaagaggagatttccttcccctctacctcaacgggcaaaaggccttccatcttcagaagaggcttgtgaggaccatcggttgatgacctcctagtgaattctggctcccattcagagcacagagaaacccacaaaaggggcctgtggctctggttccaggtctcaagggtacagcttggttacatccccaggccccaggctgattctcctgccatcatactgcaagccttcctgtaccactttgacccaggttgaggtctggcggaaaataacctcaaaggcaattaatacaaaaagcttcctgtaagctaagaggggttatcaactatatgtacttatttttccagagattgaagagagaagagaacgagccaaggcttggttttgttttatgttggtggacatgtagaactttggcataacgaacccatagagctgcagccatccatctgttttggttagatgagttttttttc

SEQ ID NO: 131641 - DNA, 639 bp, Homo Sapiens
ggaaattatttttattttttaaattcacaaataataattatatatactcatggcatacaacatatttttatatatgtacatattgtgaaatgactaaattaaggtaattaacatctattactgcacatatttttttgtggtagaacactcacactactctcagcaattttcaagtatatgttatattgctattaactataattgatacattgtacaattgattttctgaacttattccacctaactaaacctttgtatcatttgaccaacatctccccagtccctccctcccccagcccttgataaccatcattctactctctgcttctgagtttgactttttaagattctacatatcagtgagatcatgtggtatttgtctttctggggcaaggcctgatattttacaagcttgacttttgtgtttggtactcattaaatagtttatatgcacaactccccacccacactggttctcaaagtcagtctcacaggtgtaatattttttcaggcagtagggtgagggggaaagcagtaatgtttattgggcatcttctacggaccgggccttttaagcagtatcaattgacctcacctaatctttacaacagctctgtgaagtctgcattatgcttggag

SEQ ID NO: 131642 - DNA, 1997 bp, Homo Sapiens
  misc_feature (961)..(961): n is a, c, g, or t
cctccctttctcttgttttattttgccctgctctgttttacagcatgccaaatcctttggcatacgtgatggccttcaacaatctctctttaagtttttctttgcttgagtattccggaagtaaaagcacattaaagcaagtatgagatgtaggtaacctttctgtgtctgggccatttttggctataatcatctttaattttcctagtcctcccacaggtgctctgtctgtgcccgttgtaaactgcaagaagagtcttttctgttcatctgtaaatgaatgaacgatttcccagaactccctaatcagaacagagtccctggtatagccaccgtcatattctgtagtttcttctagtgcttggaaatctagattccggcttccacatataagcaattcaatttcttctggtctgaataagtactttaagggagattcattggtcaccatatgaaaacctctccgaaaagccttgaactgtttttctactgatttattgagaatgtagtcagaataaagattgacaaattccttcctgttttcatttgtaattggaattttatcaccattttcctttagatcatacatcattgggttaccaaaaagatctgtctgtgatatctggaaagtgatcatcatgtcatcttccacattcccttcatactccaataaatcttttaaactctgatatagaactgggtgagagtctcccaagtcacgaaaagttccttttttccccattagcttcctgtagacaaccatgggaaaatgtacatccagtatacagttattgtaaatagccagacccagtactatgccaatcagagtaaactgaccctcagtttcaaaagaagatggattaaaccaaaacaattttgtagattcatcgtatgtgaacataccaatatctggattgaagatttcctccacaaccagctgaaaaaattctttggaaacacntccctcatcaactccttgttctccttcaaattccacatacaactgcttcttcaagtctgcaggattttccatagcgatcatctctagccggacaagtgcatcatctatgatatggtcacgtctaactttgagtctcaaatatggattcaactgctgtccttgaactaagctgtagagaacagtgattcttcgttcactgtacatgcgaattctattgtcataatataatcccaaattctttgtgacagcattcaatataaagggacatgtcataaaagagaatttgttctctgtttctactttgaaaaaagtataatctttatccatttctagaacctcattcagtggttcattaataaactcttcaaaagggataagtggttttcgacaatccagggttttaacaccaagttcagtttccagggggtccactcgaggacctttcttgtttcttctttcttctcccaaaagttcctgaagtgtcagctcgctggactcagggatgggctcttcatcatcttcttcattgtgatttgtgtccacttcccctcccactacatttgcatagtaaaccattttcaagcacttcgaagcagcaacaatggcatcatcatcattcactagatttcgactgttaaattcattgcttatgactttataagtaataagttgctgaaatgtctccatcattctccgaatctggtctgcattgtatttagaccacagtctgatcagttttccttgggctgcaaggggtagcttgctcatcgctttgcaaaataatggcaaagccatttccagatattcaggactgtggagatttctattctccattacgattatgaaccaattcagattattaggatctcgagagtatacattgtgatacggtcaagtcacattccacgttatgtgacaatattcagtgccttgagaaaggcgttcaatttttcattaagaagcatcggttttaacctcttatggtcatttcccgaacttctcggcctatttgccatgggtccccttagcttacttt

SEQ ID NO: 131643 - DNA, 768 bp, Homo Sapiens
tttcagaggaagaacagcgaggggcatttaatcttagaacttaagaggtctcagagacaaaggctttggaagaaaggcgtgggcattcctgaggctttactttccccggaaaattactgcaccataatttgtgagtttatttcttccaactaagaaatagaggcaagaaagagggagtaacccgaagtgaagggctctaggatccagggaccaccagccagctcaagttggatttcagcagtcggggctgcctggggcgtgcaaaagctgctgtgtgagcaaaacgctgccgtgaagacattccaggcggcttccaggaagcggctgtatgtgctgacacgcatgtggacaggcagtctggctggccacctctcaagactggtgtttcctagagctttccattggcaaatgctgcctcctggaactgagggacaaaggttttgaaataagcctttgctcttttggccatttcatttccatcccatctggggctgtacggataatttttttgggcctgggagtaaagctgtccactgttggtaaagtgataaacggactgaaatgtgagagttggctggtctcgagggaaaaacagaggcaggtcaatgtgtacaagaaaacaaaaatctttccacatcagcagcagagtgagttttggtaagccttctgcatcatattccacgacacctgtgccaaagtgactgagaaaagcagcatatactctcttcttttgtgatacccttgatcacgtactgcacttgttggtga

SEQ ID NO: 131644 - DNA, 586 bp, Homo Sapiens
  misc_feature (256)..(256): n is a, c, g, or t
cagaggaagaacacgaggggcatttaatcttagaacttaagaggtctcagagacaaaggctttggaagaaaggcgtgggcattcctgaggctttactttccccggaaaattactgcaccataatttgtgagtttatttcttccaactaagaaatagaggcaagaaagagggagtaacccgaagtgaagggctctaggatccagggaccaccagccagctcaagttggatttcagcagtcggggctgcctggggcgntgcaaaagctgctgtgtgagcaaaacgctgccgtgaagacattccaggcggcttccaggaagcggctgtatgtgctgacacgcatgtggacaggcagtctggctgggcacctctcaagactggtgtttcctagagctttccattggcaaatgctgcctcctggaactgagggacaaaggttttgaaataagccctatgcaatttggagaggatgcctggatgtcaggcagagcatggattcctccccatctctgttgctctctctttttgctcttttggccatttcatttccatcccatctggggctgtacggataattttttttgggcc

SEQ ID NO: 131645 - DNA, 764 bp, Homo Sapiens
  misc_feature (388)..(529): n is a, c, g, or t
  misc_feature (532)..(542): n is a, c, g, or t
ttaagtagacaagtttgcagtttattgagtaatggctggcttcacagatgttatcactgggggcggttgatagggggaacaggaaaatgctctcagaggttcccactgaagccctttcatctgccctgccccacccaccactgaagccagaggtcatgggagttgggatctaactacactctgtgaacttaccaccacccattccatccccaagcccatattttatttggactagccactgatgcccgggcccttcctcttccagggggtgggagggtggaggtggggacaggaccaaccctcaagaaagaaaagaggttaaggtgggggttttgctgaatgtctaagaaatgtcagtggaacaggctgggcacagtggctcatgctnnnnnnnnnnnnnnnnnnnnnnnnnnnnnnnnnnnnnnnnnnnnnnnnnnnnnnnnnnnnnnnnnnnnnnnnnnnnnnnnnnnnnnnnnnnnnnnnnnnnnnnnnnnnnnnnnnnnnnnnnnnnnnnnnnnnnnnnnnnnnncgnnnnnnnnnnnggtccgtgccaagctgctccctgcccttgccctttccctttccctggggtccaaaccacatgtgtcctgcctctcctggccctaccacattctggtgctgtcctcactcgcccctggcccagaggctcctgaagatgctgggcggtcctggcacagggaggagcagctctgtaaatctgtgcacatggccactcttggcctaataaaggaggtctcacagtc

SEQ ID NO: 131646 - DNA, 948 bp, Homo Sapiens
  misc_feature (135)..(135): n is a, c, g, or t
tgaaagttgcactaccatgatgaagatcgattcaaacatataaagtctatgcgcgcagcacgcgcatgatagagtcccttcgagcgctctgagcagctcctcacctgtcgggagacggctcagagagcagggccnccatgctgccaacctcgctttgctccttaacgaagatctcaaagtactggtagatgattgtgactgcgagcaggatcccggttccagacccaatggcgcctaggaagtcagccaggaccgagagggccccgatgcacagcccaccaaaggccgcggctgtggggatgtaccggttgagttcatggaccatggaggtctctcggtggcctctcatcaccatctgctgctccttcagctgctttgcaacatctttggcagaggaacctgagacctcaatccacgttttggagaagaatgcacaggagcccagcatgaacactatgtatacaactgcatggaccgggtcttctaacacggagccaaaagattctggaggggacaggtaatagcaaaggccaccaactggataagcacgtgctgggcccccagaagacgtgtccgaccaggtgcccagcaggctgaccagcaagttgccactgaagcgagctgagagcatttgggagatgacataaaggttggacaccagggcagactgcaggatgatggggatgttggacgtatagaagagcttgatgggataggtgttgtactggccacggtagcgggccgacttgattggcaggtccactcggaagccctggaaatagatgaccactgcaaagacaaagatggtggcgatgagattcatgaggttgggaagattctggcggtagaacgcctcccgaagggctcggaccttgtctgtgcgtgtggccagcagatggaaaagtgcgcctcgtgccgaattcggcgcgccgtcgacttcatactctc

SEQ ID NO: 131647 - DNA, 1447 bp, Homo Sapiens
  misc_feature (1335)..(1335): n is a, c, g, or t
  misc_feature (1372)..(1372): n is a, c, g, or t
  misc_feature (1408)..(1408): n is a, c, g, or t
gtggaacgcgctgggccgcgggcagcgtcgcctcacgcggagcagagctgagctgaagcgggacccggagcccgagcaggcgccgtcatggcaatcaaatttctggaagtcatcaagcccttctgtgtcatcctgccggaaattcagaagccagagaggaagattcagtttaaggagaaagtgctgtggaccgctatcaccctctttatcttcttagtgtgctgccagattcccctgtttgggatcatgtcttcagattcagctgaccctttctattggatgagagtgattctagcctctaacagaggcacattgatggagctagggatctctcctattgtcacgtctggccttataatgcaactcttggctggcgccaagataattgaagttggtgacaccccaaaagaccgagctctcttcaacggagcccaaaagttatttggcatgatcattactatcggccagtctatcgtgtatgtgatgaccgggatgtatggggacccttctgaaatgggtgctggaatttgcctgctaatcaccattcagctctttgttgctggcttaattgtcctacttttggatgaactcctgcaaaaaggatatggccttggctctggtatttctctcttcattgcaactaacatctgtgaaaccatcgtatggaaggcattcagccccactactgtcaacactggccgaggaatggaatttgaaggtgctatcatcgcacttttccatctgctggccacacgcacagacaaggtccgagcccttcgggaggcgttctaccgccagaatcttcccaacctcatgaatctcatcgccaccatctttgtctttgcagtggtcatctatttccagggcttccgagtggacctgccaatcaagtcggcccgctaccgtggccagtacaacacctatcccatcaagctcttctatacgtccaacatccccatcatcctgcagtctgccctggtgtccaacctttatgtcatctcccaaatgctctcagctcgcttcagtggcaacttgctggtcagcctgctgggcacctggtcggacacgtcttctgggggcccagcacgtgcttatccagttggtggcctttgctattacctgtcccctccagaatcttttggctccgtgttagaagacccggtccatgcagttgtatacatagtgttcatgctgggctcctgtgcattcttctccaaacgtggattgaggtctcaggttcctctgccaaagatgttgcaaagcagctgaaggagcagcagatggtgatgagaggccaccgagagacctccatggtcatgaactcaccggtacatnccacagccgcgcctttggtggctgtgcatcggggccntctcgtctgctgacttctagcgcattggtctggacnggatctgctccagtcacatctctacatacttgaatctcg

SEQ ID NO: 131648 - DNA, 1169 bp, Homo Sapiens
  misc_feature (1121)..(1121): n is a, c, g, or t
  misc_feature (1169)..(1169): n is a, c, g, or t
aaaaaacatgacaatactcaaacgacctttaatgtgcttaaaacgaatcactttacaaaaagcatgaacacttttaaaaatgtaacattggacacagtacacacacttaaaagaaacaacacccacctatggtctgatcttacaaaatggacttgaggaaactcaaagcaatttattaacattctaaataatcataaaatgggcctagttatgtttccacagatttgaaggttacactgataacagatgctcaaaagtgagtctcctttgtcaatctccacagaattttccaacttcaagggacccatgagcccgttttttgcctttttccttaagacttcctatgaaataaatcagcaataagtagggggaagaaacttttatttccaggacacgtgtgcagaagcaacaagtcaaaattaaccattctatctgaaagagaagaaacatgtaccaacacatgtcattcaaggagtagaagtttctagaataaggcaaaagttacagggcagcagttatgacctttaatagaactttgttacactgaaagatacagcctgccatacttgcagggaaaatgtctttcaagaagggtaacacccaatttcttccatacatttaaaaatagcctaatcttaaacttatcaaatcattttagggatgagaaaacagggtcacacaagttaggtgacatcatttatggcaaagcaagaatcggcatgtttattttctaacccccaagctgaaatattttccactgtaccactctaccctatactccaggacttcatctttcttactgaaaaacccaaaccatcaaatgtccccttgttctacccaagaattgttctgcaacatacgccacctgctttcttgctttctatgaggctgaagactagacaggcaggagtttattatacagacctgccatatacttgaagtagtgtgttaagtcaaccagaggccaagttcttgaatgctttctctgtttggattatttccacgctgtctggctgctctgccctggacaggtccctgctctgcacatctctcaaggctgagaagccccaactagggtaactgtcccatcagaaggtgagttcactgggtaatgggagcanctgctcattgtgaaggtgacatgatgttaaaaggcttgaaaggggctn

SEQ ID NO: 131649 - DNA, 449 bp, Homo Sapiens
gggggttctgcagctttattcacaggccccaggggatgaaggcagcaaggacacagacgcgggggacgccccgggatggcctctccacccccaggactgtcagggagcccctgacaggattgtgggggctggaggatgtggagtcccacgagcggctcctgagcgtggtgatgtcatatttctggcgtttcagcttcttcccaaactcgaacttgtcaatctccagctggtgcagggtctcccagagctccttggccttgtccctcagtttgtctttaccaaggtgatcgatgttgagcggcttgcgtctcttagccagaatcttttttttcattttccgggctgtgtgcttcttgcctctcttctggtcagccttggccaggtagcctgctgtagttggctcgcatggaagacagagctttcttcttcttcaggtcgtcctctgccct

SEQ ID NO: 131650 - DNA, 484 bp, Homo Sapiens
ttatttccaggactatgtttttactatagattaaaatttaatataacttaattcacatataaagacaactctgaagaccatctggatatgataatggcctggggttaagtgaaataattgaggtcatgctcaggcctgagcagataccaacttgctcaagcctgagaaataggacttctctctttcactcatcacttcaaaatgcagtggcctcctgcagaagttgcactcagctgaggaatgaggcttcagttccagccccacttgcttccatgtgactagcagattctcaaggaagtagttcatcatctggggtgtgtggtgaggggtggcgactcattcctaggtagtcattactgcaccagactgacacttgcttttttggtgatgagggagtctgaatagtcatctgccatggggaagatgtgtgctcgccggttcacagttttaaaaactcgataggtgtggtcattctttttctcat

SEQ ID NO: 131651 - DNA, 2613 bp, Homo Sapiens
  misc_feature (64)..(75): n is a, c, g, or t
  misc_feature (132)..(140): n is a, c, g, or t
  misc_feature (161)..(208): n is a, c, g, or t
  misc_feature (224)..(235): n is a, c, g, or t
  misc_feature (275)..(286): n is a, c, g, or t
  misc_feature (288)..(288): n is a, c, g, or t
  misc_feature (291)..(292): n is a, c, g, or t
  misc_feature (295)..(392): n is a, c, g, or t
cccgcccgaaaggcggggaaaaatattttgtgtaggggggtggttggtgccacaataatttttnnnnnnnnnnnnacagagaagagggggttttcttctccaaagaaatccccccagggtgcggtttttttnnnnnnnnngcggggtttgaaaaaacgcgnnnnnnnnnnnnnnnnnnnnnnnnnnnnnnnnnnnnnnnnnnnnnnnntttcctcacaaaaaannnnnnnnnnnnaattattggggcccccccggggggttttttataagggggnnnnnnnnnnnntnttnnttnnnnnnnnnnnnnnnnnnnnnnnnnnnnnnnnnnnnnnnnnnnnnnnnnnnnnnnnnnnnnnnnnnnnnnnnnnnnnnnnnnnnnnnnnnnnnnnnnntatttccaggactatgtttttactatagattaaaatttaatataacttaattcacatataaagacaactctgaagaccatctggatatgataatggcctggggttaagtgaaataattgaggtcatgctcaggcctgagcagataccaacttgctcaagcctgagaaataggacttctctctttcactcatcacttcaaaatgcagtggcctcctgcagaagttgcactcagctgaggaatgaggcttcagttccagccccacttgcttccatgtgactagcagattctcaaggaagtagttcatcatctggggtgtgtggtgaggggtgggggcaatccgtaggagctcttctccccggggcaccgtagggtaattgattgcttgcacgtagatgttatgtctgctcattagttcatcacagacttctgtgtttttagcagcatctgcaacccgcacagggatgatgtggctggggcagtggacaacagggaggccggcatccattagcatctgtctcatgagtttgacgttgcgctggtgctggcggcgaagcacccgtccctcagcgctcttcaggatccgcacagactccagggctccagccagcagcatgggtggcagagaggtggtgaagatgaagccagcagcataggaccgtacggtgtcaatcagagaactcgtgctggcgatgtaccctccaacacaaccaaaggctttgccaagtgttccagaaatgatgtccatttttggcatgactccatcccgatccccaatccctccgcctcgagccccataaagccccactgcgtggacctcatccacgaaggtgattgctccaaactcatgggccacatcacacagctcttccagtgggcacaccgccccatccattgaatggacagtttcaaatgccacaatcttggggactgaggggtcagatctttgcagcagttctctgaggtggctgacatcattgtggcggaagatgtactttggcactcggctgtttcgaatcccttggatcatggaggcatggttcccagaatcagagtaaatctcacagcctggcatcatcttacgccagggtgaagaggggttgagtcattggccacaaagcacgaggaaaacaagagtgcggcatctttcccatggaggtctgccagctcccgctttaagtccacatggaatttactagttccagaaatatttctagtaccacctgccccagcaccatgttgtttcaaagtgtccataactgccccacacacccgtgggtggcgactcattcctaggtagtcattactgcaccagactgacacttgctttttggtgatgagggagtctgcatagtcatctgccatggggaagatgtgtgctcgccggttcacagttttaaaaactcgataggtgtggtcattctttttctcatcaatttttttctcaaagaaacgatcatactgaaaagtggaaacagattttggcaagttatcttgaagaagatgagacactctttctggtctttgcttttgcatgatgtcctggaagttcttcagcagtccactgggatcccctccatcggttttcacactaaccacactggggcctgctgaggtttcagcaacctctttcctcacggcattcatttcctgcacatcctcctgaagctcaagactggctttgcagaagacactgctgcctctctgattcatctgtgctgccaggaaagggcatttgcttgcagtgccctggcttgtggcaggcaaggggtgtccagacggaagctgtgtgccatctggactctgctgggatccatcaggagtctgttggaccttggccttagcagttttgtctttctcactggccggaggggtttctttgatctgttggtagtgtactgctgcagtggacaatgcccgaggggctggcttggccccaacttccatcatcttggggcagttttgggcatagaacaacagagatttgcctgctttctgcagaaaggcctgggggactcgggataagaatgggcagcggcgaacaacactctccatgttcaggaagtatgctggctcctgtggaaagactgcgctgaggactgcagaggcggcggcgaaggaggcgggcactcaagtcgagaagtccaaacgaaacgctcgttgcccttgtcgggagagcagcctcaggccgccctctttcgcaggattccggaccggtccagc

SEQ ID NO: 131652 - DNA, 1331 bp, Homo Sapiens
  misc_feature (955)..(968): n is a, c, g, or t
ttttaaccagaggtggaatctttatttcacaagtttcaagatacagtacaaaacgattctgtacatctctctattaacaggatttgtttacacaattatattacacttcaccaacctttatactgcatttcattaaatacaaaatacatttacaaaaagagtctaccatggtgttccttcacaatgccagcttaaggtcttttaaaacttcctcttctacatatttatagtggttacatcttgattatatcaacattatgagttttatgagtttattttctaatcaaagagaatagtgtcagcctgtttctcaaaccaaataggaaaaacagcatgtgagatgattccctgcacataaccaaggaatccttttcatgcacacaacattggacttttacttgtgcagtcactttaacatacaaatcatctttccttgggatcgttttaaattttcttgaaataccaagtgggtggagagcttcttttcaatgaataccacacatttaaaatccagatcgtgcctcaggcattcaggagtgttatattttaatttatatttgagagtgatgactgatgaaaaatatttgcatgaaaatagaaattttcttttgttctgatcatttcttacatacttctagtcataataatgtgtaatacatatatatattatgagattcactttcaaaacaaatatcagctgtcactgaaatatagccctgcttgtcttggcaggtaaaggggctgttttcatgacacatcttgttttgaaatgtgcatgtgaaatgttagtccgaacctctgtaaaggaagtttttgcgtatgtagttagacattaatacacatgctatacacataaagaattgtgtttttcatttataggcctgcatgcatacttccaaaacactggtttgaagaatgaacatgaggataaaagaagggagagaaagacaaagcnnnnnnnnnnnnnnttcctatatatatattaataaaatacttaagtttcctggaggcatcaacggctctttaaataaatcatcagatcatcaccagatcactggcaggggtttccaaaacttcccaacagtacagagacagaatggcttagtggtaagactctcacatgtaaggtaaaaattaacctaatatgcaaaaaagtaacaaatccttagtatcaagattaataatttataaattcatctgagttaagtgctaaacaatacattttgaaaagaagtcatctttgatttactttttctttgccattgactgctaatcaaaaataagccttacctagaaaacagaaactgaaacttcaaacacagagacagaaa

SEQ ID NO: 131653 - DNA, 573 bp, Homo Sapiens
  misc_feature (103)..(160): n is a, c, g, or t
ggagagaaggctcccacttgagagcagcctctacctgaccccctggaccacagagagccactctgaccctcagccccctcgcttcttcagctaaaactccaannnnnnnnnnnnnnnnnnnnnnnnnnnnnnnnnnnnnnnnnnnnnnnnnnnnnnnnnngggtgggtcattgcggtcttagattatgtttctcttgctaccaaacagtcatgtattaactctctttggatgatgaagtttaaagagtcaataaatagaaacaccagatgactgcattgtgtcgccacagtggcctcctgtcagcaacctcagggctcagtctcccttgccacatgggccttccgacgtccacacacttgggaagaagggaggccttggagacccagaagagtgctggacggcgaggttgccacgatttgctgtgttacctgggcaggtggctgggctgcagtttcctcatcaggaaaataaaggggttgtaccagttcagtgctttgtaaccagggttacatggtagaatcccttgcagatgacatgtaaatgcggaaacatgattcgtaacttatttacgt

SEQ ID NO: 131654 - DNA, 958 bp, Homo Sapiens
  misc_feature (806)..(857): n is a, c, g, or t
ggagtacggaatgctggggaatccccatgttacagtatttatgtttctttttagatgtgtaccttcccaagcacttatttatgcagtgacctggtcacctggggtgggggtgatttgaggaaatgacatgaggaaaagaaacctattcctgccctggggaccaccctgggactctaaccaagccttcctggagggacccatgcgcccctgagccccattccattcatacagacacacacgtacgcacactgcatgtccaaggccctaaacattgcccgttgacataaactttccagggccccagcctgatggggctgccctcagtcctctagatcaagatgctgactattagggggcagtgattgccatctggggacctgtcaggctttgtcatttcccagtttgttggtggtgcctttagtggttccctaatttgggaacactgatggggccttggacagggctttctctcaggtaggagaaatgggcccatgatctcctcacagtcgcccccagtccttggccctgcttccctgtgtctcatgcactggcacatatggtcaccttggagggcagacctaggagcccctctgaccactgaatccgtctccacaccccttctgcccaagggaagccccttcaggaagggccccccaaagctgaggggctggaatgtaggcttttcaacacgagtaaggctcccacttgagagcagcctctacctgaccccctggaccacagagagccactctgaccctcagccccctcgcttcttcagctaaaactccaaaggtttggtttcagannnnnnnnnnnnnnnnnnnnnnnnnnnnnnnnnnnnnnnnnnnnnnnnnnnnattgcggtcttagattatgtttctcttgctaccaaacagtcatgtattaactctctttggatgatgaagtttaaagagtcaataaatagaaacaccagatg

SEQ ID NO: 131655 - DNA, 986 bp, Homo Sapiens
  misc_feature (683)..(683): n is a, c, g, or t
  misc_feature (687)..(687): n is a, c, g, or t
  misc_feature (738)..(738): n is a, c, g, or t
  misc_feature (741)..(741): n is a, c, g, or t
  misc_feature (765)..(765): n is a, c, g, or t
  misc_feature (821)..(821): n is a, c, g, or t
  misc_feature (832)..(832): n is a, c, g, or t
  misc_feature (899)..(899): n is a, c, g, or t
ggaggctgagcaccttttttattaataggtataataaataaataaataaatacataaacagacgcctgggctcctcctccctcttctgatgaccaggcactggccacagcctatttacagctggggggcttagggatctggccccaatactgttacccatcctcatctccacctggcctagggaaccctgtagatggctttctgggccacccgcctccagggggacttgcttgtcttcacccatggaagggttggcccagacgggccaggggaatcctggcagcccagtgctgtgtcccatccctctcctgggtggaggtctggacaaggtcactgggacagttaagggggcgtaattaatactgagcacagggagcaggtgccagcacagggatacgtggccccagctctcagtctactctgcagccaagccaatggcttgggaagggctctcgggctctgagtctgggggttatgagggtccctgaggccaccagcatgcacagggcctcagttttggctgcttccaggggttggacttggagttggggtcaatgtcacgtaggccaggggcaccaggccagagtcggggccacggctgcagcgcagccagtctcctccagctcgccccagcactcgtaggatgtctccttttgtggagctcagctgtccagggccggtgngcangtggtggcacagtgcctgcacctcacacggaggactggagggcaggctggngantgtggctcctgcaggtctccttgngctctggctcccggcgggaaccactgtctgcgcactagttggacatgacttgtcangtcaacagtcngagggagctatttgtggcgggctccgctgggcttcgctcgtgcgattctggctcgaggcaatcctanaggagtcgataatcgtaccagtcaacgttccggtgaatgtatcgtcaaatcaaaaaatagacgggacaaatgtaactgggtgccaaa

SEQ ID NO: 131656 - DNA, 1216 bp, Homo Sapiens
  misc_feature (164)..(254): n is a, c, g, or t
  misc_feature (929)..(929): n is a, c, g, or t
  misc_feature (942)..(942): n is a, c, g, or t
  misc_feature (996)..(996): n is a, c, g, or t
  misc_feature (1053)..(1053): n is a, c, g, or t
  misc_feature (1181)..(1181): n is a, c, g, or t
  misc_feature (1187)..(1187): n is a, c, g, or t
ggggggggagattcccaaagccctatggtcatggcccaggggtttttccttggggaacacaggtatgggcccaagttcccctttcccttttggggggccggcggccccaaaagagaatggtttatgaaaaattttttgaggggccgagagcgggccggacaagnnnnnnnnnnnnnnnnnnnnnnnnnnnnnnnnnnnnnnnnnnnnnnnnnnnnnnnnnnnnnnnnnnnnnnnnnnnnnnnnnnnnnnnnnnncacagcatattaggatgaactttatttttacattgttgtacaattcattggtaaacttaaaaaaatacaaatacatgatttgattgttgtcccagaaaagacttttgtcacattgccagctgtttccctcagcgtctcctgctcctgtcagcaattctgtatgtaactgcaataatttgtgtgacttgagaaaggtgtgccaagggcgtcctcacagtgagaagggaccaggcagacatcctggggccctcggcctcctcctgcctcccctcccaggggatgtgatgacaggaccccgaagctgtggctctgacaggtgggatctctaaaggggacagtcccatgaaagacacacggggacaccagctcactgggagcttttgctttcccaaacaagatgtgggcagcatgactccagcctctggaacccaacaatgtatcttccacaaacttttgataagcttgcaaataaaacagaatgaaacctcactagcctgaaggaacacactgagtgcggcgggaaaccccgggaagggctcagtgggttccagcagttccttacgcgaggccctgctgcccagcacagctccaggacacaccgaggacagtgccacaggctggcagcccgaggctgtggagcttgcaggatggcgatggagagggagagtttcctgnaaagccctcctgnggttttctgtctgttccctattcatactgctaccctcagaaagagcattctgtngcaacgggctgatctttctgggacaactaaaggtacattaactctctccagcaaganaggtgagaaagctgcaaccatatgtatcgcttactcacgagtgttaagtcaccatacattgcaagcaacaccaacgccctcaagtgagcaataatgacagttacctcagtcgacacctcaatgcaaanatgtgngactgcttaaaacgaatgaatcggacagg

SEQ ID NO: 131657 - DNA, 1480 bp, Homo Sapiens
caaacacaaaatagtaaatttttatttactatagcacaattcaagtattctcttaaatttatatttagtcaactaaaacatgacagtgactttataagagctttccttttaaaaggttgctgttatacaaaagtatgactctattactctaaatgcttagaataagtggaaagaacaaatgacagtagacaaaaacctttatgagtgagtcatcaacacataaaaggttgcacacatcagtaataggacatgtgaaggtaacatcccaaaagtatttgaactcatgtaaacaaagactatgtatattcctaagggagaaaatgtactaccaagataaaatatattcaaacggctgtgactttaaaccatgtattagttgaataccacacaaaaccaaaaaggcattatctatcatttaataactgaaagatattacttatttgtgagataaaaggataatgcttttttaaaaccaataatgaaaaagaagtattttgaaaacaaacatctgtttgctagaaataaatatacttgcttagttattttaatgtattgcagcataggaatattgtgctagcattgaccattaacattcaatcagtagtttaaaatattttttccacattgagtcttgaatcctctacctggtcagctgacccacaactttcaaaagagttttattttcctgctttagctgttcattttcatcttctatgtcatctaggtctctatttaataaatcaatttcttctttgagttttccaatcatttcctctttatcttgcatcagtctcacaagtcttaggttttcttgtctttctcttactacttccttttcaagatcttcaattttcttttccagtgtgctacttgaaaccagagtacctgaaacatttgcatccctgttatatctagggaacccacttctatctgttcgagaatatctacttgagacatcttcttcagagacactggttgtgcttttatatctgcctgaaactgttctaggtggctcctgtagcagataggaactgcctggatctagtaagtttacagcttcattctgtatagtgttctgttgtgtaattgcatcttctcgtttccgctctttctgccctgcttcatcatcttcgtactcatctaagcactctgcggcagggatgttgaccacgccggtggagcgccgcttctcccgcagcttcctcttctcgatctgccccttgcctttcctggcactggggcccgagctcttgcccttctctgggacgccgtccggctcctcctcgtcacgctggggcggcggtgcagccgaggcagaggcggctgggggctcgtcctccgaccgccgcgggccgggggccgcccgcgtcagcatggcggagccgaccgcgcagttcacgcccccgggaccggggacggcaggtgcggccggcgcgccgcccgggaggttgttgttgagctcgttggcagcggcggccgc

SEQ ID NO: 131658 - DNA, 1038 bp, Homo Sapiens
  misc_feature (610)..(627): n is a, c, g, or t
  misc_feature (928)..(962): n is a, c, g, or t
tttcaccaaaacaatttttatttccagtgtttaattgggtatgcacacaggcatgacacaggtttggattcattaagtcctcatgcagaattatattcttctcgataaagaagccagttccatccaggatccactatctacacacctatgttacaacattatatcaaatctggtatctgaagaaaagatacacatttaatatgttcatttaagttacgtattttacagaaagattaaaaattcaagtcacacaaaactcaaaaactgtattaaaagtttgaatataaaactcagatccacctggaatgactaaagaatggaagttctgtatccacctgtgttaaaactggtaaatgtaatgatatctgttaccaataaaacgcattcgtttattcaatgtaagtaagttatctaattttaacaatatggcaccctaaaaaccaactgtatttttatgatgaggcacttttgttagtgatgaaaccaaaagaacaaatttgctgcacactgatgccagcgattttcttcagtgattttgggtatatgctatgtagtaagttgcaacaaataccttgctcatttgtatacaactatccgatatatttttaannnnnnnnnnnnnnnnnngttcttctggctgtagtaatgcactgtaaagctatttcacagtgcaaatgatgaaaccagcccaaatgaaggctgcataataacattctgatacaagaaaatattgacagagttactggaacgtgtaacagtagttttttttacttgctagagtggacatacccccagtttaaagacagggatgacactctgctttagtgcctggggtttcagacagtttatgaggttgggctagttctgcagaactagctcggcccgtaatggccgaattcccgggcatatgtccggtaccgtcgactgnnnnnnnnnnnnnnnnnnnnnnnnnnnnnnnnnnncgccgcttcctcgctcactgactctctgcgctcgtcgttcgcttctacgcgtagcgccctatatatatcaagtctt

SEQ ID NO: 131659 - DNA, 1648 bp, Homo Sapiens
  misc_feature (61)..(81): n is a, c, g, or t
  misc_feature (271)..(283): n is a, c, g, or t
  misc_feature (582)..(582): n is a, c, g, or t
cagctcaaatatcatttatttgtagcaagaacattcaatacattaactatagtcaccctannnnnnnnnnnnnnnnnnnnnaataaatggccaaagggattagtacttttacctttggaggtcctcaaagcattatttggagttcataatacttcagctagaacttattccttcaaatttaactctgtacccattaaaagtggttttgtgtgcaattaacagacacatgttctacccatacattgttttccaaaattattgtgtggctttnnnnnnnnnnnnncccacacaacaaattgcaaaaggcactgagataacatctgcttctagatcattgctaggctcgaaaaataaagcttgttctaccaggaatgacaagttagaacttagtatttgccaaagcagaaattatatagtgtcagttatttcaggcaaaccttattcggctctcatccccaactatctgtcagaacaattaaaagagatcaaaacagtccagcataactaggcttcattatataaggccattttgttctaagacactaataaaccaaaataagaaatattaaaatcaaaataaanagatattatttgagctattttcatacaaactgttggttccttatatcctcccttctataataaagggcatattttactgcaaagaaaattttactttatatatatcactagccataaatttttgaatgtcattaattacatgttgtctagtaccattaaccaaatagcgtaactattttatgtccacatttcacttctgtatttacaaacatatcagtaaagagttaacaatgagatgcgatcaaacatccatattatctgttttgtagacagcaatgtagatgattttgtaatcacctttcatcggagtgaccttatataaaaaataagtcaataatttagaggttctaagtctccaaaggagattttcaaatgtaaatatagaaatggttatagataatgagatttttaggaaacctctgccatgtctgcatcctgttaactgttatatcatcttttcttccagctgcgttcctttgcctgcaacaggggtcaagatgagttttgcctgacttctttgatgtcctgaactttccgtagtcctttttcttgaatttgttcattataaatatagcttggcatttgtttgatcttttcaactgtcttcactgcatcagtagttttattccatagttcttgcagatatttgacaggcttgttactatatttttcaaattcaaatccactgtaagctcattattagcagttgctttacagaatgctttagtccacctaaccttttgagaattgcacttcttttaaagtttttgtgacatttatgtttatacaatctgaacaccttgcaacagctgcagatgaacatcatgatgtggtcagggtagatgggtcccaaagaaactaacacttctcagtgctgagctcggatgggcctccactgaccaaacacggagcttgagaggaagtcaagaggtatcttggaattccacatgctgaccctgtcattcttgaaggaaaatgatgcataatttctgaataattcagaaagaacttaacaatctttccagttagtttttaaataacaattctgcttatcaaattaatgaat

SEQ ID NO: 131660 - DNA, 1156 bp, Homo Sapiens
  misc_feature (44)..(333): n is a, c, g, or t
ctgtctaagtatcatttttaataggtttgtaatatcatttgtgnnnnnnnnnnnnnnnnnnnnnnnnnnnnnnnnnnnnnnnnnnnnnnnnnnnnnnnnnnnnnnnnnnnnnnnnnnnnnnnnnnnnnnnnnnnnnnnnnnnnnnnnnnnnnnnnnnnnnnnnnnnnnnnnnnnnnnnnnnnnnnnnnnnnnnnnnnnnnnnnnnnnnnnnnnnnnnnnnnnnnnnnnnnnnnnnnnnnnnnnnnnnnnnnnnnnnnnnnnnnnnnnnnnnnnnnnnnnnnnnnnnnnnnnnnnnnnnnnnnnnnnnnnnnnnnnnnnnnnnnnnnnnnnnnnaaaacatcgttgtgccaagccagactattatttaagccatctggtacttttggaacatgtttgatggtttcacttcatttctgtgataaataatatcatggtaaattcaagtcttgttctacattttggattttttttgtttcagtaggttcttcctaagattagagttactgggtcaaaggtggtgaataagggtctcggtgtacgttgaccaagtgtcttccgtaaagactgtacgaacgtccagttccagtgtttgagagtgctggtctcactgactcttctccagcactgagggttttgtgtttctttatttgttttggttttaggtctttaccaatttgattggtttatcaacagggcatgaggttggtttaaatatatctttgaggaaaggttaagtcaaatttgacttcataggtcatcggcgtcctcactcctgtgcattttctgttggaagcacacagttaattaactcagtgtggcgttagcgatgctttttcatggagtcatttatccacttggtgaacttgcacacttgagtgtaaactcctgggtcattgggttggccgcaagggaaagttccccaggacaccagaccttgcagggtacctctgcacaccaacggtccccctgagtcaccctagagggaatagagccggagattaactttggcttcagatcaaagcccaactcattctcatacattcctcagttatcggtctttgtcttgcagattatggacttccaccatagccaatgagaagagactcattgtctctggggactaatgggagagctagtgctagggacacactaggtc

SEQ ID NO: 131661 - DNA, 995 bp, Homo Sapiens
  misc_feature (455)..(841): n is a, c, g, or t
  misc_feature (863)..(863): n is a, c, g, or t
  misc_feature (900)..(900): n is a, c, g, or t
tttttcttcaatgtttattattttcgtattttttcacttaatactacataaaatctaagatctcagctcttggaatacagaaaaatagtttcaaagtgtattttagcaaaacaatttataatgaaattagcatttgtgaattaagcatgtcaacattactgtgttgcttgttaggcacactgcttatttgtacagctttatcagtcagttccatcatttcaatattttggcccaccacaccactttgaaacatgtaatgaagggcaagttttataataaaaaaaacaacttggcattactcaacgggaagtcagtacatgttttttgcaaggagaataacataactgtttaatgatgctgtcttcaatatactacctaattctgtttatgcaacttctcaccaggtaattgttttttatggtcagttttgcttttctcctcgtgccgaattcttnnnnnnnnnnnnnnnnnnnnnnnnnnnnnnnnnnnnnnnnnnnnnnnnnnnnnnnnnnnnnnnnnnnnnnnnnnnnnnnnnnnnnnnnnnnnnnnnnnnnnnnnnnnnnnnnnnnnnnnnnnnnnnnnnnnnnnnnnnnnnnnnnnnnnnnnnnnnnnnnnnnnnnnnnnnnnnnnnnnnnnnnnnnnnnnnnnnnnnnnnnnnnnnnnnnnnnnnnnnnnnnnnnnnnnnnnnnnnnnnnnnnnnnnnnnnnnnnnnnnnnnnnnnnnnnnnnnnnnnnnnnnnnnnnnnnnnnnnnnnnnnnnnnnnnnnnnnnnnnnnnnnnnnnnnnnnnnnnnnnnnnnnnnnnnnnnnnnnnnnnnnnnnnnnnnnnnnnnnnnnnnnnnngacatgtgagcaagggcagcanaggggcagacgtaaaaggcgcgtgctgcgttttcaangctcgcccctgacagcacaaaatcacgtaatcaagtgcgaaccgaagatatagaacagggttccctggagtcctctggtctctgtcgactgcgtt

SEQ ID NO: 131662 - DNA, 607 bp, Homo Sapiens
tttaaagtctattttatttattgttttataaatttttagtttgtggaaaattgttagtaaatgtctttaagaactcattcagttaaacataagtaaagttttacttgaaaacttgctgttaattcaagtccttcatatttgtaacaatcactatacctgaaatcccaaatgcaagaaattgtttttcaaatagaaaaagtgtagctgacttcagcaacaagaattgcaatatactatataagtaaccaacggaaggaaattattgacaaatcaataattcaatttggcacttgacaaatggcagcatcaatgaattagcagtaagatgcttagcctgtgagttggtggtgtgctgaattgatgaatttgtttttttgaccttggatcttggatcacagtttccttaatgaacttcaacatggtttttggtgcaaacatttgtcaatgccattgcaagaaccaaataacttgagtcttatctactttagtgagattaaagtgaggaaaggcactgtttttggccagtccctagtttaatttttgtcagtactaactgggatataaaggtgtgtttctcgaggatataagagacagacttgcattctga

SEQ ID NO: 131663 - DNA, 1251 bp, Homo Sapiens
gatatataaggccacaatatttattttggacaaaccccttaaagtagcgattttattatcaatgttattcattcttttgaaatataaagtacttcagctgaattaaggttgcagataatttttaaaatacaacacacatcatgactagtatattaaaattatttatattcagatatttatatctaatatcaaatgaaaatttactaccaaatttttacagtagacattaatcagtctgacatgcttattgatcccataggtgtaattatagatcaacatgattttagtgtctattcttttattttactaaattaggaacgcagcatttacagaacaaataaacacaagtgacgtggccaccccaggatctaacagctcttcagtgagctatgttgcaagctcagaagtaatccactaacgaaccaagtcagactccagttcttcatcaaaaggtgctggtggaggttgtcagacgccttccaatatagatccccaatcccgatggccagcaaatgagagagcagcagagatggaaggaaaactttcagaaattctgcagagaatatgccccctttcttcatgacgctcgtgttcctcatgctgagggtggccgtgcgcttcgggtgtttaaagaggaactccttggggggaatattttccggccgacttgaccaatcccatatccaatctgagtttttcttcaagatgctttcaacttctttccttctttcaatatcatcttcctcagactgtgagctgtttttctctccaatgctatgggtatctgtttcagaagctctgttggtatcttgtggtgtctgcgagcgaggtgggctgtcacagtgagagctcttggagctactccgtccagactcatgctgtgcgtccagcagtattttttccatgtctccattataaatagaaaccgaggctggaacgctgcccccgttcccattattgctgaagtgcagttctacccaggagccctgcaggctctcctcctgcatcccgggcgctccgttctgcgacatggcgccagagggcaactgcggcgatcggagtccgcgccgggctgcgggatgtgcttcagctgcgggcggtgggaaagcggaggtcggagcgccgcggcccagctgcgctcccggactgagcggagccccgcagcccggccggaggaactcacagggcagggccggacgcgtgggcggacgcgtgggtcgacgatatcccgggaattccggaccggtccag

SEQ ID NO: 131664 - DNA, 957 bp, Homo Sapiens
  misc_feature (73)..(74): n is a, c, g, or t
  misc_feature (153)..(154): n is a, c, g, or t
  misc_feature (240)..(240): n is a, c, g, or t
  misc_feature (261)..(262): n is a, c, g, or t
ccccaggatctttaaccccgagccacgcacctagctggagacccaggtatgagaaggggcttcttgccagatnntgaagtttcctccatcttgtgctcttcattgctgcatcggatgggattatatggaggcgttgacacctccaccacactnntgatgagaatggagttgactgtcgtagtgggatactcttgagctgcaacatagctcactgaagagctgttagatcctggggtgccnacgtcacttgtgttattgtcnntgtaaatgctgcgttcctaatttagtaaaataaaagattagacactaaaatcatgttgatctataattacacctatgggatcaataagcatgtcagactgattaatgtctactgtgaaaatttggtagtaaattgtcatttgatattagatataaatatctgaatataaataattgttaatatactagtcatgatgtgtgttgtattttaaaaattatctgcaaccttaattcagctgaagtactttatatttcaaaagaatgaataacattgataataaaatcgctactttaaggggtttgtccaaaataaatattgtggccttatatatcacactattgtagaaagtattatttaatttaaatggatgcaggttgtctactaaagaaagattatatataactatgctaattgttcataatcaacagaaaccaagatagagctacaaactcagctgtacagttcgtacactaaactcttcttgcttttgcattataaggaattaagtctccgattattaggtgatcaccctggatgatcagttttctgctgaaggcacctactcagtatcttttcctctttatcactctgcattggtgaatttaatcctctcctttgtgttcaacttttgtgtgcttttaaaatcagctttattctaagcaaatctgtgtctacttttaaaaactggaaatggg

SEQ ID NO: 131665 - DNA, 787 bp, Homo Sapiens
  misc_feature (688)..(688): n is a, c, g, or t
cagatcccagtaagcaccacagatcttgcaattttactctgaaggcagagaagtgagagagtggatgaaggcagccaacgggacaggactttgctggagatgcaagcagagaatcagggaagtccagaggccccaggtccaaatcagctttgtactggggcagcatctgcccggcccgcagctcccatcgggtggacacacctagatcgcatctgcacactccagagaaggtggagctctttcctgtaaagcccacgacacactggatctgccgggccctcctcagccacacagccttccagtgtctttggggggttcgatccagccccttgcggtatacaatccaaccacttcggggtgtgtctgcgcctcgccctaaggccccacccacacccgcttcctagacctaagcgccatttgatggtggggcggggatcactcttccaggaccctccagactaatgtccatgctcttcagagacaacacttaagtcccgctggccaatcgtaaccaaaccacggccttagccacgccccatgcacagctcgcccagttgcggacgatctcggacggtaagacctgcactccagggccaccgggaggcgctgcggggccaccgggaggcgcactcgggggtcggcgaggcctggccctcgggcccaattccgccctcctgcccttcccctnagcccagtccagagcccggtccaatgtgcatcagcgaagcacatccagcgcttacgcgacgcggtctcccacacatggcaacgcgggactgagcccgca

SEQ ID NO: 131666 - DNA, 1210 bp, Homo Sapiens
acaatatatttgaaatgttttatttaatgctgaaaattttaccctaagggacagtaggatgtgtaaaaagaaaggaaaaggcacagtaattaagtcatccttagaaatgatgaggttttctttctttcaaataacttcactttaatgtaacttcaagcccaaacattctgggaggtaaacagtctcttggtacctacggggcccgagaggcaagtcaacctccttgaagaacggagcgctggagtctgagcacgccaaagactctctttaaagcagggtcttggaccagagaaccctgagcagctggaagacaaaagacttcctcaagtttcaggaggaaggtaccgtggacatccttgaaagaggaccccagagaaaaacttgtaggcagggctgggaagaagccatttctgagtctgattcaagacagtgacagagagcagctcgaggctcagggcaccacccgggctccctcgtgctccaccagaacccaccgccagccaactggtcagacggctcttgcctggctagtctgaggcctcagctggcgcgggcctggcgacactcttacagatgcctactagccaggcgggcatgctcatattttcagtggaaaggtacttgcaactgaagaaaatcctgaggaagctgacgccagaattcagaactcttagccttgaactttgtacaatgggttcttccaagtgaaatgcactcacgtcttaacagcagcaccgagcagccccggaaaatggactgagagggcctggcggtccacacgtgtcctacgtccctcccactaacgtgctttcccattcgtggggacgtggtcactatgggagcctgcccaagaggcacggctctacccaaagtgaaccagcaggctctggccgtattcaaatggggcgcagggtcagctttggggtttgggaactgcacgctgaaactgctgccgccggtgaaatggaaggtcatctggtcgctgtgttcaacagattcctcttcagttcccaacaaaacgccagcctgttgtcctctggcctgattttcctcatctgctacacagcggaggagtctgggcccaagctgcccccatgtaaagtgccgcgtgcccggggctgcgctggggtcagctgtgggcagcgtgggctcagaaaacgggagcctgcaggcagccccgcctgagaagagctgtgtcaccaggaaatag

SEQ ID NO: 131667 - DNA, 981 bp, Homo Sapiens
  misc_feature (803)..(803): n is a, c, g, or t
  misc_feature (868)..(868): n is a, c, g, or t
  misc_feature (894)..(894): n is a, c, g, or t
tttggctagaggatccatcactttattttcagaaaaagatggccaaagaggggaaaaaatacagaggcattcccacagcacagtgaaaacaattagccatccaaaaagctgaatcaaaaacaatgccaatcagctttcacgcccacacaggtgaggtttcactgtgcaacagcacataaatgataatctaaatcctagagagaaaagtagatagcaccttgtgcttttccttggcaggtggatggcacaggcttggagacttccatgtcatctccgcttttcctcctctaacacagggctggttggtttcacctgcaggcactactgacttcagggcttgctggagaggagatggttgtgctgcagttcacttggtgactataaacactttgatatgctcggcagtcccccaagtcttccaagcaggaaatcaggtcccccccgacttcccacatgggccaatctgcagcacagacaacataacagcacagctaatccgtgaagacggacagtgaatcaaggctgagttccaggccagtgacttgtgtaccaggggcaagatggaaatgccagataggaaatattaaatccattccattttagctcacaaggctcaaatgcgccttccaaaaacacctagaggaatttaggattccataagggatgtattttacaatttaagcctccaagaccacagacgagggactccaggtgatctatccacctcactgcagatcagggtgaaggatccttttgaacaaagtacagtctcctctcacttaaccctggacaatagaactctnaggctgtacgagatactttaaaggacagcagcggcaagcaagtcagactgagatatcaatgtcanagggagggaagtctcactctaaccanaagacagaaagaaagaagccagggaccagaatcggagaagctgtaattgcaaacaagtgctatcgcaaacagtaaagctactccaca

SEQ ID NO: 131668 - DNA, 652 bp, Homo Sapiens
  misc_feature (555)..(555): n is a, c, g, or t
  misc_feature (566)..(566): n is a, c, g, or t
atccatgcaaatggcatctttaattcaccatattgtaggtgttgcatcttgaatgccaatgacctctcttcccacagcatgtgtgataacatgagcttcagcaacaggtccgttctcaacatctgtcagcccagtgtccacatctgtttcgatagcatatatcacccagatagaactttgatgaatgagtgatagttttcacctaaactcaaaatacgttcagttgctttgttgtgcagcaagaaggaaggattcaggctgacagacatagagtggattctcttagattcaagcctctgggcctgtgatgtgctgtagaaaaatggtgtaacttctgagactcctattataatgcctccatgctacaggagacaacctcaggatgcatccaaatcattaacctgatgcaccttggaaagcttttgattccaatgacaatttttgaggctgtagtaggacacgttggactaaatcacaaagggaaagggaaactctaggatacagaaagtacattaatcaaaggaagtcattttaccccacataggaagtcaacanatgaaatttanaaaaattaaacacaaaggtgtgaggatccagaggaaaatgacagatacaaaagggaaagtccagggtctgactcaatcaggagctc

SEQ ID NO: 131669 - DNA, 368 bp, Homo Sapiens
gttataaacaaaccacaaacatcagaatggtaacagactgaactacatttagtaatagttacacatgtatatggttaatacatatggaaattcaatatattttgtagttaacgtattctgaagtaacggatgtttctcgccaatcgtagtgacttcagctaacgaaatgttcttttgtagtaccacggtcctcggcctaacgaaggacgtgaaccttgtaagaggagagctctgaaacgcggtcacctttgtttagtggaagggaaagtgtgttcccggcatgaggtgcctcggaattagtaaagaattgtgggcaatggattaaccactgtatttaagaatccccccattaaagcatttgcacagac

SEQ ID NO: 131670 - DNA, 704 bp, Homo Sapiens
acaaataaatggggttattagacccaagagcagggtcagaaggagaaacagcaaaaacggggagtaagtgcccaggctcctgccccaaaccccttgaggaaaagagaaacaggtgttgggcaggaagaacagcaccaacagggaggagagagaggggattgggtcccggctctaccacggaccagtcactttccccaggactcagttttgtcacctgtataatgggggaagcacaatccttgcctgactccttccaagagcctcaattaggcttcggtgagagagtgggtatggaagagctttgcaaactgtaaagtgcagtacacacatgcaggctagctgtggccctggggcccaggcccagctgggctctgcggagtgggtacagtaagtgttggcaatgaaaacactgcttgaggctgagcctggccctttgagcaccctcaggtcctccacatctgttcctcctctcaggtgcccacaacttccctggcaccttttaccctgggtggctgaggcctgggaagatgaggcgctcctggcctgggctggccccgcctcccactctgaaccctctggtcacctctgctcctgatgatgatgaacaaatgcagacctggtggtggggagcagccgtgccctgcaccctcttttccctagtcatcaccctttccatgaggtcttgtgcgagtccccccattcct

SEQ ID NO: 131671 - DNA, 1091 bp, Homo Sapiens
  misc_feature (43)..(77): n is a, c, g, or t
cgaacgacgagcgcagcgaagtattgagcgaggaagcggccgnnnnnnnnnnnnnnnnnnnnnnnnnnnnnnnnnnncagtcgacggtaccggacatatgcccgggaattcggccattacggccgggacagcacattaaaacatacctaatttcacagtattcctgtcacgacagaatgttagtattcatctctttgaatcattgctcaaataataacattccaccttttcctgctgtatcacaggaagtgatttgcattttttttcagttcatctgacttatgttcacagaaccgtatcagcgaccaagaaaataggactgtcagaagctgccagttattactgaaccattaaatacttatatactaagaataaataaaatatacccatgtgaaataataattggattatggataacaagagagtgaaagccaaagcactttctgtctactgtactcttctaaatggaattttaaaagtcatagctggctttacgtgttgtcattattagcattataaatatgcatgatagtataatccagtaatggttgaagaatgtattttacttaaagagggatttttgttttaaagtcctgaataagtctactggaagaattattcttctgggtgaaaaagcttttgtttgtgttcttattttaaataatcggagtcaatttattaaaatgttcttgaaagtactattcccagggattttaatgcacaaaccatattgtgacaagagatgagcctctgtactgtaaataagaaatgaagtagagaaatgttaaatattttatgagtttagaatatagtaaataaaaggtgatgtaaatgaatgctgcacaaacggtgttcatgatacttttagtagtactttaggaaaaactacacattctcagaagctcttgatgtctctaatgaagggggggaatgctgttaatgagaacagtcataaatttttagcatataattacaagaacagcctgtggatattatcacttaaatgattttgtggtgattcgtgccattgcttttttatttaaaagaaaattttgtaattaaatgcctttttctaaattatcttctcttgg

SEQ ID NO: 131672 - DNA, 785 bp, Homo Sapiens
aaagcactacatctgttttcactaattgttaatttctgtttgaacccttcatttaattttctcatagatttaagtaaacagatgtattttgcacagtgcacttatgtctattttaacaatcctcctgcatctgtattttatagtcagccttttgaccacctggtgccagctatataaggaataaagttgattcatatcaacattagaactccagtcccaaactaatctgtcaggttcactggtacataaatacctaggaaatatttttccagtctacaatttggtgctattgtgcagtaactaatagtactcttaccagaggagaaattatattaacgaccctgctaatatcctttcttagttatttgctccttgcaaattaaaaaagcaactaagagaaagaaaaacattgtagatatctatttatatttaaagtttatgtttcatgaactgcagctgcaggattctggcattttgcatgccattctccatcagatctgggatgatggctcagaacatgtacacagactaagagtaactgtgtgatctgttaaggggtggataacataatatgcagcttaggatgctattttgagatgtatgatattcagttcattcacctgattactttggttgcagcacaactgtatatattgtataaccgaaattgattattttcattgtccttaatgcagtgatttataattagagcatgtttaataagtttactcttcttgttaactagtcatttgactggaaaaaaataaaatacttttaaatggaaa

SEQ ID NO: 131673 - DNA, 1945 bp, Homo Sapiens
  misc_feature (242)..(242): n is a, c, g, or t
  misc_feature (1206)..(1249): n is a, c, g, or t
ttgctttgttgttcgatccttactggtgtaaccttgataaagcatactcataaacgcatgtaggcgaacgggatatctactcggccttaatgaccacgataggtcgtgagtcttcttatcagggccggacgggaaacgaggtggtggttatatataacttttcttatctacgtacattagaggtagatcctctaccgtatctttacgctagcattctccgagggcgggtctcgcacgaatgntgagtgcgcatgtgcgtaggtatattttgtgctcaggaggcgtgctgtaggtaatgtaatagagccttctcttgcttttacaagctcgtatatattttagacctcaagaacagctgtatgaagacgaaaatgatacttattatacgcaaatcagagcgacagagagttctactgcggccacttggtgatgatatttttatttttgtactagacaaataggacatagatattagagtttaagtaagtcatgaatcctgcgttcctggtagacaattgcaggagagagagaaacgatctattgaggacaggagtcctaagagtggtgactctggacttaaatagtgatggtgggcgagtggagagatagttgcgtgtgaagaacaccaccttcactccaaactcatattcgatgcctgtgcgtagtattgcgttgtatttcgtgtgtctacgatgagatctttttctttggtatttaacttccgcgtctgcacgaatatcggtaaagagaaggtgcagtaccatcaaacaaagcgctctaaatagactactgtgttgggacaagtgcccgcggtttcacagaggtggctgggcttgtggaggagaagcagttttattccgccggatggtttgcggtggttactgtatttatatcgattcgtgctgtggtgggcgcgcagatgtgttcgggcagggaatgggggtccgggcggggttttcgttctttacaaacgcgggggttatggtatactaaatgacgtgttgggggagtggtttgggtaaagatattccgggggtagggtgttacttgtgggtgctggcagctctctatgaaaaatgggggttcctcggtaaaagggatggatagttgcttatgtgtaaatgtggccgttaattcggtctagttcttgtgggcttagttgggagtttttcttgttaacgtcatgcgtggaagggtatttcttgnnnnnnnnnnnnnnnnnnnnnnnnnnnnnnnnnnnnnnnnnnnngttatattaaagtgatcttttattaaactatttactgcttagtctaaattcaggtagagcagtcaaagaaagttatccatcaactttgttgaattcatatctttcattttagaataacagcagactttaagcatgtattatttttccagtgttcagcttagtctaagactgtgtgagtctggtttgatccattgccgtgaagaatacacagacagcagctgtaatgagcaggtgcattccctcgtagagaagttttggagaaaatacactccatataaataaatgataacgcagagatgtcaccaaaacgatgtacgtgaaaactggaatagaacaaatcagtgcgtagcagaagcaagcatgactcagtgctgaaccactgcgtgtttctgagctcaggaagtgcactaagtggctggcccacagcacaggccctgcgtacgtcccaaacgctgtcaggagcacggctgggatttccacgtaggtgtctaagcccacgaagcctgcggagatgtccacggtggcaatgttgttggagttgccctgaaaatagaagaatgcttgaccaaaccaataatgcatcacgagtaatctcagcgtgcatcgtgtctcaggggcttcgagatgaaatttagtcattagagtctgaatcaagaggctaaatgctaagaccggaagattatgtggtctaaagag

SEQ ID NO: 131674 - DNA, 701 bp, Homo Sapiens
ttcaaggtaaggaaagcaaaaatctttatttttaaaaaattcacatttattaaaaacagcaatttctagccaaataatataaagcattttaaattatttgaaagtatatacactctttgtataagtgaacacttaaaactgtacagatttaaacaaataatcatttagcaaacaagttgggtcactattacctactcagcactttgtaaggtgtttgagtgtttcagaaataaaagatcaaaagacaagaaccaatgtcattaaatatttttataagaacacactccgctctgtaaatcaaattaaatcagtcacgtacttactgtacaataatcatgccctcatttctttggaaaggctattaaaaatcaaatgtacatataatacacaaaactggatattttacagtttatttcattaaacatgtatttaaaaaacagttaagtaaatacaatcttcctaattcattcatttcatggcaaagaatgaatatgggccctcttaccttctaccttctcaaaatagagagtaataagctcaatcaagcaacgtccatcaccaatttaaactgagtgaaaaggaagtgacctgttacaaatgacaacaatcagggtatgcaccctgcagaagtgctgcctcagtacgtctaatgagttacaggcacccactgcaccaaaaggtcccctggtcccattccagaa

SEQ ID NO: 131675 - DNA, 1169 bp, Homo Sapiens
  misc_feature (156)..(179): n is a, c, g, or t
  misc_feature (603)..(651): n is a, c, g, or t
cttgtggatgtctggtctgtgctttttctgtgacttggaagcattttccaagagctgtgtgtttgagccaaccctgttactgacatgatttctgaatttctgatgtaaattatgccagaaggtgtcatggcgactagtctgcctcttccttttggnnnnnnnnnnnnnnnnnnnnnnnncctttaagaattctgccagatatcataaagaatgagaggattactactgagcagtccctgtccaacctgtagtgtaagaagggataaaacatgcggaaggacaaaggacatgaaaggaattaaaacagtaagcagaaaggatggccccggacagcgcagtgtggaatagacagcagtactgactgccagtggaagagatccgtagggttggggtggtcctagaaggcttcatggatgagcaggtttaggtcttgccctcaaaaggacgaatgaggttcagcaaggtagagatgcagcaggcaggtatatattgtttttactacaacataaaaattagataaaaggtatatgggggaaacagattcagcaatgctgttttcttcttccttttaagtgtataacatttttaccctctttccagatnnnnnnnnnnnnnnnnnnnnnnnnnnnnnnnnnnnnnnnnnnnnnnnnntcctcgcagtcccagagtcagacccttggtctccaagcaatgcagccccagcagcccttggtaaggcctgttgttttggaatcagacatgtgggtttcttctttaaaagcaggttgcattgttcatgttcataagattgttaagaatcgacaaagcctaagtataccctaaaaatttttcctagaactttactagagttttattgtcattgtagttggtatatttattttcataggaagatacaagtaaatatttgggattcagtaggttataccattattcttcaaaatttttcggactgttccacagacaaaattttttacattgagacgtggtctttttttcctaaacaatgataaaacgatgatttactatgtatgtttaaaagattgtcttaccatactttgatttttactataatctcaaaaaccatgggcgcactttctaaaatattatctattatcttcaataagaaattgtttttcattcagttagcacttgctgcaagagttttcatg

SEQ ID NO: 131676 - DNA, 1071 bp, Homo Sapiens
ctttcttcaaatgcattctttttatttgagaaggatgatctcaaggcagtgccctttgggaaagatgtctttcatcatcatgtacatcaggatcaaccattactttcagcaaagtacaaaaatacacacgtcagtgacttccgtacaataaatacataatcatgcatcccacaataaaaggcaccgaaaactggtcacttagtagtcataaaaattactagctacattaacaaagccaccaaaattatctgtacaaggaaatgtaacaatatattccaaaggtgaaaacacataaaacatctttaaaatagtaggcaataaatatctcaattgtatatatttttaaaattatgccattgtaaacagcatgtaaacaaacaaaactcacgttgtcttaccattactaaaagtaattagagccaaagttataacctctgctctgtcaggtatatttcactggcaagtgtgctaagcagttaaaagtttcactcttttctgcagcaaacagagcccactgtgtaataaatagatagatattatctgcatctttcagacacaagtgcttagtttcaaaacagactaccaaaatgtagtaaattcctaactataaataatacggcaaggctaaatttaaaataccttttccaatgtaagggacaaaaggaactatactgttgtgttttcaacatgataataaacaagaggcacatgatttctggttatctttatcgaaagataaaatgaatgtgctgaatgtcagggtaaagtgtccaattttttgagcctcctccttttgtggaccttgtacaaagtcaaacaaagagtaaagctgtatcacactaagaattttcttttgctagagaacatagaaatggatgatacttaatattgatggaaaacaatgacttcaaaatatgcctatcaaactgtgaatacacatacaagtcgggtttttttccacacttactgacaataaagatacagttttttccttctcatgaaggaaccctattgcctaacccccggccgtaatggccgaattcccgggcatatgtccggtaccgtcgactg

SEQ ID NO: 131677 - DNA, 731 bp, Homo Sapiens
  misc_feature (21)..(21): n is a, c, g, or t
cttaaaaagcctattacttcnaagagcaaatgattctttgggggaaaggcaaaaataattctatgacatagggcccaagttcatggtagtaagtgtactctttgattaatcacacgctaatatagattactgcctctaactttgtaagtgtggcaatgacttcttaattaaagaaagatgcaggagttatgtctaagcgttcagtttttcaaatctgtgttattggaaatgtcttcaagtcattttgcattgtatttttgatatgagaggcagcttattgcgatgtgtatggccatgtttcattctcaaatttaattctataaatacaaatcctaaatacatggctacagcaactgcactggaacatttttgcttggttttagggattgagaacttgccttgcaggtttccttcctcaaaaggagcagggcagtcctttccctgttgagtcaattagaatttttacatagaggtgagactgtgaattattttggttattttcagtgatgtagattagtgtgaatgaccagggtggaatgtttttgaaggaatataaagcaaaaactggttgacattcacaaactgttcttttgtgaacatattttggacccttaaatatgactaaaatcacagcaatattgttacatacgggttatatgccaactctgtttgaaatatactctggaaaaacagctgaattgtcttggttattaaagtatggtatgtattca

SEQ ID NO: 131678 - DNA, 962 bp, Homo Sapiens
actcaaaaccttttgctttgccaaagccaattaagtcctagcaagtaccaccataaatcagggtccacatgggagaaaatcaagggccaggggatgcaggtggtgagaccctggggctgagccagctccgggctctgctgggattcccaggcttcttgggggcgggtgtggtaaagggaaggtccggggagggagaactaggcttctctgagggctgagccaagcccaatagggccaatcgttgggcaggtggagtggagaagtaggccttctgctcttctgagtagcgctcctggggtgtcacagcatcccggtaaggtccaatcacgccagtggaaattgaagccttcgagtagggcgatacggtcagctcttgtaggtacacagtcatgaggttttctgggtggcagatctggcacctctatccctggcagcagcactacccctcggatggcaaaccagcccccaaatcgggggtgtatgcacacacctgatatgcgctggttcccccatgggtcagcctccacatcttgtcgttggtagtagtaagcagccccagctacatgggctgctgtctgggccaggatcttgtggcgtcggttggggtgtacctcgtagtcagcaatgatttctatctgcagctctgggaggctctctcttacacggcccagatggtagggcacacactggtccactgggtcagtcagcattcggaggtggcagctctgcaagaagggcttgagggcccggtcaaacatggcaggcgtgctgagtaccaggaaggccagggtaggtcctggcagcggtaggtggaaggctggaggcaagagttcattgtaccatgccacctggaaggggtaaacctcgaagccaaaaggacatagcgtgtcctcgatcttctgcatcagcctctgcgactttccctcgtgccgaaatcgccacccagcctcgtacctagcgta

SEQ ID NO: 131679 - DNA, 770 bp, Homo Sapiens
tttcatggtgtagtttttattgctcttaaagacttggtgttgagaagcacaagctaagctgtgagatgggaaggaaaccagatgaggtgtgacccctgcgcctgggcctccgtctccactctaacctaggggctgcccagctccgccatggctcagtgcagaatttatacattatatattaatttcaaagggagggaacttctatgggaaacaataataattaaatcataaaagatctaaatttgcattttccaggtcacatatgtgcatggtcgtacccttcagcttttttccttaaagattttgcaggtgttagtgagtcagtgaatggcatggatctaaacacacatggagacggatgagcagcgtgcggcatgaggaaggtgcaggagaatctctggggtgctcagccaggggagcgcatgccctgcccacggcacagctgcccgagtgggcgggtggagggatgagatttcagatggagggaagcacatttccaaaacaacagtgtctgcaagcgtgtctcgcatggtgtcgttggtctcatctggtttcgttggtctgccccttcacccctgcgaggagccgtgctctgagcaggtgtgcacaggtggcgtcccgcacacgccctgagagcacggcccccacagacccggggcccggcagcgcctccatcatgcagaacgctgccgtcccctccaatctccccaggacacttaggcccgatgcctaattatgttctcggtttacttttctcctcgttccgaatt

SEQ ID NO: 131680 - DNA, 605 bp, Homo Sapiens
  misc_feature (541)..(541): n is a, c, g, or t
ttaacatgtgaaaagctttcatttgctgatgataaaatctaaaaaacttgctgtccttggtgtgataaggggtgtcatcccgagtgttcctaggctggttctctgggctgtggccccccagggggggcagctacgtcggggtgcccaccagtcccgcggggccctggcccagcgtctgtccgatcacagctgtttccaagggcttgaagcccacgttgtccagagggatcccgaaggccagcagctttgcctcatacgtgcgcagcaggtcgttatgggcctgtggagacagggcagtgtcagggagctgagggtccccacgctcaggaccaccagagctgagtgcagctccatggaggggcagcgtgagcatcacggtgcagaaggataaagccaaaggcttatcagtcatttcccgtgtgggacacagctccaagcaccttcactgcgttggctcaggtagcacgacagggagaggctgtcactattcctattccacaaatgacgagacagaggcagagggcagggacactcagggcanagctgtggtctgggagggctctgggccctggctgggtgtttcccactcaggttcttcacgccct

SEQ ID NO: 131681 - DNA, 663 bp, Homo Sapiens
aagtctacttacttattatttatttttaaaatatatttaaacagcagcagtcacttccaaaatgcaaaaaaaattacaatttttagaataaaattataatgtttataatgcgggtcagaagaattgaaggtacaacagaatcaaatcacgcagcactggaggcggctggagaagccaaagcccactggtcaggggtccaagctgacaagaagtcccaacctgagaggtctccacacccaaatcatacccctcagcttcccattgacagagccagtgtcctctgggttagagaaggagaagcggcaaggagctggccctctgtgtgggtgtcccaaacccagtcccccccatcagccagggacctgctaatccacctcctccatgttgctgtaggtgggggctggccgatccacagggggggcgaagcgttcaggggctgtccgcgtgggggccacctcgggggcctggccagggcctagtccctggctggcagcagcctcagctgcagggcctaggtctgggtggtgctcagagtgacctgccctgggggggcctctccacaggagaagttccggcggcggtagaagagtacataggcataacgcgtcacacccttgctctcgtctaccgttgtcactgtgctgtcatcaaacaagcgccagc

SEQ ID NO: 131682 - DNA, 1007 bp, Homo Sapiens
  misc_feature (756)..(756): n is a, c, g, or t
  misc_feature (787)..(787): n is a, c, g, or t
  misc_feature (804)..(805): n is a, c, g, or t
  misc_feature (811)..(811): n is a, c, g, or t
  misc_feature (856)..(856): n is a, c, g, or t
  misc_feature (873)..(873): n is a, c, g, or t
  misc_feature (897)..(897): n is a, c, g, or t
  misc_feature (979)..(979): n is a, c, g, or t
ctttaatgtaaagtgtatttatttaaaaaaaatacaaaataaactacaagtctgtctttgtttatggcctttccctattttcttttaccgaagtggggtgtgtcccttttttgcagctctagccaggccatagagaagacaccttccaggagaggcaaggagagcatgttctgcccacatagagcactccagggaggaaagtagcttatactcacagtgtctgcccctgccgtgtagctctctcatggggagggcctgtttttgtaagggtaatgtggagagagaggtcagggctttgttccctgtggacgcagctctctgttgtcatgttctggatccagcaggctgctcccaagtacagatttggtagaactggaaagggaggtattctgggaagttttggaggatggagttggcaaagctaaggagtgaaagcatttcggccgtctctgtagctggggcagcggccactaatgttttctgaaagggattgtgacagtggacttgagcatcctggcaggttaggggtagtggagcttgtctgcgtttgtagaaagatacttcagaggcccctaaaattggcctatggttaaactgtgtaaccaccaggcaaggtaccagggatttccaccttttcactcacccgccccaccctgttttccttcccacaataaatagaagaccatagtctctttcttcctttgattttgcccaaataacagctgctcagtttgttacataggtattatccagctnaagtgacttctctcccttttacagagagaangaggggacaattttggnntgtgangtaacaagaacacaagacggctaaactctccaggggcagagtaangcctgctgggctcagancactatagatttgctgtaacactngagtgggtctgtgtacacaagtattcttgggcctctggagagcaaagatcaatcagctctttgctcatgctcgcttaatggngtaacactaccagtggatagctgctgcg

SEQ ID NO: 131683 - DNA, 713 bp, Homo Sapiens
ttttttttaattcagtaaactttatttatatataacaacagtacaaattgtgtcctcagcttgcaaaataggagtgtttcatatttacaataggtacacaataatatattagaataacaaaaaaccccactttattggaacattttaaatacttaattttcttacagtttttattccacaacacctgtaaaaacaacaaaaccagacaaccatcattgtattttcttaaaaatatatataatacagattccagtgtgtcaagaggagtgggtttgagcaggaaaagttgtggggaaaggcaggtgggctccggcccctagtctcatgggatagagagcttgtcccttctgcccttacacacgcaagaatatctgttctgtttggggggagtatttccattctgcctgccaccttccatgccaagatgaaggccaaataagtcaaagtgaggactttgaaatgcagaagatgtttcccaccttccttgaggccagggtaggagggagcaggctgcactgcagcagaaagaagacagctcaggctgaagggagagcttctctgctgtgagaagaatgagatgtgggtgtccacgagaggctgaggaatctccagtttgcttattgggtggaggccctgtatgccaagcagtggctgtgatcgtgtctcaagactttccctagcactagttagaaaataccaagagtgaaacttta

SEQ ID NO: 131684 - DNA, 823 bp, Homo Sapiens
  misc_feature (714)..(731): n is a, c, g, or t
ttttttataattattcaaggttaataatattccagaaagcttttaaaaatatatcagagaaaatataagaacagctagatagaattatgttaaatcgaaggatatgatacataatattttaaaattatttttatgtttatttcacttgaacaaaagaaaaagcaactaataaaattgaaggaagagctgaactaccgaatatttttctttaactcaagaactttcagttacaggaagatttatctaatattaaaatgactaaattacaaaaagcataaaatgtttgaagccatttttaaagttgttttgaaatccatattagcactcagacttccccactccctaacttttgttaattgctgtaatggacatttgttgttttgatctacccaacatcctttcatcctactttggtaactgatattctttgggggaactgatctttccactttacatcatgttttgtggaaatttttcaactaaggaacctgccctatgctagctaagagttgagtacggtatgcaaactaaataagtgcaactctctcactgtaatttaacctccttaaatcaagtaaagaaaatgactgtggccaagtcacccctgctacctaggtccttgtaactgcccaggcacctctcccttctaaggcctatttggtcagcttgtcattttattctatcaggtcctccctaatgattccaataaattannnnnnnnnnnnnnnnnnaaaatgatccaaaccctggttttatggattgaaacagaagaatctatctgatataaaatttttactttgtgaagggttgtaacattcttttc

SEQ ID NO: 131685 - DNA, 1374 bp, Homo Sapiens
  misc_feature (216)..(226): n is a, c, g, or t
  misc_feature (468)..(483): n is a, c, g, or t
  misc_feature (514)..(532): n is a, c, g, or t
  misc_feature (575)..(637): n is a, c, g, or t
  misc_feature (722)..(733): n is a, c, g, or t
  misc_feature (743)..(746): n is a, c, g, or t
ggggacgaattatttctgactcgccgtgtctcttctcgcccgcggggacacttatatattgtcatgagggggactgatgcacggtgagatacccgcgcggagggcgcgtcgagacgcccgctttgcgtcctcttgatgggaggacgcctcttccgggggagacggtagtgttcccagtctttccccccccaccttcctggcactaagtgcttggcnnnnnnnnnnntgatatattatgagggtgggcgggccccggggcacgcgacgcttaagttggtgtgaccgcaaaataggtccgcagtacacccctctcccggtgattgttgtctggaacccaatgttctgccccgcccggggggtgttttattgtggggtcggggtccaccacccctgttgtgagggccggtgggcgtctttccttgagaaaacgtaaagtcggcgcccggtcgttaccctgtcctggggggnnnnnnnnnnnnnnnnacgaacagtgggttggagaaaaactatttannnnnnnnnnnnnnnnnnncggtccaaagggggttcagtcgacggtgtggtgggggtgagcnnnnnnnnnnnnnnnnnnnnnnnnnnnnnnnnnnnnnnnnnnnnnnnnnnnnnnnnnnnnnnncggtccttactcttgtggctcggttggcggggctgtcgtcctcgttgcttcttctgtcgcggcgttctgtctccgtctgttcgcnnnnnnnnnnnngttcttctcnnnngttttgctaccatttatttgctgtatggtatgtactcaaggcatgagtcagggcttctgtactaccctctgatcccaggagacagggcaggcaagaaggagagcccagggagaagctacctcatcatgggaaaattgtgggagctggaagaggtagggggagacccagccatcctgttctgacttctagcaatttcttctgccctcagtcatgaggggctccctatcctcccatcctatggtcccaggtgcagcaatgagagaggggaagggaagagagaaaggaagacaagttggtgccaggtgaaggcatctctgctctgcatagctatttggccctggccatgactacaagcaaaagtgggtgcagatggctgggccaagggctgtggtatggagtggatactcagtaggcatggttggcaatgtagagtgactgtgctgctgctccaccatcttctccactgccttcatacttgccctgggctgcaagcccattcacctcagcccgcttgatgaactcctcagtggcagccccagcattgtcccgttgccctcgccaggcattgagtgcagaggcttgcagggcacgcccatatgagaatgtatcgcccaggacgaggaagggg

SEQ ID NO: 131686 - DNA, 1035 bp, Homo Sapiens
  misc_feature (688)..(688): n is a, c, g, or t
  misc_feature (707)..(707): n is a, c, g, or t
  misc_feature (711)..(711): n is a, c, g, or t
  misc_feature (718)..(719): n is a, c, g, or t
  misc_feature (726)..(726): n is a, c, g, or t
  misc_feature (754)..(755): n is a, c, g, or t
  misc_feature (761)..(761): n is a, c, g, or t
  misc_feature (771)..(771): n is a, c, g, or t
  misc_feature (784)..(784): n is a, c, g, or t
  misc_feature (787)..(787): n is a, c, g, or t
  misc_feature (834)..(834): n is a, c, g, or t
  misc_feature (840)..(840): n is a, c, g, or t
  misc_feature (862)..(862): n is a, c, g, or t
  misc_feature (879)..(879): n is a, c, g, or t
  misc_feature (883)..(883): n is a, c, g, or t
  misc_feature (912)..(912): n is a, c, g, or t
  misc_feature (972)..(972): n is a, c, g, or t
  misc_feature (989)..(989): n is a, c, g, or t
  misc_feature (1012)..(1012): n is a, c, g, or t
ttttttagaagaaataaaaatttgtctttatttaaaatgtggcaattgggaagtacagtacatgcttccctgtggcttgggggtgtgtagttggggccctaattcttgagccagtcaagagacacttgggatttagccctcaattgcagcactgaggcactggtgccgagaaacaatcctgagggggtccccaacccacctagtcactccttagtttgcagaggcactatctgcagagtcctgtgaaaggctgcagtgaagtcttgcatgagactccccatccagcggagttctccaagctgcagggtagagcgttgtgccaggagggtgtttgggctcatgaaacagtggagaggcgcagaggctcactgggaaaccttggcctcaccgggcctggattgggcatcggcagtgggcatgaagtgggggtgggattctttaggccagggtccaggacacttgggggatcgtaatgctgggggttttcggggaggaaccaagggctcacggagcctcctgtgctgcagtggctgggccataggtgcacatggctcaccgagccactgctggggaagggccggggctcaggtttgggtcctgggctgcgtcctgtggtggggtagtgccaggctggccaggctgcagtgctcgaggcagacagtgactgatgaagaagggctgcaggaangcggcgcgcaggccttcangcangtagtanntggatgnagtacatgagccccaagcccctggcggnngtatancggcggcggngccgagctgccancancgcatctgtgatggcatctacactgggggtgaggtcggacatggcangcgtancgagtgcaagactgccatgcantgtcgatgtatcctggngtangctgcacactcttgaggagggtggcagcncaatgctgcgctttcccatgaccacgttctcactgatctgtcttgaggcaccagcgggtnattctacttgaccccangaaggatccaactgatgttcatnatacgcacgccttgtagtccaac

SEQ ID NO: 131687 - DNA, 597 bp, Homo Sapiens
ttttttaatgggagaagtgggggcctttattaaggtctggcagatgtggtggaggtggaagtacaaacccaggcctgggcctaggaaagggcagaagaaaggcaaagggtcccttggagcaggaacccatccctctctgcttatacccagcacccctcatcccaggttcctttcttcaacctccgcctgcctctgggaacacagagcaccaagaactgacaaaccgggaccctccagggccacagcgtggggcagagtccaggcttctgtctccccgcagtgggagatctggggagctcagtgaacctcctcaccctcctgccagtatgaagttgggaagcgccttctctgtcccccagaacagaacaaactcttgttctctgtggttggggaaaaggtgtggggggcttggacctaggaagaagctgagctgaattcctccagggcccaggtgaaacccccaggggagtttctgagactctagacttgccatttctccacttttccttcccaatgactccggtgagcagctcagagtctgggctagggcaactggtaggacagtggggatctgccccagagacatctgtgggtttc

SEQ ID NO: 131688 - DNA, 666 bp, Homo Sapiens
tttgaatgataagacttttaatttggtagacttaataggcaaagtccctatgagtaggcaaatctgcatgttgagttttattccaggttcagttttaggttcactgtctctctctttgatgaacactgcacaaagttatttgtattacagctccttaaagaaagagtacaaattgtttacgactagttttttcatatacacgaaaaagcacaattataatttctgtcccactcagaaattaatggcaaacccatagtaacctaataaagctattttaacatgtgctaaataattcttttatctatactgttgtattgatcaaattatttatatgctctttaaaaatcttttatgaattgaaagctataactctctctcttgaagtctgtctgcatcacataagtattgatcagtcttggatgattcattcatagccgactgtcttcgttgagtggtcttcacaaatctcagcagattgatgatggcggcaggtgttactccgggtatgcgactagcagccccgatcgtctgtggacgactaaaatgtagtttctctcgaacttcatgggacaaagacacatccctgatagtcaaataatctaggtcttttggcagttggagagcttcatcttgctgaactccctttatttcttgtagttgatggaa

SEQ ID NO: 131689 - DNA, 1035 bp, Homo Sapiens
tgccagggggctttttgaaaggaaaaaatggatgccaagcccgaaggggattttcaaggctttccccaatcccaaaaacctggaggcagaaggtaggaaatccctgaaactggtagaggcttgcagcttcaaattgctggggaactccccgaaaccagcaggggcttccagaagaggcagcagcaaatccagagtttgttttaaaactaaagttctgagcattatcactgctgctgttattgactggaaagcctggcgacataaatgttgctgcttgactgctgccaaatccaaatgcaggtgctgcttgatttactccatcctttacatcagagagcaaagctactttagttgatatatttagacttttcagttcatttaccctgttcctccattgatttattaaacgttggacagaatttagataactctgtaagttattgctggttaagaagttatggtattcaagcctcaattcctctggtgaaatgtctgtaaaacctgaaatattaggtttctttttcactggtgaataaacagaaaacatccactgccctgatgattcccaaacctccatatcttttacaattccttccagaagtttcttttcatctttctgctcatcaggactaagtgaagcaaatgggttctcagacaatccaaagccttccttcctgttagttgaagctccagaatcaaaagaactgaaatatggcttttcttgatctctgctgcccccccatggtgtggatttggagaaactggatggctggatgacattggaatatctctggctagttgtattccatccacgtctattattacctgaaggctgctgctgcggttgctgccgtcctcctcctgcacccctagcaccgggatgttcgttccagcaccgatctccaaagcggcaccggccttgaaggaagaattgacaaatggccattgcgacggcgtcgctgacggagggcgtcttcagtctgcaccgttcgatgcctgttactgggcagagagccctaaggcaacctcggcgcc

SEQ ID NO: 131690 - DNA, 1050 bp, Homo Sapiens
ttcccgcagttgcctgtcccgctgcggggggttccttgttccccgtgtttcctcgcccacttgtgatctgtcttgcgctgtcccgtccctcccccgccttgttctccgccccctgggctgcaatttccccagtatgaggatccccaattcgcttggccttcttatgttcgcctttcccccggtcatcgtccaggaccacacagagaggggccatgcccaccacatgctgcccaagcgccgccacttcttcaaggtttgttttctgttcagacgtctcacagatgaccagggccccattactttccccagcaccagcttgtgaagtgagggactctgcattgctccgtggacataagagccaacgtagaaccccagatggcaccttcacccatgcagctcgtttaagaatcatgttttctcccagttttccaattgccttaaagccaactgatccttgagtgagccttctctgtcaggcccagcctggaagtccagaaagctcagaggaattcaagaaacctttactgtatgcagagggttgatcctttagggtctgacaatgcatcatggttccaagggctacttgctggaccaacagttgaaattttaaatttctagaaacaaaatctgtctcacagtttacctctactaatacagttgtgtttccttcctgcaacagcccaatcaggccttctttggtcttcctcccttggagcttggcagctttgctccagccctccttctgggcctcccttgtggagccagatctctgcctgtttgaggtccccgccacaagtctccagagctttcttgcaatttacaaaggagtagcctgttttccgccgcagcttcatgaggagctccttgctggaggccgaggcagacagacggggcccagcataaaatgtgtgccttggctggggcgactgacgcagaagagacccagccgggtagctcccgttccgcgcgaccagaaacacgcgcagcgaccgcagcagcgacatctctccctcgtgccgagtacgcccccgcctcgtacctgcctagttt

SEQ ID NO: 131691 - DNA, 2454 bp, Homo Sapiens
  misc_feature (2439)..(2439): n is a, c, g, or t
aattacctctctgaacaggactttgtgtctgtgtttggcatcacaagagggcaatttgcagctctgcctggctggaaacagctccaaatgaagaaagaaaaggggcttttctagagcaagaaggcctatacctattgcaaggccacagaaaagagcagatagtgccaatatcaggaaataatttatccaccaatttctgcctgacattcagctacttaatttagatataatagagtctgcaaatcacggcatgttctccattttttctcatccttgcattccttgcttgttatatacctaaaatgttaaccatatagtttttgggttttgtggccctctagctaaagcctcagcagaaagcactaaaactgcataaatctggagaaatcaaaagaaagagaaccaaaaaacaatgcttaaaatgtttaataactttatgtttaatattataccaggacctacctttgttttcaattttaagatgattatttctaaaatctatttagcctgtaaatcattgaaatcatatatgcactccataggcaaaatccaaatacccagatctgtaatgtgtcaaagcatttttcacttttcaaataaagatacctataatgaacaaatggagttattttcagtattctgggtctgcttgttacggtaattttatgttatacttgaagaaatgtttcagtactggggaagtaaagaggcaatgttaagtgagctctctgggtaactggactactctaatttctgtttctggcacaagaatgtcaaaatctgccttacagctggccaggaaacctcagtacccacccacccacacatcatccaaaagagaaataggggcatgtgttattaatttcattaaatgaggccagaaccagtgtgtctaccactgcagagcaccttcaaagcatactacagacaatcacaaagaagagaacccacattttccagacaactctaggtttgaatcaataatcctaaagaaatccatgtggcacaagtaatataactagggaggttccgaggcagaagcacggttcacagtgtcgcaaagcaaaaacagaacaaaagagttctatgtcataaaaggtgtaagacagaacatataagttagaaatttcagaaataccataataaatctatgttgaagggagcagcagtattgttgatgcctgttctccacgacactatcacgtcaataaggcccacctgttgtttttgaaaggcacagaaaagctaaatccagtattacgcaaacaaggaaaaaattatttttattatacaactatttaataattttacccatgcattctcggtctgaagaggtttgggaaatattcctttttgtaatgatgtccagagctaaaagtaaatattcctcctgggccaaaagtctctggaacctattcagtttctgctgcctcttcaccttctccacattcaaaccgcacaaagtctactaccgacaccccctgaggctgcacatactgccccaaggtaatggagggatccagcaaatacggctgggacagcatcttagtctctgcctctcccccaggctcatcgtccagggagccaacagagaggggggccatgcccaccacatgctgcccaaggcggcggccaacgtcttcaaggtttgttttctgttcagacgtctcacagatgaccagggccccatacttccccagcaccagcttgtgaagtgagggactctgcattgctccgtggacataagagccaacgtagaacccagatggcaccttcacccatgcagctcgtttaagaatcatgttttctcccagttttccaattgctaaagccaactgatccttgagtgagccttctctgtcaggcccagctggaagtccagaaagctcagaggaattcaagaaacctttactgtatgcagagggttgatcctttagggtctgacaatgcatcatggttccaagggctacttgctggaccaacagttgaaattttaaatttctagaaacaaaatctgtctcacagtttacctctactaatacagttgtgtttccttcctgcaacagcccaatcaggccttctttggtcttcctcccttggagcttggcagctttgctccagccctccttctgggcctccttgtggagccagatctctgcctgtttgaggtccccgccacaagtctccagagctttcttgcaatttacaaaggagtagcctgttttccgccgcagcttcatgaggagctccttgctggaggccgaggcagacagacggggcccagcataaaatgtgtgccttggctggggcgactgacgcagaagagacccagccgggtagctcccggtccgcgcgaccagaaacacgcgcagcgaccgcagcagcgacatctctctagccgcgataaacaccctccggccctcgtggagaatcgccacncaggctcgctcttag

SEQ ID NO: 131692 - DNA, 710 bp, Homo Sapiens
  misc_feature (590)..(590): n is a, c, g, or t
ttttttggtgtattacaattactttattcagatctattacacaaagagatggtattaagcaacactggcttgagtgatatcttgcaacacagaacaggttcacgatgtcggaaaaccaagaatgctcagggcctcagaaagctgagctctaaagaccctgcacagtcatgctgtcccaataggtttcatgttgtcatgaatgatgtcaaagaaaaaaatttttcaatgctacctattaaagcacagtaagactttatttaggaccatcatgacaggtacggggaccacagcaatggggacttgtagtaggggaagagagactggactcagctctgaatacaccatggaaaactggggatttatagacagggaacagggtcaggggcagtggatgggaagattaccaagaggaaatatcagggagcattcatctaaaccgacctaacaggattctagctgaaggtaggccagttgaccagacatcacctgggggatggtggaggctgaggagcctgatcagatactgaggttgaacagatatgggggggttaggtgttcttgctaaactgacctaatagacttcttgccanaactagattttacaaggaagtgcccagattgggcctgggagaaggttgaggagcttggctaaagtttggccaagtggagaatctttgtccatgaagcctcagatggatgtgaggtccgta

SEQ ID NO: 131693 - DNA, 658 bp, Homo Sapiens
aaatttctaatttataatttttattttgtttttcgtcatccaatatataatcgtgactgtctccagtatataatttcttagagcatcattctttgaggtcttttaacttgactcacattttaaaaatacatttctcatcaaccctcagtacacactgatacccacatacataactgaaaagtatcacaaagtagtacttattcttttaatgtgctctgattgtttcccattctgttgcattctgttgtatttcattttttaaaactggcaagacccgccagtaggattgacaagaccaatcctcagttttcaagcttctcccaggtttggattgctatgggtttgacattattcttcctggtgtctgtggtaaggccccctcttctgtgctgcatggaaaatagaaatacctgccctagcagctaggggagctgggggcagcactggcgttttcttgtgaaactgacatggagtgagcctgaattgagagccgcccacctctactgcagctgacacagagaaacaccaagccccggatgctcatcgtcattagtttgtgtgagtgtttctatatttcaaagactctataatatccaaataactatcgcaactaatctttaatcatggtcatgtctcagatgtcttaatggtccctgag

SEQ ID NO: 131694 - DNA, 642 bp, Homo Sapiens
acgttttgatgtcaatttattatttatccctttgccagtattcaaacagacaggcagtcataaaacattaaaaaagatcctttaaaacggtcaggcatctgttttacctcagttcctttttagaaacctggaaatcaggagccccggcttttatgctatagcaagtttgacacttgctgtatcaaaaatattgcttgaggatcactacgtagaaagagttttgtttaaattttatgaaaggctggttaggcaggcagacaatggtttctaaggcaagatccagtgtaaatcagcaatgtgctgtttccaactgtttgactcctcagttcatattctgaaaccagggcgttgacaaaacccactgttcagtaattagcatcctgtcaaatctttccaatcaagactagcatgctgcacctggtcctagttaaaaaacacattgtgggcaattctgatctgaccctcaggggccgctgccatgctcagaactgcattcagcgtgcatgccataattaccatccacacaaaataagtagacctcctttgtcccagcagctctgagagattctgcctaatcctaatgacctgccacaccattttaacttctttgataaatgtctatccttgtgatttagacctttc

SEQ ID NO: 131695 - DNA, 1075 bp, Homo Sapiens
  misc_feature (42)..(61): n is a, c, g, or t
  misc_feature (766)..(766): n is a, c, g, or t
  misc_feature (878)..(878): n is a, c, g, or t
  misc_feature (884)..(884): n is a, c, g, or t
  misc_feature (890)..(890): n is a, c, g, or t
  misc_feature (896)..(896): n is a, c, g, or t
  misc_feature (899)..(899): n is a, c, g, or t
  misc_feature (930)..(931): n is a, c, g, or t
  misc_feature (934)..(947): n is a, c, g, or t
  misc_feature (971)..(971): n is a, c, g, or t
  misc_feature (983)..(984): n is a, c, g, or t
  misc_feature (988)..(988): n is a, c, g, or t
taacctcactaaagggaataagcttgcggccgcctgctaggnnnnnnnnnnnnnnnnnnnncaggttttcttgtgtttaatttgaaacgtccagtaacattaaagaacagcatttgatttgcttaaacaaagtagtaacagctgaagttccttccaaatcacttttctgattctctaagaggcttgcctatgccttgcagatctagcttcacctacaagacatattctgtaaggatccaggttcagcaaggtgtcagaatgtcctaagggtttctgtcccggcgctctgcctgtcccgcttgtgcacaatgcttttgcctatccctgtttctgcatagattttagtcttcccaccagggacgcaactgtcagtttcctccgtctctctcggttctattccaatctgctcatctcccctcccgtccccgctttccccaaggacctactgagatttcgatcccacaacttagtgggtcccatctcacccaggccccgcaatcctcgccttctacttgtcagcgttgtactacactctgagcaggcacccctgtgctactcacggaagcgggaccattaggtcggccattcctcctcaccccacgacacgcacccactgggtcgggccgcctccttgcagggagtctcaaggatgggctggcgtcagggaggggcccagggggcgctttcccaacactggtcgcagtcattgttggtataacggctagagacgcccagtgagttagcatggagggcagtggggacgganaaagacgtgggaaagctgcgaaaacgagccttcgaatcatggacgcgcggggccagctcctcctccgagttcctcatccgggggcgtcactcacatccgggggcctcactcnacatcnggaccntcatcnggngctctcaccccacatcgggacctcatgctgnngcnnnnnnnnnnnnnnctcattcgggacctgcatcggtcncgggagtgcacnnaaancgccgctcggggtgtcaaacggccgggaaagtgttggtgccccacgccatgggatgttaaggaaaggcaagccgcctccctcgggag

SEQ ID NO: 131696 - DNA, 745 bp, Homo Sapiens
  misc_feature (554)..(609): n is a, c, g, or t
tttctttgcatgtacagtcatgcagacatactttaaaaaactgtgagtatacagttttatgtatcctgtttttagcctccgttgagcaatttctctcatcattaaataggcttttaatgatgtgatttcaaggttctgccaggccggtggacagctgtgccctgaatttatctgaccagtcctccccatgtcagcccttcgtgttatttccagttttctgacattagaaatgatgccatgatgcaaccacttaagctgcagctgttgttcccattgctggtagatccttcaggaaagattcctagaagtggaatgaccttggaccaaagcaggacagggtttgaaggattttcaccacagagagccaagatcccttcggaaggacgggatcaatgacttaacgaggaagatttctaccatgagacacagagcaaaactataaatgctgacatcaaaacagagccaacgattggacacaggaaataaagaaataaaaatagttgctggatttgatgatggcattctaggtgacattttaagaagaatttgttgannnnnnnnnnnnnnnnnnnnnnnnnnnnnnnnnnnnnnnnnnnnnnnnnnnnnnnnttacaggtgtgagctaccatgctcagctataaaaagcatttcttaacttgagggcttcacagaaacaggctgtgggctagatttgggcacaggctacagtgtgctgactcctgtgaggctactcaccttggctgga

SEQ ID NO: 131697 - DNA, 686 bp, Homo Sapiens
aacttttctctgaaaaaaaggtttattgcatatggaaatcaatagatatcttttacaaaaaaaggttagaataaagatctcacatttgtaaaggcacatatgaaacattttatagcaagcacaagggcagtgagaacatcaacaaggtccaatatctaaataagactttataaaaacagataggaaacagtgcaaaaaatactgtcaaagtcagttctatacacctcataactgtgtatacaactggcaagcataagcttatttactgatataaaatagcacatagaatagcatgcatagttttattttaggcttttcatattattaaattgatagggagtctataccaaagtacagttgacatgaatagtgataaaaatcactccccagcttagggaatgtcctataaacatctcacccctccctctgcttacaactacagtttggtagtaaggagactgggcttccatcttgcaaggtggcaagcggccaccacagggggcgaatgtgctctcaggatcccaagtcccaacctggaatgcatttcttacggcaacaacataagagatggtgattaaatgtctgggtcagcccacaaaagccaaccagatctggctatcacagccctccatttgggctgtggtggaggtcagtgggcttctatgggctgacgcaagaaccttaag

SEQ ID NO: 131698 - DNA, 719 bp, Homo Sapiens
tttttcaaggtggagcagaggagctttattagagggacagggtgaaacatatttacaccggccgagcagggaccttaagaagcaggcgtgggagcagggtcccagctcagacgagttccaccttggcattggggtacaccgccaccacgtcgtagccctcgggcggcttcacgcgcgccttggcgtggctctcacagtagagccgctcgtccagaaagaagtaaccacgctgcttgaggttcaggccgcagtcactgcacatgaagcactcgggatggtagagcttgtcccgtgccttgacgatggtgcccacgatgccgtggccgcagcgcgtgcactcgggcagcccctgcaggccgctcagcggagcgcccagcttgctggccgtgggcttgaggttccggggccgccaggcccgggccaatccccgccctcgccggcctctagcatgccctgcaagtagcggaaggagcctgactgcttgggctccgcggccacgggctcggctggctcccgcagcatcctgtacacctcggagcccaggtcgactctgcagtctcggctccgcgggaggcctctggctgggtcagcgctgggggggtggagacacatgcagggtgctcatctgggctggcagggtggcctcgctgctgccattgtgagggactggaaagcgagggggttgtccatatggagatcccaggcttggtctgccatct

SEQ ID NO: 131699 - DNA, 1321 bp, Homo Sapiens
aaactcaacaagatttgatggctgatgacccagggaactgagcccaaggaagtagccagaaatgacttctcagtgtgaagggtaagcttggctgaccatgagcaagtaaagccacagggtgtcctgggcagtgatgggaataaacccttttcaaactgagcttgcacaaagcccagagacactgacctgattttctgtgtcagtctttatttggcaaacaaatttccttcccgataaggcagccgcgtgagaggagcgactgaatgcccagcacccaacctccaaaagcacctccagccagaagacaaagatcctagaggcccacctcctcttccgctgctttagtcttgcgcatggagggctgaccgcaggtctgcaaagctcgaaggtgttcctgagtcctcagagcagcagcaggagctggaacaggaggcagtgagcctcctagccccgggtcatgggctggagggagcatgacaggaaggagggaccctgcagaccaaggctccaaggggctggattctggctcccctggggcaggcaggggctctgggcttgggcccagcttggagtcacaggcttgctccatcccctagtgagtggctgtcatcgcccctcaaaatgggctgtgatttgttccagagtctttcctttagtttcagggacacagaacaaagtgaaaaggacactgaagatgcagaaagcggaggcaagccagaaggctccatagggcctgaggacctccatgaggctgctgaactccttggtcacgagaaaggccatgagccagttggtgaggacgcagatgcctgtcgccacgcccttgacatgcagagggaagatctctgacatgaggagccaggggatgggcccccagcccaccgcaaagccggcgatgaagaggcacatgctgcccacggccagccaggccagccccacgctggcatcaacaggctgtgcagagacaggcgccgagatggccacgtgcgaggagttgccagggccaccctgggtcagcttgaagtaggcgccgaaggcactcgtgctgaacaccatgaccacacctgacaagaccaggagcagcctccgccctgctctgtccatgatgagagccgccacagctgtgaacagcacctggatgacacccacgacgaaccgaggccaggctgctgtccttgaacttggcctcttcaaagatggtctctgcatagaacatgacggcgttgacccccgacagctgctggaaggccatcagggagacgccgatgatgaagggcttgtagatgccgggctgccgcagcagggccaggtgcctcgtgcc

SEQ ID NO: 131700 - DNA, 488 bp, Homo Sapiens
  misc_feature (407)..(437): n is a, c, g, or t
agaacagaacatgcagcctccaccacgtccccagaaacagccgcagacttgagctcactacatcaagaacaccacaccgcgctccaaggaacagctacaagcacagagacagaggcatacagagacaaagagagaaagagacgcaacatggcagcagacactgctttttttattaaacattaaaaaaaaggtcaaaatccaagcaaacttgaacccgagaatgtacacagaagtaggaaacacagagaacagagctgtcccagccagccagcgagcgatgctcttttcggagaacgtttcatagacggaagtagattccatgggcctccaagacaataggatcctctctccattcctcgccatatgggttttgttttttaagtcatttggtttggggagggccttgnnnnnnnnnnnnnnnnnnnnnnnnnnnnnnnctgcagtcaccggctgccaacataatctgcaccaactggagatcagaaacc

SEQ ID NO: 131701 - DNA, 501 bp, Homo Sapiens
  misc_feature (350)..(358): n is a, c, g, or t
ttttgctttcttataactttggaggaaagtcaaatcttggtattattaaaattgttttaaaaaggagtaaattttccagttgataaatgaaaatcactggcctatgtttaataagtttttctttaattactgtggaataacgtgccagctatcatcaacacaatgattttgtacatagggtagggaagcagtgatgctctcaatgggaagatgtgcaacacaaattaaggggaactccatgtattttacctacttcagcaatggaactgcaacttggggctttgtgaataaaatttagctgccttgtatagtcgtttgaaagaatatgtgatctgtgagagaattatagnnnnnnnnnagaagaaaaatctgcaaaagatctttccaaagacaatgtgccacagatcttttgttctctgtaatgaggattaattgctgtttaaacaaaaatgtaattgttcatctttaaattctttccttttcataagaggatcaagctgt

SEQ ID NO: 131702 - DNA, 843 bp, Homo Sapiens
  misc_feature (84)..(101): n is a, c, g, or t
ggttttaacgacggcctcgtgccacagctaaaattacaccctcctgtcgagggtcgctacagcttgcggccgcggctgtaggcnnnnnnnnnnnnnnnnnnggtggtgaaggagtggatttattggagcacaaggcagtgaagcagcaaaagtgaaagtacattccacagggtgggagtgggctagagcaagtggctcaagagccctggtagcaaaatcttctggggcttaagtaccctgtagaggtttcttgatggttacaccctatgtaaatgaaagactgactcacagccaattagagactgaggtgaattggctcacagccaatccaagactggtgtggtttgactccttatgcaaatgaatgtcctggaatgaaccaatcattggccagagtgcaggtctggcccatggccaatcagaggctgatgtggtttgataccttatgcaaatgaaggtcctggaatggaccaatcacaggccagtgttcagactcttcagtgccagggagtgtgtccaagtcatccttagatccctatctctgtaccctattctcctgcctcagtcttgtgtgagattttgcaccctttgaccatcatcatcatctccccattcccccaatctctccctcaactacttctaaccactattcattaatctcttgtattatttaggtgtaaggaagaacagaaggatccaagtgtgagaaagcccaccctgagtctctcagaggtgattatgactgtgtgagcatgggtgagacaaatcctctgttgttgttgatggctacttgaagtgcttcctccattctttccattgtagaatacttagggagggagagaa

SEQ ID NO: 131703 - DNA, 912 bp, Homo Sapiens
ttttttgttgctccacagatatttattgaatgaatacgaaggataaacacacgctaagtttgaaatgagaaatcctaagtttcaatagcaatcattgtcttcaatgttcactcattttgtagcttaattttcacagccattacaaaatacattaagtaaaaaggcaaacaatgagaaccccagatgtgaaagggggctctggggagcagaagtgtcatttcccagttctgcttgtgagccacccgtgcttgctacacaggctgagtttcagaccctgctttctaatgagcacaacaaaaagctccaatgtcacaatctactatgcagtttcaaagtcttcgacaattataattgttacgtggtctaattcctgaacgtatttaccccagttttataatgaatcagaatgagaaaagtaaacattggctataatcaactcatacctgtttaaggccttgagagggagatgggagaaaactttcaccaaatccacgacggttgctgtcttcattttattcagataattttgttccccccaaaacctggtcaacgctgggaaattggctgtctgtaaccaatcagactgattgccagccgagtcttcgttgcaacgttgtaacttcaccttagcctctgattggttgctttttgcaaccaatcagatgtttgcacaggagcgtgacctttgttactccacttcagtctctgattggttgcttccctgcaaccaatcagaccgattgtggtccactacttcatttccatgaggtgagcatgaagtggccaaggggaaacctccaaggggtatttggactgagaagactgtatctgggcccttgagtcacttgctcaggcccgttcccacactgtggagtgtactttggttttcaataaatccctgctttcattaaa

SEQ ID NO: 131704 - DNA, 994 bp, Homo Sapiens
  misc_feature (565)..(565): n is a, c, g, or t
  misc_feature (621)..(621): n is a, c, g, or t
  misc_feature (678)..(678): n is a, c, g, or t
  misc_feature (688)..(688): n is a, c, g, or t
  misc_feature (759)..(759): n is a, c, g, or t
  misc_feature (773)..(773): n is a, c, g, or t
  misc_feature (802)..(802): n is a, c, g, or t
  misc_feature (850)..(850): n is a, c, g, or t
  misc_feature (871)..(871): n is a, c, g, or t
  misc_feature (900)..(900): n is a, c, g, or t
  misc_feature (905)..(905): n is a, c, g, or t
  misc_feature (928)..(928): n is a, c, g, or t
  misc_feature (946)..(946): n is a, c, g, or t
  misc_feature (953)..(953): n is a, c, g, or t
  misc_feature (961)..(962): n is a, c, g, or t
gacgtagaacagaattcacacagacctttgttattccaagctcctatttatgaatggtgattaatagcaataattctgtctctcttctctctgtgaaatgctaacacttgctaaaggcactcagattctgggcttaacggagacaaggtcacatgggaccataagccagtacgttttttggtagctacccagaaaggaagtttacaaatgttcctcccattcataacgggaagaaaaagtcaaacagctatcagtagaagcgttttatgagaagctatttacacagctatttgtccattcagccagagtgacagtaactgctcacaatggtaggggttctcccctgccaagaaagcaaaaacaataacaaaacactttttatcatatatgaaactcctgtacaatgatttggctagaagaaaaaaatagttggtaaggtcaaatttgttttaaaacatctgttcaaaagcctgcattaaacttttatctgtcctgacaaaacatgtctcaatttctttctaaagcagctctattgtcctagcatatgcctcaccaagtcctttanagggcatttccaaccttagttctgacaatgaagacacaaagtaggttaggttccanaaccacccttcctagccctccctgtagaaaatccatgttgcacagttacatgtgtcncctgacacanacgacactcattttacgtaggtcactggacctcaaactgttgttgcttgctgtcccagcaattcaagagtngaggaaagatgtancagacatacatatctccctttctccctgnttcaactgtagataggtagctataagcaagcatatagttctgtagaanagctttctaaaatgaggtggnagatctcgtgcttcttggtagctttttangtcangggaaatgtaggatgatgtcaantagcacgatcctcttttnaactcanggcttcannatccctactgggttctccctcgtgcgattctg

SEQ ID NO: 131705 - DNA, 726 bp, Homo Sapiens
ttttttagttatccaaggtttttatttttctatatttaccaagtttgctagctcctctgggccattgcctaggcagaggcacatggctgggccccctggctgggcctgtacccctcatgggggtctgcttagggccttagcacttgggtgtggctccgatcctggcccactgactgtcctcttggcccgtttccttacacatcccaccagatccccaggctgaggaggtgggtcagtggcccacccgctgttctcaccccacagctctgtcctgtccccgtatgagaggcagcttaacctggatgccagcgtgcagcacttggaggatggagatggcaagagaaagaggagcagctccagccctcggtaactcccacatcacggtggccccccagggagtgctggtgtctgggaccttggaaaatgcacaggctttctaagaaccagcagctcccatgcaggctcagggagacactaggggacctgccttcagctcccatgggacgtgtgcaccttagcaaccaggggcagatgtgctgcttttcccccacgtccctcaggtccattaataagaaggccaaggccctggacaactctctgcaacccaagagtctggcagcctccagcccacctccctgcagccagcccagccaatgcccagaggagaaaccccaggagtcaagcccatgaagggcccaggggccctttcagctctggggtcctggg

SEQ ID NO: 131706 - DNA, 1560 bp, Homo Sapiens
tttgaaaagaaatctatttttaatggctttggctttatagcacgaagcaggcaccctctcgttaaaggcacacagtcctctcttctgccccacctcctgggtccttaaaatcgagtcctgagttccagaggggtcactgcaaggcagcagggaagggagagggtcacagtttcactctgtgagtatcagacacccagggccaaggcccagactggcctctgaagctacaggttagagtctgggtacaggaggcagccgagatggtccctgagaacagacagtcccggtcccccggagcaagctccatcctctgcagagctgtgaggtcagtgccccacatcctggggcaacgtgaagtccctgaagctgtagaaggagatgtcaccatgatccaccagggcaaagatcagagggacatccccactctggtaagacaaccgcttgaggctgcagaggtctgggacaggctcatcaaatccactaatgcacatccgggcatagggtttgccagggttattctttcggaatgtggccacagcgtcggcctggtaaacatcaaagatgatttccaagcccccagacttctccaacagccggacacctccatcaggaaggtgtgttgtctgcagcacagagatatgctgaaggaccacggctggggagctggcctggccaggactcagcagcggggtgacgggcttgccccacaggtgaggggcccggcgctggctcctctgcacctgccgccgctgcagcagctccttgtactcccgccagctggagcagcgctgcacctcgggatcggcgttgacatcttcctggaactgcgcggcctccgcgtggtgctcccgttcccgcctggagaggttctccttgcgctggttcagctttctggcaccaggactcagcgtctgtctcccgcccagccacgttggccgggagcagctctggggctggggcgcgcagaagggtgtggcggctgtctgaagccatgttggggaaggagatctgctcgaagttccagcgccgcttaccggctcccgtgactccgttctcggctctgccactctcccagctgcaccccaccccctccctggccgggccagggctggggcccagggaccccagaagctgaaaggggccccctgggcccttcatggggcttgactcctggggtttctcctctgggcattggctgggctggctgcagggaggtgggctggaggctgccagactcttgggttgcagggagttgtccagggccttggccttcttattaatggaccgagggctggagctgctcctctttctcttgccatctccatcctccaagtgctgcacgctggcatccaggttaagctgcctctcatacggggacaggacagagcttggttggaatcgtcgaaccacataacccaacctcttcaggtggctgaagacctggtactgcaggaaggtcacagtgtggtcggtcagcagcagctggtaagcttcctggatagacagtggcaggtctgggcctcgtgccgaattcagccacccggcctcgtacctagccga

SEQ ID NO: 131707 - DNA, 775 bp, Homo Sapiens
  misc_feature (67)..(67): n is a, c, g, or t
gcccctggcccttcatgggctgactcctgggtttctcctctggcattgctggctggctgcaggagtngggctggaggctgcccagactcttggggtttgccaggcgaagttgtcccagggccttggccttcttattaatggaccgagggctggagctgctcctctttctcttgccatctccatcctccaagtgctgcacgctggcatccaggttaagctgcctctcatacggggacaggacagagcttggttggaatcgtcgaaccacataacccaacctcttcaggtggctgaagacctggtactgcaggaaggtcacagtgtggtcggtcagcagcagctggtaagcttcctggatagacagtggcaggtcttggtggaagaggtggatggagccacactccagaagatacaaggcctcttccgggtgaaggcgctgccgggccctgctctgagaagcccatggtctgccagaatttgcccgcgggagacttcaactccacgaagccctcttctggcctccactcggcagccaccaagctgcccaggcgctccacgcgctgctctgccagcagctgccagagctcttcccggcaccggcgcagccgctcggcctgagctgccgagccgtcgggcagaaagtccttggggccatgcgagcgctggggcagcttctgcgaccgcgagcgggcggcgaagagctcccgggcgctgagcacgcgccccgcgggaacctccaccggccgcggcattcggatcggctcccctcgtgcca

SEQ ID NO: 131708 - DNA, 761 bp, Homo Sapiens
  misc_feature (562)..(575): n is a, c, g, or t
agatatagttttaaactttatttatacataaaaaattacactttaggaattctgttcctaaaagcattctcttagtaaagctcaaaatgaaaaggttgaaaggggcagtgaacagctttttaactgtgtacatactgcagtcacaagcaattttttaagctgcaaaaatcatctcttctaagtagcatgagcttttgaaactgcagacttaaatctcatgatggcatcaaaagccaaagcgaaataaatcaatattctgaaatagaagacttggctgtcgatgttaattgggtgctatctccaaccactttccatcatgttacttcttcctcttaggtgtaactcaagaaataacttttttctaataatacctatcactgcatggaaaaaatgaaaagagaagtgataagggcctcctattagtagtttaatattaacattatctaccctcaataagaaacaaaaaatgtcataatgttttaggataaaattacttatacaataaccattgatctattctgaagcatgtaagccttggtaccatgcaaatctcaacctcacnnnnnnnnnnnnnnggagatggagtctcgctctgtcgcccaggctggagtgcagactccatctcaataacaaaaaacaaaacaaagaatcattcaaggttaagatgataaattaaatgtcaagtggttgctacatctaaacaagatctacatctaaacaaggttgctagcatctaaaaactcttagatcagggcttttcc

SEQ ID NO: 131709 - DNA, 1215 bp, Homo Sapiens
  misc_feature (128)..(128): n is a, c, g, or t
  misc_feature (1102)..(1136): n is a, c, g, or t
gggcgccattttaggtgcctgggtgaggaagggggtggggcccccatttcttgggaccgcttgaagttccttttaaaggccaagggccaggggacccagccttcagatccccccgttcatttttcccntgaataagggggatggagaagagttctcagcagttggcctcctgcaaggccgagatgcctgccagcctgggcctgctcctttagcgctgtgagagcttatgtctgacgggcagagaggagcaaatgcagtccctgttgggctgactccacgcagggctccccagcttcaggcttgcagggtgaccctgctctgtgacccagcggcggcttcagccccagagggggccgtggcacaggtggtttaggcatagccgccagccatctgactggtggccgcattgctgcctactcctcgccaggcctggtagctgaagaaggcactcactccataggcgatcatcaccaaacacgcaaagaacgaggcagccgcgcgctggttataaggccgggtgcccctcagggatgtcaggtcaactgccgcagagcaggcgatgaaggcggtgatgtagagaacggtggcgctgatgttaaagatcattaacaccagtggccagggaaccatgtacaacttcatgtgcagctgaaacaggtagaggttgaagaggacgattgtcaccagccagaggaagacagcgacgaacatcacccagccataggccggatacaggtggtacggggtgtccgcaatcagcgcccacaccagcagccccagcaccagctgcagcagcatgagcgccccgaggcgggagcgcacgaagcccaggtccgggcgcagcgccgacaccgaggcttcggcgccctgcgcaggactgctggtccgcgtgctaactttcgacgggaactcggccatggcggctccgcttgcctcccgaggtcgctacggccgccgtcgccgcccctccagcggtgggtgccggctcccgcgccgcttttcccccaggctccggatccctgtgtggctccaggcgctgcaggaggcgtcccccggccgtaatggccgaattcccgggcatatgtccggtaccgtcgactgnnnnnnnnnnnnnnnnnnnnnnnnnnnnnnnnnnncgccgcttcctcgctcaatactcgctgcgctcgttcgttcgctatacgccgtagcgccctatagtgagtctatacattt

SEQ ID NO: 131710 - DNA, 776 bp, Homo Sapiens
tctctcatcttatttttattaaaaataaacagtcaccccaaccacatgacaactcgccaggcaaggccttgcttccctccctcctttgcgtcccatgtgcctagtcagcaaggtcggggaggcaccgatgttagcttcgcccaaagggagtattacagagagaggcttgggaaagggaaggaaacctggacaggcttttcagcactgagaaatcacttaaaactgatttgctttcagtaactggtatgtctgaaatgcagggagggaagaccatgctgtcagcaatcaacccactttttacaggttggctccagggagaggttggttgaaacggtgtttaaaggaaggagagtggtttcaccagcttgctcagctctcctggaacaaagactaaggtgctacgtgttgcttgttaggcttatactacggcgggtctggggctgcaggtctggagtccttgttagtgcatttagtgctggtgagaagggtgggccccagtcttggacgctgaagtcctctaaagacaaggcagagacacagcctcagatcccccgtcatcttccactgaataagggggatggagaagaggtctcagcagttggcctcctgcaagccgagatgcctgccagcctgggcctgcttccttagcgctgtgagagcttatgtctgacgggcagagaggagcaaatgcagtccctggttgggctgactccacgcagggctccccagcttcaggcttgcagggtgacctgctctgtgacccagcgcggcttcag

SEQ ID NO: 131711 - DNA, 913 bp, Homo Sapiens
  misc_feature (23)..(23): n is a, c, g, or t
  misc_feature (86)..(86): n is a, c, g, or t
  misc_feature (98)..(98): n is a, c, g, or t
  misc_feature (134)..(134): n is a, c, g, or t
  misc_feature (827)..(838): n is a, c, g, or t
atatccctcagcttctcatgtanaggcctccatatacgcggttcccaagaccgaaatataaacaaatgattctttttaaaaaaagnccaccaaaggtnggaaaattaaaaccggattaccattactaacatagnattacactggattaggtgttacgaagtaatttagagactatttaaagtacacgggaggatgtgcatagttatgtgcaaatactacgccactttctatgagagacttgagcaacctggattttggtatcggcgggggccctggaccaatcccctctcagttctaccgagggagaactgttttgtttcttccagcacggctttgaccgacagtgtgttgggattcgctgacgtccatgagaaagcttggcagcatgctgagaccaattttcccagggccagaattctcctgtgtgagctaaaatacagtggctcggtccaacaaaacagagcctggagccaggaattatggcgaacctgctccctcccgtcctcccttggcgcacagatccctggcgccgccgctcttgaggtcgcctctcgcgtgtcgacctcatcgtcggaacggcgcttcctgaagctttatataagcacggctctgaatccgctcgtcgggattaaatcctgcgctggcgcgctcctgccagtctctggcctccatttgctcttcctgaggctccctccagagacctttcccttagcctcagtgcaatgccttccgggcgtcctcagaccagacacaggccaaagccactacagaatccggaagccccggttgggatctgaattctcccggggactgtggcgtagcggttnnnnnnnnnnnngagtgagagggacctgagcagagtggaggcctcgtgccgattcaccacccggcctgtaactacggccgatgatgt

SEQ ID NO: 131712 - DNA, 717 bp, Homo Sapiens
aggaccaaagaactttatatttattttaaatatcaaagtaacacaaagaactagttcaatatacagtacacttcctactcttcacagagaactgaaattttctataaagacatttatacttaggaaacatcagacaaccaaagtatgtataaaactcacaagatattttacacacagttcacaataattaattctgatattttagatttttctgtcattgcttttaaagtatccttaattaaaaacaaaaattattatttgagactgaaaacaagtgcaaaagcatttctactttaatatacactgtaaatccccataatcaaaacatttactacacaatgtggaacagctaaatgcccagttttgtattattttctggcagccacactcatcaattgtaatacagttttatcaatagggataagaagagttcaatcgttagaaggaataaaaattttgtaattacatcacagtacattgtccagctttaatgcaagcaggaataccaagcaaaagaatacgcagtaacaatgagatgtgtacatcctcttcattcaatacatcttttagaatctccaacagcaatgcaagcattgattacttttctttacctaagaatttgaccaaacaaggttatattctttgtataacctctgtgctctaaatataatccttaatttctcctctgaatatatccttaattctctttatgtattg

SEQ ID NO: 131713 - DNA, 778 bp, Homo Sapiens
ggctctgagcccctcgccccccacaccgtcctcatctggcctcccccctggcccccacttccctcttatgcccttcctggccctttgcttcctcccttagtcccctcttcaccatatctccactgctaccttgctggccccagagaccaccctgcccaaccaaaccactcaggtaacgccactaatcaggcaggggccaccatggcctaggtctgggctggctgcaggccctgcctcatggcctctgagccctccactgccccagggccttgggccctctgcagatctcatccaggatttattgttgtccagtggggtgagggaggcctgtctgaaggccgagcctccctgcctgcacccaagttagaaatgggggtaccagcacttagcttctctctgagtgctggctcccaaggaagggacctgggacctgggccacagtgggggcttgcccttacctcttcagaaggaagcatcttccacagcccccacccaactttcttaggagtgatctggtggccagaacaggattttgcacggccccttttatcctgcgcatgtggcctagggtcatccccagcccatccctgtgtcagccctgagtgctggacactgcgttccagaaatgaggaagaggagagagaagagatggacagacctcagatccattaaagtgttctcacttccctgagactaggttctgggtccttaaaaccaggtttcctaggctgggaccctgtacatagttggtgtttaatgagtgtttatggaggcggag

SEQ ID NO: 131714 - DNA, 705 bp, Homo Sapiens
taaaccatattatatatatttattttagaataatcactgaggtagcagggtagaagatgcattggaaagggtggcaagaaagagggtactgaaaacaaagaagaagataatacaataattcagataggagatgactgggcctgaatttggctaatagcagttatgatggagagcagaggagggatgcacaagatacttggagatagaattagcatgactttgtgtaacccttgtaacaatcaggttcatcctcgccaaagacttactaggtaaggggacattctgtcctgtagtttatctctcaccaatttcaagaaaagtgaagatttacagataagtagaagagaggcaagtaggacaggtgccccccaggcttttaaataatgtgacatggaggcaggcttggaggaatcagggacaattcgagtttttaaaggtttcaatgttctgtcccactgggtcaggatggcatttctggctccatcccattttccagggcccatgaggcggtactgataaggagtacatggtccaaagaaaactttccaagctagtctgggatccttgaggaacagaagtgggatgctgggctttgtgcctatgcaggcagcgatatcattcatgtaggcaatgtagtcaaatttgtctttgctggtgtctttacacactctccttttaatgagctgttccttttcagtagcctcc

SEQ ID NO: 131715 - DNA, 404 bp, Homo Sapiens
tttttttactttaaatatatcttttaatgacttagtacactgttaggcttgtaagacagccttaaaaaatcataaaggggaacatgatcacatggcatgaaatgaacatttacatgctgttaaataacattttaaaatgtatgtatctatagccaataccatagaataccatatccaatatgaatagaaacagcacaattacttcaaaaaggaaatctgcatcaggctttagtgtgttgtcaaagtactttcggatattacctcatttgagagtaagaaaactgaggctcagaaaacaagtgacttgctaatgctgagggtcaaggtctttggaattcaaataccatgtgctttgcaccattcctttttccttccattaaaccaatatcctcaaaatgccagtt

SEQ ID NO: 131716 - DNA, 1663 bp, Homo Sapiens
  misc_feature (553)..(600): n is a, c, g, or t
  misc_feature (1319)..(1319): n is a, c, g, or t
  misc_feature (1631)..(1631): n is a, c, g, or t
cctctaatactcttctgctgaacggcggcttgctgcgtacaatcatttccgccgcatgcggcagctggtgggtggaatcacacccctgcctttttgatcaccagctcgtgtcgataggacgtctgtccatgacaccaatatggttgatcctcctctcataggcgccccgtttaataatgagatggcttgtttgtgtgctcgaacattatggtggtcgcccccacgttagttgggggtgcaacgcatctcttgtctagtccgagcttgtcaacggtcggctgcgcctgtcgtatctaccaggaggtgcgctcgtcgcgggctctcgcgacatggtttttttcacgacgcgtctcgcgtctcgtgtgttggtgtacaccacgcggtgtgtgctctcataaataataagctcggtggttgtagtctcggccctcgccggtcgcggcggcgccggcgcgtgtgtttccctgatgtagcgccgccgcgactgtcggttagtgttttgtggtgtcccttcagggtggtgttcttcttcttttctgtctcctccctctcnnnnnnnnnnnnnnnnnnnnnnnnnnnnnnnnnnnnnnnnnnnnnnnnaggttaaaacaaacgtttatttaacaaattatattaagaatacagacaatcacacagtggacttcccttgccaagtacaagagtcaccttgaataaatatgcagcggggacgtcatccctaagggtcttccttgtccaggcctgacacagtcacacagcagctccacggccttagctgggagaacaaagccgtctctggtggcaacccccggacatgtgctcagagtggcaggaggaggccgggccaccctgagggtgccaggcagcccaagcaggggctgtgggctcaggggtgagcgcctggcgtggcctccaggggcaaggcaggctgcgaaccaagttcatgagctcagccgctgcgtggctgccaggcctgggggctgcttcctcaaggccctcctttgctttcatccttaggttcacctgcttctccaagaacctgcaggctgggattccccacagatgcctgcaggctctggagggccctcatctgggtggaggagtacgggcaggccactcctgaccatgctctgcgcccactgcacagtggcctggtgaccggcagggcccagtggcggccgggaagtccgtaactggactggaaacagaaagggcagccccagcacgggcttgcgacaggatggctggccctgcctctgccgcttagcagtgggccaagtctcagcctcttcaactctgacaaggagcaaagaacatcntacttccaggtcactctgtttttagggggaatgaaaggagaaatgtgcttagagagcctgcctagagccttggccaggaacaggtgcttagaacatgggagtccctcttgtcctctcaccgacctgcaattcctttacgtgaccccactgggttctcatctctccaagtggcggaggacgtggctggcatttgttcttggacttggggtgggaagaaaggccttaattatacatttgcaagggagactgcagcaaagcacctgctccttatcacctttgtgccatttccaaggcctttggagatacttcaantttccagagagaaaggggaggcggtggggacc

SEQ ID NO: 131717 - DNA, 316 bp, Homo Sapiens
tttaaagaggttaaaacaaacgtttatttaacaaattatattaagaatacagacaatcacacagtggacttcccttgccaagtacaagagtcaccttgaataaatatgcagcggggacgtcatccctaagggtcttccttgtccaggcctgacacagtcacacagcagctccacggccttagctgggagaacaaagccgtctctggtggcaacccccggacatgtgctcagagtggcaggaggagtacgggcaggccactcctgaccatgctctgcgcccactgcacagtggcctggtgaccggcagggcccagtg

SEQ ID NO: 131718 - DNA, 664 bp, Homo Sapiens
tttaatttttagatctgtttattttgttccaaactccttgaggatttaaatgtcccatgtcttgagctctgaaattttgttcgttctagatttaactgtggtgcataagaggctgcatcctactctaaatattaatactgtgctgcttttgccaatcaacattctctccaaaagcacacaagctcacatgtgcacaaccacatgtgtggaagaagtaaattgatatcccaccatattatgtgacatctgaatgggcagatttgggacctatgaatgtcttcccttcatctggagagaagtgggcgactgcctgattcttaagagccatctgcatcttaagcaacaaaagaggtcctacagaaccaccctctggtgacttggtgagagtgaggtggggagaaatggaagcaggggcattgttgctccagtattttcagtggtctctcctgggagttacagggctcctagggcccagattctcctgttccactactgttagaactgacaggatagtaactaggccctttctagggccccttcctacccacagagctaagaaccagtgggttttcctttggggagttgataagagctggactgggaccagcggagggggctcaggactttggccttgaatgaaatcattggaggccaaccatgcccc

SEQ ID NO: 131719 - DNA, 1001 bp, Homo Sapiens
  misc_feature (324)..(393): n is a, c, g, or t
gaaacggcagtaactatcacggtcttaaggtagcgaggctgggtggcgaattcggcacgagggagcgaggagctcccctccctcgctcgctcctcgcaagctcccgctcgctccctgcccactcccggggggacgttccgtgccgcggccgccgcggcgctgcttctttcacactttagttgggagctgcgcgccgcgctcagttactggagagctggccgcgcgccgccgcctcccgcacgcttgcacgcgggcccggcttcggggttttgggttcttactccaagcggcggggaggagggggagccccggacacactgtggnnnnnnnnnnnnnnnnnnnnnnnnnnnnnnnnnnnnnnnnnnnnnnnnnnnnnnnnnnnnnnnnnnnnnncttgccaccttcagcccccccgcgaacgcccaaggtgcacacatcttgaccaactcagcagcaaggtggattttctttgtgtttaaagaaaaaaaatgtccctgtgtctgtagagatgatttgcagttcagcccggctgaagctgaccgaatgagactatgggctgtgcctccgccaagcatgttgccactgttcaaaaggaagaggaagcccagaaagggaaaaactaccccaaccggagatgtgttcgcgccgacgattcgcgggtccggaccagggcgcagaggtcacatacctggatcgacggcggggcgacgcgagggggcgattcgtcggtccggcttcccgagcgagccttgcatataaaggggcgcctgcgccgggggaagccgcgaccgaccgcacaccggtgtgggcgcttatgactggccctcccgccgcaatcgccggccccccgccccaccgcccgcttcccgagccctgtcgtcccgtttttgcgccatccgcgcctgttcccggcgccgttctccgcttgcggccgcgccgctccatctcttgtagtgtgcgcccgccacgggtagggccgcccggtgttgcccggcgctgcc

SEQ ID NO: 131720 - DNA, 956 bp, Homo Sapiens
  misc_feature (575)..(592): n is a, c, g, or t
  misc_feature (597)..(597): n is a, c, g, or t
  misc_feature (833)..(833): n is a, c, g, or t
tttccataaaaacagtaaaatgtttattttcttagaaaaaaaagtgaggaagagggattcaaaatgattgtgatcacacttccatctgcatctgagcaaagccaatgttgcaagcttaattcttgattaagatacctattaaatcaaacaacctgccactcactcctacgtcacttccaggagtcacatcacagcatgcttttaattgataatagcttctctacttcttctgagcagagaaacaaggcttggcatagcaaccatcccatctccaaagctcaacactgccagtgagaagcaaggctcagtccatctctagactgcgtgcgagagatggggaggaaggagagagggcaggagatgcttgtcttagaagcagaaccagtttagaagagaagtttgttatctgagttcaccactacctcatcttatagaaaataggttggagagcatctgtaaaaccaacagtatctttaaggtgaaattgcagaattttgctgcatacctggacacaagagaagtgaaaagttgcaacaagttttaactagcagcaacaaagaaagttcgataacagnnnnnnnnnnnnnnnnnnagcantattcctttgcaagttcattaagaaacactgtaatttaatggggcgtacaatatggaacgatcttcttttgctatagtgctgttcgctgaatagaccgacctttgcaaagattcaactggggtgtacctatttaacagtagtagctctggttgagtggtaaattgtgctagtgaatctcctcttcgacagtatccgacctttcatttttcatcagatctgagaatctgtggttcanaattgatgttgcctggtgatgacatccggaccttatagttatctaattactgactttctgatgatggatcgatcgtgttgaacaagggagtgaagatcaatatcaagcatattcttcatcatc

SEQ ID NO: 131721 - DNA, 1337 bp, Homo Sapiens
  misc_feature (459)..(468): n is a, c, g, or t
  misc_feature (470)..(578): n is a, c, g, or t
  misc_feature (1264)..(1264): n is a, c, g, or t
gctaacaacgcggtggtggtggggtcgcactgggcatgtggttccatcaggaagtgttggatgttgtgtgatgcgcctgggacatggggttacgagggatgtgtggtatagggcgggatgtgctgctgggggctgatgcggtgggtgatgtcatgtgcccccatggcggtgagtgctgtccttgtttgtgcgatgattgtaggctggaaccggcgcaggacgtcgggggtattgtctgcgacccggacacacgagaatatttgtaaatctaacatcgctgcgcagcaaggaattatagcataaataagacaatacacaagctgcataaaaaggatcgaagcgatacgtagtgatgaaaaaaacaagcaggacgctgtagtatggatgatagataagttataggcactgacgcatcgtaaagaagtgaaaatcataaaggtgcgcccgccgcccgcttcnnnnnnnnnngnnnnnnnnnnnnnnnnnnnnnnnnnnnnnnnnnnnnnnnnnnnnnnnnnnnnnnnnnnnnnnnnnnnnnnnnnnnnnnnnnnnnnnnnnnnnnnnnnnnnnnnnnnnnnattcgttgagccagttgtttattctggccctcacagccttggctagtccacaaaggccctggggatgggcaacaggctacaggaacccacctgtcttcctggtcagggcccctggcccctagcagcaggccaatcctggtggggcacagggttctgtgccctttggctgcctacctctgaatatcctggccagcaagccatgccttccccgcccctggggccctgggagcccttcagctcctgtccccataatgggtcctgggcctaggatgaggggaaggtcccagtttcttgtagggtgttatctgggggtcctggtgtgggttgagctggagggctgtggggccccaagacccctgtgccattggggtgctccaccctctcaaacaggatgagcatctcacagtgcggggtctgcgggaacaggtccactgccacagccttgaccggccggaagggaatgcccttcacccggttagatggggctctgcagaggtccacaaagttgcccatggctgcccgggggttgcatgagacgtacagcagccgcctgaggttcttagctctccggatggccaggatcaccttggaatctgaggaggcaacaccagctgggtccccacagccagagagtgcataacatggtgagccacccacgtgtcctcgttcccgtgccacctccttangcaaaagcactcacgcaagccagcacggggtgggtccaggatggcacgaggtgctgggaggcagtctgctcac

SEQ ID NO: 131722 - DNA, 1126 bp, Homo Sapiens
  misc_feature (717)..(726): n is a, c, g, or t
  misc_feature (1030)..(1064): n is a, c, g, or t
aatggtcagcaatgtctttttaatacagatgtggtacagaatgtttaattacagcagggcagtgattccagttaaataaaattaaaaacctttattttcccaaatataaaattactaaattaaagtcttaaaagaaaatataacatggtgacagctttaaagtacaccaccattcaccacaggatttatgatttaccaattacatactccaccattttggcaaaaggatgaaattcttaaaactgtttataaacctaatatagtaaagactgtatacatctccatattgcacatttttatgtacaagaataaaacattaaagtgtattgcatatactggaacagcacaaatttatcacaattaaacttaatgcataagcccatgtgagtattaaaaatgtagaaatgtaatacatatatgtacagaatgccaggactgtattaacaatgatatgtacataacaatatactgtactactttgtacttttcagcatagttgcggttattaatataggcctttggttctaaactgcttgactagttttaagctcacataattccttaagctttcatattttcttaaatgcaaggaaatgaatataaaagcactaaatctcctggttcactggtacaaaaattacaatggtcagttcccttaggtcatcaaaaactagtcacaaaaatagttcttgtattcaacctgaatgtgccacaggnnnnnnnnnntattttcaagattttccagctcagcctcgaggcaaaaggtcccccaggcatcaatgtcagtgcagccctccctgccatgtagatcccagaaccttttttttctgtaggccatctattctaacactactctgcaaggaagaataaaatctaagtccagctcaagagtgtctaccacacctttgttaagacacaatgaaaactttgaatattgccagtgagatttaaaaaaatatgtgcaccttcttacaactcccccggccgtaatggccgaattcccgggcatatgtccggtaccgtcgactgnnnnnnnnnnnnnnnnnnnnnnnnnnnnnnnnnnncggccgcttcctcgctcactactcctgcgctcgtcgttcgataaggcggagcgcattagttc

SEQ ID NO: 131723 - DNA, 1133 bp, Homo Sapiens
  misc_feature (213)..(213): n is a, c, g, or t
cccaagagaaggttcccggaaaagggggaaatgtcccgtttttccaggcaacccaggggctataggcaggaaattttcccccgaagtttcccctaggggggttcggggatcctgttcttgcccattcctgggcccccttctttgtggcccttaagggtcccttggtcccgtgtctgaaggaacgttgttccggtttgtggggtccgggagggnccgaagaagtgaaagggcgggaggttcatctgaaaggtgaggcgctggccggaagatcctcccggactaggtggcccacagtccggagttccagcccgtctgatcctcgtccgcaacccctgggttcggtttgcgatcgcttcgcggagccttctcccaggttgcgggttcccctaggctcctcttggacgctggcgcggctggcggggacgagggaccaggatggggattcgggggctggtagccgggctgtcgcggatccagcgcgtccttggaaagtaggatggcgaggccgggcacgttcttaagtacgctgagactagcggccggctcgccaggcgtctgaccctgcgtgggcccaggcgggaggctctgccacacctcgcgtacgctccggtagcgcagccgcgtgacctggtgcaggcccgccaggcggcgcttgaggatctcggcgcacgtgacggttttggtggtggcccggccgcagccgctgaagacgatggcgcgcgtggctggctgcgccatgctggcggtggcgaaggccatcaggttccggatcttgctgccttccttgacccgcatgtgcaccgcgcccggcgccaggtctgcgaaggggccggagcccgggccgcctccctcggccccgcaccccgctggcgcctcttcggagcgcaccttacggaagttctccatgcgccgtcgtcgccgggaccgccggctttgccatggggcggcctcagccccggggctgcatggccgccggtcgcgccttgcaagggccagcaggggtaagggcgccggagcagcgcagacgccggcgggcgggctgggacggcgcgatctcggccccacttctctcgagcgggcgccgcccggacgcgtgggtcgacgatatcccgggaattccggaccggtaccac

SEQ ID NO: 131724 - DNA, 1664 bp, Homo Sapiens
ggtctcttcagcccagaggaccaccacaggggctccaccttggaagtccttttttgggcccattagggctccacggtccccttcccggacccaggagttctcagacggcctcacacccttctccctcccagaaacatggccgccctctccttagtgccgatgtacaggggtacacgggccccatttgcacacctctaagccaggccagcccgggaggcggagtgggggaggagagaggaagaagccaggactgggcagtgccttgcaccattttgaagctgttcagtctctgtgcctgaccctgaagactccaagactcaggacgcaaggctggaggggaggggagacacaaggggccaggcgagagctgtctctgcacaggcgggtggttagaaaaaaaatgggggacacagccatttttgtgcttgttttattggaagcaagactccagccagctgcagggctcaggggaggaggcctggagagttcagtcctgggtctccctctgggccagcagggggaaaaggggtgttaaaagagctagaaccctcagagatgctcctctgaagcaggggaaagaaaactagaaaggaaaactgtcccagggcggggagcggaatagggcccccacatctcagactctcctaccctcaagcagttaattctcaccccctgccttcctctgtcaacggtgggggtgattccaataactcttctcagcttccatacttcaggtgctcttcgtgaatgctgggtggctttaacccttgggggtcccaaacaagtttccagaatcccactgtccaccattctcccccaaagaaggtcccagaaaaggtgaagttccgtgtcttcacgcaacacgggcataagcagcaattatcgcacgaagtttccctagggtggtcggggatcctctcctgccactcctggggcccctctcttgtcgccttaaggtccatgctacctgtcttgaggagctgtgtccaggttgtgggctccggaggaccgaggagtgaaaggctggaggtacatctgaaggtggaggcgctggcggaagatcctgccggactaggtggcccacagtccggagtttcaggccgtctgatcctcgtccgcaacccctggctcgggttgcgatcgcttcgcggagccttctccagctgcgggttcccctaggctcctcttggacgctggcgcggctggcggggacgagggaccaggatggggattcgggggctggtagccgggctgtcgcggatccagcgcgtccttggaaagtaggatggcgagccgggcacgttcttaagtacgctgagactagcggccggctcgccaggcgtctgaccctgcgtgggcccaggcgggaggctctgccacacctcgcgtacgctccggtagcgcagccgcgtgacctggtgcaggcccgccaggcggcgcttgaggatctcggcgcacgtgacggttttggtggtggcccggccgcagccgctgaagacgatggcgcgcgtggctggctgcgccatgctggcggtggcgaaggccatcaggttccggatcttgctgccttccttgacccgccgacgcgtgggtcgacgatatcccgggaatccggaccggtaccagcctgctttttttaacccggtctatattccatagctttc

SEQ ID NO: 131725 - DNA, 898 bp, Homo Sapiens
tttttttaaagcttaaaattcatttattgtagtgagcaagtttgtaatgaataccagcaggtggtgctcaagccacagttgtctaagacactgggtttcacaggaagttaatctcaatctcagtatatgcaagtaaactgactcattcctgcttccagtgggaacaatttttcagttaaatcttgcttccttgcatgtcaagaattctctactggtaaatcttacaggtgtcaactttcattatcagggcatctattggccatctattaaaggccttacctgttttttctgtcatccagcaaatcttagactatttacttgtgtaaacattagatagcaaagaaactaaggacaaaaatctctagttcaatttagacttgatacctcagagcactggctgatgggaaggcattttatctaattcagactcagatgagggaaaacgataacacttcattacagacttgtctatggccaattcaagtacctttgaatcttgagcaatacacattgccagtcactttaagaggccttatctcttgggctgctttaactcctgcttagcatgtccttaagaacacatgtcctggccaggcatggtggctcatgcctgtaatcccagcaggaagatcgcgaaaagcatttttcaaatgcacaaatgcttaaagattcaggagtaagtgggctattacacctgttaagcctattaccatgtagtttcattcctagtgaccaagtagacaaactgctaattatcaaagcatcaaaggtattaagactctgcaggagaacaagcaatgtagattagtctaattttatagctacttcaaattgccatctttttctattagaaccttgttcctattctgaatagcactcaatagaacttgtgaaaacc

SEQ ID NO: 131726 - DNA, 674 bp, Homo Sapiens
aattgtgagttgtctcttaatgaaaagaaagtttgtacatatggcacttcactccttatgccttcttttctacaaaagaggtgtagctgtaagctagtgttataatttatacttccctcaggaggccaggtttctcccccttgaagaggatatcgtggccaggtggtactgcagaagaatataagtcgtttatttcttagcatgtgagagtccagttggtcccaattctccagaatacatctcaggggcgtttctgccttggggggaacgtttcccattgctttggagatccctttgtggtcaccaaatgttactgggggtccttgctcccagagctcccaagatggtggcaggccacttccaagatggtggcaagcctcgtgttctctgacctggggttcttggcctcacggattccaaggaatggaatcttgggccatgtggtgagtgttatagctctattagaagccgtgggtcacggaagagaaccgtggaacccagtgactagtgttcagctcgattaggacgaacccaggctcttagccgtgcaggaacaatggcaagccttcagtccgatcaggagtggcaatgggcgcctcgctggatcaggagcacagcagacaccctgctggatccggagggatggaagtcagcggcgggtctgcgacagcggc

SEQ ID NO: 131727 - DNA, 970 bp, Homo Sapiens
tttttttaaagaaatagccaatcatctattgcctgagagcacagggggagggacagtgattgagacagaaacccaggcattcgacccagcaatggcaaccccctttgggttccctccctttgtatgggacgtctgttttcactctgttaaatcttgcaactgcacactcttctggtccgtgtttgttatggctggagctgagctttcgcttgccatccaccactgccatttgctgtctgctgttgtttgccgccatcacagacccaccactgatgtccacccctctggatccggcagtgtgtccgctgtgctcctgatccagcgaggcacccattgccgctcccattcgggctaaaggctcgccattgttcccgcatgtctaagtgcctgggtttgtcctaatgagaacactcaccacatgccccaagattccattccttggaatctgtgaggccaagaaccccaggtcagagaacaagaggcttgccgccatcttggaagtggcccgccaccctcttgggagctctaaaaacaaggaccgctcggtaacatcagctagagggactcgtgtgcaatcactcaccttaacagccaccctctcagaggagtaggattatcacaccatgttctccatgagaagaccgaggcctaaggagctgggttccaatattggtagagctatggttccaatccaggtgatcattctccaaacctgcgctcttcagcacctcctcgctatgccgtctgggaatgcagcccagtaggtatcagcctcgttttaccagctcctatttaagatggagttgctgtggcatgcacccggtgtggagttgctctgggtgtacctctgacaacagggttctgtcctcctccaggcccaggtggacttaggtgcatacaccgctagcacctcccccagcctggacccggttctgctgggccggggaggcgggtggtcgcggaacggcgg

SEQ ID NO: 131728 - DNA, 1349 bp, Homo Sapiens
  misc_feature (868)..(890): n is a, c, g, or t
  misc_feature (1068)..(1280): n is a, c, g, or t
caatgtgatttgctgccatttatatactatagaaattttacatgctgtatatttacagtggggcaagtgcttttttaatctttagaaaaacaaagatcaaactttaaacatctctgaacaacacaaactgtataaaccatacagattattcagatacaaactgtattaaatacagttttccccactccatctcctgatgcaggaccagtgaattataagtgtatcacagtttgatagcatatccatattaaaaataaaatcacagtatgattgtgtctgtaactagaaactcgaagggaccaagcagacaacggagactccagtatcagtgaagacaagagacgctgtatcaaaaagtgttgtgtaatagaaacatactgtcggctttacaaatcatgtctgggttatacattcataatgtaaatactcatcataactgggaaattgattgattggaacagttccacaaagttcaaaaacagaacttgtctataaaatacatcttcaaatcttgaatacaactaaaataagcaaattagtttctagtatcagacattacagaaaacagactgctctccaaagtctaggtgagagcttgtgagtttttaaataagtctttaaattaaatatacacactgtcagtttgtacttttgacaattccatggtctcccggttggtcttgcaccagatgtctaacttggaggaacattacatgaaatacaagtaatcgacctgagtctgtaattaagcagcatttgagatgttctattccagggcattatttcaatgggatttatatacacggtattttacaatggtcagcagtggtagaaagtgttcgtccattcggaataagggtaattaagnnnnnnnnnnnnnnnnnnnnnnngttctccatggtaaaatctgtacagtatttactaaagaagcaccacgcagattggaacagagttattgtctatctttataatttaagctgggctggggatggcttctgttgaacgcgttgaatcataactagtgaattttttgttttgagcctcgtgccgcctcttgccgaattcttnnnnnnnnnnnnnnnnnnnnnnnnnnnnnnnnnnnnnnnnnnnnnnnnnnnnnnnnnnnnnnnnnnnnnnnnnnnnnnnnnnnnnnnnnnnnnnnnnnnnnnnnnnnnnnnnnnnnnnnnnnnnnnnnnnnnnnnnnnnnnnnnnnnnnnnnnnnnnnnnnnnnnnnnnnnnnnnnnnnnnnnnnnnnnnnnnnnnnnnnnnnnnnnnnnnnncattatgatcggcacgcgcgggagaggcgttgcgtatggggctctccgctctcctcatgatcgcgcgcc

SEQ ID NO: 131729 - DNA, 455 bp, Homo Sapiens
  misc_feature (151)..(170): n is a, c, g, or t
actccgtgacgatactcattcctttattgtcaactgcattgattggaacagggctggggcctgcaagctgctggcagcacccagctgcaggtgcatttcagctcaacagaaaggcctccatccgaagccaaggggacagaggggaatgttnnnnnnnnnnnnnnnnnnnntacatatgtcccgtatagtcatatgtgtagagtgacaagaatgggccactgcattgttaattgttgtcctaaataaagaccatagcaacacacgagaatttggtcctaatcaaggcccttactttgtcaatcaaatatttgatacaccaaaaggaaaaggagagaaagagagacagagagactgagatccagccactcctggtggccctgttcccagcagatcttacactgagtgtagagtgtcccctgtggaggtaaacacgcacacaaacacgcacacacata

SEQ ID NO: 131730 - DNA, 493 bp, Homo Sapiens
gactgtttcccctgtatgtttccctggaagcttcaggcagtgcctcataagccaatggaatctgttgctaatagccacagcatatcccttgcataatatgacctctagattactgcgccttaattgcttcccagctcttctatgctttggtttagaaaaatgaagtactgacttacgggtgaagaaagtattcaaacagttgacatatttatttcagtcaagaaacagttcagagggagatacaaacaagtaacttagttccaatataatagttatgatgagaggaagtactggatgctaaacaattatatgagagacagctcaggctgggggtgtcaatgaaagcctcttggaggaagtagcctgatatgttaactttctgcatgccagtggtaagtcatttgagattatagtatctttgtccacccaaggtttactgctgtaaaacatgtaattaaagatttggaaagttgtgtgtttatgtattcactgt

SEQ ID NO: 131731 - DNA, 670 bp, Homo Sapiens
  misc_feature (137)..(148): n is a, c, g, or t
ggggcacataatttgtttaatccagattggatacatcaggtacagcagtggcacacgactcaatactgtaaatgatatacatgttttaacatatgcactacagtttcaaaagaagacgacaggaaactcaagggtgnnnnnnnnnnnncatagaaagttttcatgttttatcttcctgcagttttgtacagtatatttcttctttgccattgtgatgttgataagcaaagcccatttattatacgaaaatagaaaagaacacacttgatgtatctcacgatgacattaatggggggaagggtgtgacctctaaggaaaacattacattggaatgtctgattatcaaaaatataccatccctcccacctcccaggtttgtaaaatagtccattggtccaaggagccccccaggacttgggtcagtgccgtacactggttagagtgacatcatccagtgtagttgagtaacctgctaagataaatgtcattcccacacttgagaaaaaacacagaacattctgaatagaaaacaagacttaaaaggaacccctttaaagctgtttcattttctgatagccactttctcttagttttaatgatgctcttcatggtgctgtttgggctccgagggtcatgggtcataacaatgtttttccttcatctagtcatt

SEQ ID NO: 131732 - DNA, 713 bp, Homo Sapiens
  misc_feature (50)..(51): n is a, c, g, or t
  misc_feature (54)..(54): n is a, c, g, or t
  misc_feature (84)..(84): n is a, c, g, or t
  misc_feature (159)..(159): n is a, c, g, or t
  misc_feature (204)..(204): n is a, c, g, or t
  misc_feature (713)..(713): n is a, c, g, or t
aatttgtagttagtatacattatgccagtactactatagattctcagagnnatnaaccccagaatttgtgttcatgttcccagntacgaacacaggtcagaccgctttgtcaccaaaagtccaaaaatctctagttccttgaagagctctaaaatgatnacaaaggactagaaagggacaaagtttaagactatcagattgctnctggggatttccaatgataaaagtgaaaaagaccttaaaggtcatcttgcccatattccatctcaatgaagaaatctcttaaacactattaacagatgatgatttagcttctgtatgtcctttccaccaaaaaggtgattttccattatcagataaattactaaagacctacacaaaaattattagcaagtatataatacacctccctgtgtataactctgtcttctggaatagaattcttatttttcatgatgaccctttaagtagttaaagacttttaacacatctcttttcatagggaaatgggtaacagaatctaaattgcttgacatcttaacttccttttacaacctcacaatgggcaatgtgaagacagctgtttttaaacatgaaagttattctgagttggcactttaggggagcttggacattggaatgggttcctgctatttttttcaggagagtagcttgtatacgagggaaagtactgcggggtgcggtggctcatn

SEQ ID NO: 131733 - DNA, 945 bp, Homo Sapiens
  misc_feature (583)..(583): n is a, c, g, or t
  misc_feature (611)..(611): n is a, c, g, or t
  misc_feature (617)..(617): n is a, c, g, or t
  misc_feature (699)..(699): n is a, c, g, or t
  misc_feature (706)..(706): n is a, c, g, or t
  misc_feature (735)..(735): n is a, c, g, or t
  misc_feature (750)..(750): n is a, c, g, or t
  misc_feature (825)..(825): n is a, c, g, or t
  misc_feature (842)..(842): n is a, c, g, or t
ttttcagtattttctacttttattttctagagtaaatcaggtgccacttggcagggtccctacacctgatgcccttccatctctccaccacccctgccccagaggccagccaaggccaggaaggagaaaaccacatggcccacccgcctgttcctctctggggtggatggagactggcactgggagggaagtggcctgccaccaggagagggtgttccgaggggtcttcaggaccaggatcaggacaggtagggacgagggtaggaaccaggtgaagatacaatttattcctgcatcctgtaccagcaccgtgattctacagagcccttggccagtaacggaccagttgccgctggcctctctgttgaaggacacaagctctggcctggagagctaccctcccgaccctttggagagggcaccatacagtgaggcctcgggcaacagtcttggctgctcagtgagtttcagccgcccggggtgggcaggggcagggttagatggcatcaccctcactgtcagactcgatgacgtccagcggctgcagacgcagggagtcatagttggggggcggggtgcctgngatgggcagggcctgctcactggggtanggccantgttggggctgcggggggccgtgtcaggctggaagccaagttggtgtgggcctccacagctcggcacggtgggggtgggcancgtactngctgggctcgcgctccgtaggtctgggcngggcacactgatatngtgatcaacaagtcattatactccccaactcgatagcaagcaagagccccatcagaagcaactggcacccaatcnagagcagcaacgatttnttggcgctgatcttcatggtgcgatgttattcttggagtaattttgactgacatcctttctgccaggtgattgggcttggtcccgctctgaaagactggaatc

SEQ ID NO: 131734 - DNA, 585 bp, Homo Sapiens
tttaattcaaacgtcctttattgcaggagaacaacatttagaacagagatgtggtggtgctagttgaggaacaggtaggtgctggggtgggagaggactttaacacagggcaaaaataaagcacagcagctgccaacctgatgtgtgggaaataaaggacagggaaaagatgttcaggtcttcctccttccagagcaaggcaccggggtgggctggacgaccagataaggttttgtaagcactcaagatacgcagacccatcaagtttaaatccgggaaagcagcgataggagatcacagtccccaccgggaaggaggtctggagctcagagatgtttacatagccattagaagaggctagaggtctcaggcagccttgacagatgggcagattattccacgttccatcatcgcgacataatgaaaccatattgtgtaggtcggggtaccggatcttgaatccttcatgacaagtgatgattagcttctctccatgtctatatgtcttgttatgaatctcagcatcttcgatttgagggatacggtaatcttcttgcacacagatggaattatcacttgggcatc

SEQ ID NO: 131735 - DNA, 1009 bp, Homo Sapiens
  misc_feature (216)..(237): n is a, c, g, or t
tgccacattgtgagattcccagagtgaaatgtataggcccaggaaaagtgtcttcgcggccccgagacgcggggaggctctagactttcctgtggtgggcacagctgctgaatcccggggaccggcgcggagccaatactcttgcaagctggatgccctctgtggatgaaagatgtatcatggaatgaacccgagcaatggagatggatttctagnnnnnnnnnnnnnnnnnnnnnnacctcagtccccccagagactcttggccgtgatcctgtggtttcagctggcgctgtgcttcggccctgcacagctcacgggcgtacacttgaccagagacctgctgggctttgagggatgcccagagtgccccccacccccaggcttcaaggaagagagccaagagtttgctcaacaagtgactcctttaaggtctctgactcatgcaaacccctggtccagcggccctctctgcatacccaagtcatggtcctagtgcagctgaattgagctcctggagccctcatttggttcatgtcgctgtagtgctgtgctctgtgccagcaggtggaaacagatgctttctgactgactcactgatttgtagtgttaagtcccttagttttattgagaaacattttcttacatggtagagtgaaagcttttcattcaatgctacatctaaaattcacaatttcaaactgcgcttaatctgtaagcaaagtcccagctcctctaactctaatgtatgtttcttcaacaaaaggctaccttaatataagcagcatggagactcttttgatttatccagtgggtaaaatctgaaagcttttggaggcaaaaggatttcatataacaagtagcaaatctcttgtctcagaggcctgaagaggcaagtcagagaatcagtggttctttaatttttgaatgtaatgaaaaatgtaggtgaagatctctctccagtaaacactgattagatacgtgaataaaagcacctaaattattctgaaaa

SEQ ID NO: 131736 - DNA, 1470 bp, Homo Sapiens
  misc_feature (1353)..(1387): n is a, c, g, or t
aaaacataaatatatttaaaaaattaaaacacctaagaaatgcaatctatacatgtgaaaaagtaaaatatttatatgcataacaagtagttgcaacattatccataagcagcagttagtgtttattttccctatattttggtttaacaccatagtgtagtggtagttcattctttttagggaaattacataaagtccatatagaatattattagtaagttatagaagactgtttaactggaaaattaattccaagtaacagcatttcctttaaaaacacatctattattaaacgaattactttaaactagcagagaacaaaatgagcctataatttattaagtacaagatatatagtcaacttgcataaaattacatatggcattttaaaaagtctattctaaaatatcagtaattcaagcaattgggatttccacaggagagaaattgccattactttcctttttatgaagaaagatctgccttaagaacatcacaacgatgttattaagaaatgctacagcatactttaaaaatcaaaatggtgaaacagatgcatcaggatattcttttacagataccagccctatagcagcatttcagaaggtgatttaaatctaataactgacttgggtttttattctcttctagaaatacatattacatgtatagtttagttaagaattttcatttccattataaatgggaacttttcatactgattatctaaaggtataagaaattaagtaattggatagtctagcacttcattagaaatatatccactgactccacaaaacaacttttacatataagcaaattactaaaaatatctgaatcaggagaaatgaaataaaatacagtgaatggttttctcttttatctctaactgtaaaaatcccttttgcctatttatttgacccgtctctattcatgcaatttaatgaaccctcaaaagaatttacacatctttatacagaattcacatctacatcagtaaactaccagtccttttatattttcagtgccttatcgaaatatgtgtaacagagttctgtcagttctatgaggcaggaagatgtttcctaagtacttctttggatgaagaagatatagtatctgggaaggacacctcggaattctattagaaggtcaccacgttggtcaggatttttttggaaatggcagcccatatccaataattcttctcctcattccgggtttcacaatatcatttactgacataggtatgtttcttccatccaggtgttggtacattaattgagcagccacacaatgcctcccggccgtaatggccgaattcccgggcatatgtccggtaccgtcgactgnnnnnnnnnnnnnnnnnnnnnnnnnnnnnnnnnnncgccgcttcctcgctcatatactcgctgcgctcggtcgttcggctactaagccgctagcgccctatagtgatctataacattt

SEQ ID NO: 131737 - DNA, 642 bp, Homo Sapiens
cagttcaatagatgttgtttgtagccactaagttttggtagcaagctgttaggaagcaaaagttaactgatatactggcaaatagcagatccttcagaagtcattctgtttttcatcctcaaaagaatggaagctcagctcatttggcatggaaattgggaaatatagattgtcagccattaatgggaataatggcttataaaagtgggtaagagttaaagttattattgtcctgaattcagattaatttgtgattcaagacattctgtcactccttttaaaacctaattatagatgtcttaagtgtttctggaaaaatctgttaaattccttcagtggacttgacttttcctcttaaaatactaaagatgttggtgctgacattgtgaaggcacatactctcacataactgcaaaataatttctgagaagctggtatctgtaaggtaacttttaaaggctctgatttatttctgtggttaagaaaagaggaattattaagaaattgttggaaatgtgccgtggctaggtttttcctcctcatatttgtaggctttcatgtgaagctcccttagctcagcattggtcaaaacatgtttgttccatagtatcttgtgctaattttctagaagaacagtacatt

SEQ ID NO: 131738 - DNA, 1030 bp, Homo Sapiens
  misc_feature (387)..(405): n is a, c, g, or t
  misc_feature (450)..(978): n is a, c, g, or t
  misc_feature (992)..(992): n is a, c, g, or t
gatatttaaaaaatcattttacttattaaaactttctcatttcccaaggcacttcagtagctttcacaaaaacatgtttgttcttttttaaccaggtgaggcatatgctttaggagtaccatggtaacataatcagcaaagagaagacaattacactgaacacaaaatatcacccaataaagttacaggactaaagtgagctactctgaaagactatgaacacaatttaaatttcttttttgtaatatcctcccatgactaagtatcaagaaaggaacacacacaatgacactgtttttggcacttagagaagtgctagaggctagggctggtaaggccttgcaccagtggcagctgcagacaattgccagagtgattctgtgtttnnnnnnnnnnnnnnnnnnngcctacagccgcggccgctccaacatccctcgtgccgaattcttnnnnnnnnnnnnnnnnnnnnnnnnnnnnnnnnnnnnnnnnnnnnnnnnnnnnnnnnnnnnnnnnnnnnnnnnnnnnnnnnnnnnnnnnnnnnnnnnnnnnnnnnnnnnnnnnnnnnnnnnnnnnnnnnnnnnnnnnnnnnnnnnnnnnnnnnnnnnnnnnnnnnnnnnnnnnnnnnnnnnnnnnnnnnnnnnnnnnnnnnnnnnnnnnnnnnnnnnnnnnnnnnnnnnnnnnnnnnnnnnnnnnnnnnnnnnnnnnnnnnnnnnnnnnnnnnnnnnnnnnnnnnnnnnnnnnnnnnnnnnnnnnnnnnnnnnnnnnnnnnnnnnnnnnnnnnnnnnnnnnnnnnnnnnnnnnnnnnnnnnnnnnnnnnnnnnnnnnnnnnnnnnnnnnnnnnnnnnnnnnnnnnnnnnnnnnnnnnnnnnnnnnnnnnnnnnnnnnnnnnnnnnnnnnnnnnnnnnnnnnnnnnnnnnnnnnnnnnnnnnnnnnnnnnnnnnnnnnnnnnnnnnnnnnnnnnnnnnnnnnnnnnnnnnnagggttcccctggnagtccctctgcgctccctgttcgacctgcgctaacgga

SEQ ID NO: 131739 - DNA, 1743 bp, Homo Sapiens
  misc_feature (844)..(852): n is a, c, g, or t
tttgaatttcatatcattttatatatgattaattttttttcaaccatttaaaaatgcaaaaaccatttttaacttggggctgtacaaaaacaggcaggaagccacatttggcccacaggctatagtttgccaaacgctatcttatcttatactggtttgttaatgttttctctcccctctccctcttgctgcctagcttatggctactgcagtgtctcaatcaatatatcaaccacccaatatttattgaaagtgacaaaaataattgacttgtcaatttttatttatcaaaactttgaaagtctctcagctaacatgacttaaaaattgaggttatgaggcattttttgaaattcatatatccttactataatagtgaatcatcaagtgttgaatgtaagtgcagtagaaattatgaaatctcttgccacagaaccatacagaaaaatccgtttatcagcaacaaacattaattgcatggtgaaggatgttttgagtgtctgcgacctgatatcaaaatataaacatacagacatatttgggaggcaaaggagtgaataagaatggattatttatgttacagaaaacagcatggggtttctgtaaagagaaaaattatcctggtatatttactatagattggatttataaaaaataaattttcatgtaactttttgataacaattggatgaaactagtcgttcaggtattaaaaaggcagctgatgatgggtcatgaactaaagatacagtcccttaaaggaagtgtggttattgttgataggaattccaagttgtttatatgattggtaacttggaagacggaatacacttgagagaggacnnnnnnnnnaaataggtgatttgaaatgaaaagagattagtaatatgaaagttgtccacgtaaatgatgtgtagtaagtgaaagtaccaaataagcataaaatactcagaatccaaaaagctgacttcttttctggatgcatcactcctggcagccaaatatgacctgttacaaagaggagatttttggtccagttcttgtggttctggagacagaaacattggatgaagccatccagattgtaaataacaacccatatggaaatggaactgccatcttcaccaccatatggagccactgctcggaaatatgcccacttggtggatgttggacaggtgggagtgaatgtccccattccagtgcctttgccaatgttctcattcaccggctctcgatcctccttcaggggagacaccaatttctatggcaaacagggcatccaattctacactcagttaaagaccattacttctcagtggaaagaagaagatgctactctttcctcacctgctgttgtcatgcctaccatgggccgttagaaacaagtttgtttaagactgactccatcctgagtaatctccctttatttttgaccagcttcatttgtcagctttgctcagatcagatcgatgggattggaatacattgtaactaaaatcttcctcaggactattaacccctgcaaagtttctatagggaactgcctagtgtaacaatgaaaccagatttctcacttgctcttcatacttctattttgaggtaactgttgtaactatgaaatgcttatctgaaagtagtgcttaaacctgatttctaaaaattatcccattttctgatgatttgaaggggagaaaagccagtgtatgtaaagaaaatgttccagccaggcgcggtggctca

SEQ ID NO: 131740 - DNA, 527 bp, Homo Sapiens
  misc_feature (237)..(308): n is a, c, g, or t
atgaaagctggatcttttggggtttaagaagcccaagccttgttcctgccctggcctagggagcactcaggagggttccttggtcctcatctctcccacctccgttccctctgggccccacactagccacagcgcgggccttgtgctggagtttgagcctgggacagggagagggaggcttggagacagtctgacccagtgccctctaggccacccacttctaggcctgccctgccnnnnnnnnnnnnnnnnnnnnnnnnnnnnnnnnnnnnnnnnnnnnnnnnnnnnnnnnnnnnnnnnnnnnnnnnccttcacagcccacagcatgggcacttatgaggacaaagtgaatttaacctggaaaagaatgtatttgagagtttcttttaaataatcagcgggtgttggtgatttgtagcccttctgcccttaaatgcttccttgggcaagagctgtctgtcctccctgcaggaggctgagtgtgaagagtatcattcattgtttctctattaaattattttctctac

SEQ ID NO: 131741 - DNA, 695 bp, Homo Sapiens
ttttttttagagaaaataatttaatagagaaacaatgaatgatactcttcacactcagcctcctgcagggaggacagacagctcttgcccaaggaagcatttaagggcagaagggctacaaatcaccaacacccgctgattatttaaaagaaactctcaaatacattcttttccaggttaaattcactttgtcctcataagtgcccatgctgtgggctgtgaaggtatcagccccattgaagagatggggagacccaggcccagaaaggggaaagagcttgcccagggctccacggcggcagggcaggcctagaagtgggtggcctagagggcactgggtcagactgtctccaagcctccctctccctgtcccaggctcaaactccagcacaaggcccgcgctgtggctagtgtggggcccagagggaacggaggtgggagagatgaggaccaaggaaccctcctgagtgctccctaggccagggcaggaacaaggcttgggcttcttaaaccccaaaagatccagctttcatgcttgagggattaacctaaagtaccaagatggcgggcaggtgtgagttcccagaaagactggtgggttctgtggggctgagtgcatactgtggggagggtggtccctgaggggtgttggagtgcccattccagtgcaaagaggagctgagttggcggccgca

SEQ ID NO: 131742 - DNA, 1511 bp, Homo Sapiens
  misc_feature (1240)..(1252): n is a, c, g, or t
cgctcgtctcccttgggtctgctgctcgtgtgttgtactgtcacaaacgtctcgtgtatggtgtaggttgttcacccggtcccacaccccccgcatccaccccccgggtctgcacactctcaggcgctcacaccggtgtatattcccaccaccatgtgtgtgtttctcccctttagttaattttatacaggagcaagcacaacaccatgacaccctgactacctatcccacgtgtcgtctgctcttgtccccgccctccccgcccattgaatgcctgttcctttctgttttgtttaaccccatttgatcgcgccggagcgcccccggctcttcgagcagctggggtggcggcgggtgtgggtagggggcgcgcgcgggtgggccgccccccccatgtattttgttgtgtcccccgtgtttaggtggtcacacccctgttcccgcctgtggtcccccgcgcccgggggtgcgaggggcagaacgaaggagaggccgacccctccacgcaggacacgggaccatcgtgatcgtgtatgtcgtgttgtgcgggcgaggcctctgtcggctgtcgcctattagatgcgagccgtgacgacccttccagaccccgagcttgagatgccatctccatcctgtcaaatcaggaaaagctctgaacatgccctccagcctaacgatgcagcagatgaaactgtcaaagtcgatgttcatgtgtttgtctgcgtaccgcatggtaatgatgtcatagagctggttgttgaggtggaatcctgcgtcgttgactgcatttcgcatctcgtagctgttgatggtgccggactggtctgtgtcatagtgtttgaaaattttgctgccaggccttaatcttgttccagaggtggtggaactcctgcaggttgagctttccagagccatctgtatccatgagcgcaatcatgctacggcaggactccagtgtgaacccgtgtgtcttcaggtccttgtgtttgttcacgactgtgttaaggaccttcttgagctcatctgcacagatctccatgtcatctcctgctatctgcttgaaaatgttccggaattgttgctgttcctcactttcctgatcagagctgccaggctgtggctgtggggactgcttttgcttatcagggcttgttttgcctttgccctcctctgactcctggtccacacccagctccttgttgctgtttgctctgtccgaaacgaagatgatgggcttggnnnnnnnnnnnnncactggccgatccacggagatggtattttcaacttcctcagagaggttcctcttttcagagaagacccggaggatgaattccccctcctggtggggctcgtaggtggagggcacgatgacgtactcgctgggaggcaggcggaagcgctcgggacacctcccgcatgttgatgtaggttttgctcctggccttggaggcgttgtacaggaagaagtccttctgcaggtgctgcttgttcccgtgcatctgagagatggg

SEQ ID NO: 131743 - DNA, 1442 bp, Homo Sapiens
  misc_feature (58)..(81): n is a, c, g, or t
  misc_feature (1295)..(1307): n is a, c, g, or t
gtgcaagctaaaattaccctcactaaagggaataagcttgcggccgcatacgcgggcnnnnnnnnnnnnnnnnnnnnnnnnccagccatacacatgcctttatttagatcagcttttttcaaaatgcagccaaacttatgagttggacagcccaaagtaaccagccctattccactgagttagtttaccccacagcagtagaacccagtgctggtttggttcctggcccatggtgggacagcgtgaaggtgatggagggctctagcacaaggaggtgctgagtgccaccggcaggtgcttctgcagacagcctagagcaaggtaagcaggagcactcgcttcagaaccgaggcggctcggaccagaggcaggcactttcctccacatggcaaagggacaagggtttgttcttcctacctcattgctttactaaagggtcaggctaggcatgaccgatcaaggatgggtagggggtaaaatggaggaggaacatgactgatgaggtgcctggaagcctgtaggggtgtagctgctgggtcctttgaggtaaatggctttggaaatagagggtgaaactgaaatcctgagtgatcctgcatggctttggatgaggccagcctggttcaggcatacatggtgagctgcagccactccagaacgttgagcttgatgataccatctccatccttgtcaaatgcatgaaaagctctgaacatgccctccagcctaacgaagcagcagatgaaactgtcaaagtcgatgttcatgtgtttgtctgcgtaccgcatggtaatgatgtcatagagctggttgttgaggtggaatcctgcgtcgttgactgcatttcgcatctcgtagctgttgatggtgccggactggtctgtgtcatagtgtttgaaaattttctggcaggccttaatcttgttccagaggtggtggaactcctgcaggttgagctttccagagccatctgtatccatgagcgcaatcatgctacggcaggactccagtgtgaacccgtgtgtcttcaggtccttgtgtttgttcacgactgtgttaaggaccttcttgagctcatctgcacagatctccatgtcatctcctgctatctgcttgaaaatgttccggaattgttgctgttcctcactttcctgatcagaactgccaggctgtggctgtggggactgcttttgcttatcagggcttgttttgcctttgccctcctctgactcctggtccacacccagctccttgttgctgtttgctctgtccgaaacgaagatgatgggcttggnnnnnnnnnnnnngtgacgtgccagctcccataagcttttgggtttgcaggtcctgatcaatactgcacaccgatgaccagcatccagatgaccagaacagatccccacacacctaccactaaaaccaatcgcctgtggtcattcccc

SEQ ID NO: 131744 - DNA, 745 bp, Homo Sapiens
  misc_feature (50)..(50): n is a, c, g, or t
  misc_feature (164)..(258): n is a, c, g, or t
  misc_feature (508)..(516): n is a, c, g, or t
aaaatatttttcttatgtatgctgtcgtatcgtaggcgtttatattatanaattctgttagtagtcgtaaaattgaattgtggaaccactaatccttaaaagttagtctggttatttttcatatagaagtaagtttaatccgagtgtggtggtgttcacctttnnnnnnnnnnnnnnnnnnnnnnnnnnnnnnnnnnnnnnnnnnnnnnnnnnnnnnnnnnnnnnnnnnnnnnnnnnnnnnnnnnnnnnnnnnnnnnnaccccaaaaaagtaagtttaggattagaatatagctaggtccaatgttaaatacattttcctggagtacatttgtcacattcagctttgagccactgtaagcatgttactattaaatggttggttattttatatagcatattctttatcttggatattttatgaataaagtatagttattttaagtgccaattaatttatcagactaaatagaaaatatttgagccattactgaattcacatatgtatgnnnnnnnnnactatttaaaatacccaacatgtattatgaaatacctcaaaagtaatttagttacattcttaaacaatgacattgtcgaaagaaagttcttataagctgttttttgcatttttataacttggttatactatattctgtttccaagtaaccttttaactaaaagatttgttgggttttagatctcttttcatttgtcaaccttttcagtaaagccctctgttacatcaaa

SEQ ID NO: 131745 - DNA, 1381 bp, Homo Sapiens
  misc_feature (936)..(991): n is a, c, g, or t
  misc_feature (1257)..(1291): n is a, c, g, or t
tttctgtaaagcaaatatatttattatgcactttcatatacacagggattttttgagtaatatcatacaagggataaaataaaacttttacaatgtgaaattcaatgtacatttttggctatttacatacctcaaaccaagggaaaaataaaaagaaagcatttgtttgcaactacatttgctgagaagtgtaaatggaggacattaagcaaaacaaatatttgcatagccaaaacaatattgagaaaagtatttacttctgttttttaagtatcaaactatttttggtgagaattccagtgagggtgggggtgaaaacaaagaacaaaaattattggctgtactttgcagtacgcactgatttcaggtcatttttccttccaaaacctttcttagaaacattcagatttttatttcattactgtatttttatcactttccttattataaactcatgatatttagggaatagacacagacggaatgttataaaaatgttataagcacatgccatcatagttgtgtagtggcaacagctgatttataaaatttaaagattttaatttcaaaaatatctattaaggagttttatatttggaggacaatttttactttttaatggagcagaagccattttcatttatagtattaaatcccccacagaaacaaataagcaaggcagggcatctccagcacccatcctatcatccttatcctaactcaaagtcatttatgttctattccaaaacataatttatataaaaacatcccgaggaatacttacttttgaaaatcgtatttttccaataggttctcttcctaccaattgcttcaagtgtatatagtatggatatgaaaacagttagctctttgaaaaacataaatcccttatgcaatgtcatatcttcgccctttggacacaaggtgcaattttgnnnnnnnnnnnnnnnnnnnnnnnnnnnnnnnnnnnnnnnnnnnnnnnnnnnnnnnnctggcagctttcagggttctctttctaaagaaaattacatgtaatagaaattagagcttcatcctctacagtaatgtaaatgtactgtatttgagatatgagtaaagttggttctaataatagtatgtgttcatatttattaatagactcattaacacttttaaggctactttgcaagagtcccattaattttatttaataaatgtcccatagggcccggccgtaatggccgaattcccgggcatatgtccggtaccgtcgactgnnnnnnnnnnnnnnnnnnnnnnnnnnnnnnnnnnncggccgcttcctcgctcatctactccgctgcgctcggtcgttcgactgtagcaggaggcgccatatgaggtagatagtctttcaaaacgg

SEQ ID NO: 131746 - DNA, 677 bp, Homo Sapiens
gttttgttttttgcagtaattctctttctgatacagttaccctgaagaataataatgctttgtttcttttctggtatatgagagaacatgtgagggagtagctcagttttttaaacatctaatttataattaaatataaaagtaatgaaggtagtcctggcacacatttttgaaacttttatcacttttctctacatttagtatgactattttattccacaagatagcatttgactaattcataatgcttaagtcataagatggtggctggcattttttaatttattactaaaagctaagatatttgcattatattgtgcaaatttcacagaacaatgttgcattttctgagataaggctctaattttttaaatagtgctacatttagttgaaagtttcagtcagctagttagctgagttgaatgaaaaatatagaactgtatgtacatttatcaaatgataaaatatgttcatttttgtaagaaatcagaaaaattaagacgcaatggtgaagaacattagtacataaatatagcagaacattctccataaaatattctgttttcattctgctttgttatttttatccagttatgtttaatttttcaagggtgagagattatgtatagtactgtaccaattaaccttccacttttatacaataaataattcttact

SEQ ID NO: 131747 - DNA, 1621 bp, Homo Sapiens
tttttggctttcctcacttctcaggctttattgggctttatttgtgggagaagggggctggtccccagtttttgcagtgcaaagccagagcgccacctgctggtagccctcaggtgtaggttcgaagctgctggggccccctggggtttgggacacaggagaatttcaggctgtgagtggagacagttactgccacgattccacaggcaagttgttcacctcaaagatctcctgcaccgactggtgaaagtggtcgtaggtgaggcgcagctttagccgcaggggggccttgttaggattgaggattctgaagagctgggtgataggaaggccaccccgagctggaactgtgttcccactgggggcctgcagctgcagctggagactcttgggcacagcagcctggcagatgaaatgggtgacatcaccctctgagaagttggtggcagtgatggtgattaacagcaaagcagggttttcagggggtcgaatgaaagacagattcagctgtactccctcacgctcaaacactttgagatctgggatgggagctgggggtggaggtacacagggaaggtcaagcaggtgtaccagggcacctcctggggaggggtccagatggggaggatgctggacatccccagaagccccatccaggagatctagcagatccaggagctgtgaggcctggggctctgtgggcactggggctgcttctgaaagctgggctgcttctttgctttcctttgcttcctcatcagcctgagggccatctcgctccacaagaggcattttttccaggatggcagccctcatgtggtcgtatttccggaagagtgtgtcatactccacagcccgctgctgcagctccacgtccaagcagctcccgtagatggacaccacctggcggatgcggttgttgtccccacagaggcgagtgctgagcttcatgagggctgtgagggcatatcctcgagtggctggcagggacatgtgggactgcagcaccttttccagcaatgccagcacttcctcttcgtccacctgaaggggctcaatctcctcgcagttccctgccagcaggaggtccccatactccccaatgcaccaggctgccacctgcaccagtggttgctgggaaatgtcttctgccagggcattgtagaggcggcgcacagagtaggcatgtagctcctgggcccccccaatcagctgggtcaggttggccactgcatcatcccgcacatgggtgcccgccgttgtcagcacatgcaggatggtgtctatgtgccagcgtttggttggagcaaacctctctgcagccagcaggatgcctgaggcacagtcagcccgtaggtcaggagggcaggactccagaaaggcctgcagctcttgcatcatggctcgcacattggagctatttaccagagccaggcttagttccagggctctccggctgagggaggcatcagtttcccgtagacattccaccacagtgggccgatgccgctgcacagcactgtgatcagactgcaccagtcgaagcagtgatgtcagggctcctcgtgccgaattcgccacccaggcctcgctaccttaaaccgttatagttactggccgt

SEQ ID NO: 131748 - DNA, 726 bp, Homo Sapiens
  misc_feature (714)..(714): n is a, c, g, or t
ggaaggaaatcgtctcaattgtttattcgactcacagtcagtgcacacactctaccatccaaaagtcgaagctgtgacaatcgactgctacaggcagtgcatggatgtgtaaacaaacacaaatgaaaatgcaaatcagagtgggcggggccaaggcccactgttacattcacagcacagggtaagtgcaaaagaacaggatgtcaggatggggggcggggagcacagggtccttcctgccctggaggctgcctccaggcatcagcctgggaggtgggttagtgcccatggaaccctcctgcccaggaagctgcctccgggcatcagcctgggaggcgggttagtgcccatggatccggtgtctgggaaggggcccacagaagatgggccacacccagcatcatctcctctctgtggtgcgccctcccatccccagacccctttcccattcaggggagaggggccctggtcacaggagccagtcctctgacctcctgagtgtggaaacccaggaggggagtgtgtttctcctgcaggcctctcaacctggaaagggcagagccacagcagaacgcgttggggccacagacactcgctcaggtgaagacactgagaagacactgccgggctgacaggaccccgcggcggggggacgtcgctgctaacaggactctctgcaggcccaggggaggctctgcccccatgaggccccangagcgtttgtgc

SEQ ID NO: 131749 - DNA, 466 bp, Homo Sapiens
  misc_feature (186)..(203): n is a, c, g, or t
tttttttcattcataattattttattatgaaaatctaaagtataatgactttttagaaaacataacagcaatctcattaccacactaaaattagataattccttaatacagtcggtgtcagtttttctgattgcctcatacaaatttggttcatatatttcttcagccttttaaaatgtatagctnnnnnnnnnnnnnnnnnntgaattgttgctgaagaaatggagttgtttatctagtagaagtttccatattctggatcttgttggttgcatccctgtgatgtcattcactgtgggatttgttagttggactccagaaaataacaataacacaaattgttaacacctatcgactacttactatgtgccagtctgtgcatgaagtgcttcatttgtaataaaatgtttaattcttcaagtccctattttaaatgtggtaggtacaaacctgacatatttcattt

SEQ ID NO: 131750 - DNA, 1671 bp, Homo Sapiens
  misc_feature (40)..(40): n is a, c, g, or t
  misc_feature (112)..(112): n is a, c, g, or t
  misc_feature (157)..(157): n is a, c, g, or t
  misc_feature (163)..(163): n is a, c, g, or t
  misc_feature (166)..(166): n is a, c, g, or t
  misc_feature (172)..(172): n is a, c, g, or t
  misc_feature (174)..(174): n is a, c, g, or t
  misc_feature (177)..(177): n is a, c, g, or t
  misc_feature (190)..(190): n is a, c, g, or t
  misc_feature (201)..(202): n is a, c, g, or t
  misc_feature (209)..(209): n is a, c, g, or t
  misc_feature (227)..(228): n is a, c, g, or t
  misc_feature (231)..(231): n is a, c, g, or t
  misc_feature (251)..(252): n is a, c, g, or t
  misc_feature (316)..(316): n is a, c, g, or t
  misc_feature (326)..(326): n is a, c, g, or t
  misc_feature (336)..(336): n is a, c, g, or t
  misc_feature (345)..(345): n is a, c, g, or t
  misc_feature (425)..(425): n is a, c, g, or t
ccatagttgatagtcatcatagcacccagctacactatgntcggtctatgtgtgtgatgtgacgatacattcacacaggaacagcttgcatgatacgaattatcgactcatntaggaattgccctcgagccagaaatcggcacgagcttatacatcntttcanctncagtcncntgntgccttgacttgncaccaacatcnnaagctcnccttgacggacgctacgnntangggcgggcccctagctgctnnggttctgggtggcacgcttgacccattgccgtcccagccacagtggtgcagaggtcagccctcntgcagctagnccagggcacnttgttagcnccatgggggacgactgccagcctgggaaacgaagaggagtcagccagcattcacacctttctgaccaagcaggcgctggngacaggtgaccccgcagcagcaccagcccctttgggccccatgtggcacagagtggaagcatctccttccctactccccactgggccttgcttacagaagaggcaatggctcagaccagctcccgcatccctgtagttgcctccctggcccatgagtgaggatgcagtgctggtttctgtccacctacacctagagctgtccccatctcctccaaggggtcagactgctagccacctcagaggctccaagggcccagttcccaggcccaggacaggaatcaaccctgtgctagctgagttcacctgcaccgagaccagcccctagccaagattctactcctggggtcaagggctgggtagcccccagccagccccctcctatggatagacagaccagtgagcccaagtggacaagtttggggccccccagggaccagaaacagagcctttgcaggacacagcagatgggcacctgggaccccctccacccagggccctgccccagacgggcagaggcccgacccaagggagaagccagccccttgtgccagacctgagtggcagaaagcaaaaagttcctttgctgctttaatttttaaattttcttacaaaaatttaggtgtttaccaatagtcttattttggcttatttttaatgctttttctcagtgtttttcttctgtttctgagtcacgaacagcaggcactgaaagcagtcccccagccactgccgaaggtcagtcccggaggtgctgcccaggctccaggcagatgcggcagccccggccacagccagcatgggctggagaaaggctctctactgcacaggggcctcacgtgactgcagggctctggggaggtggggcacctgtagcctgacccccaccttgctgcttccaaagcttccttgcccagggctgagccttgtggggcaccccccacactgtggtctgcctgcctgcagggtgcccagggagaccctccgcctttagaagtccaagttctttcccagccccctccctgcctagctgcctgcccctggcgccagacctggcccgcaccactggggcactgtgttcccaggggcaccctcctatcccaccagccccaaagcccagccaggcacccttccctgccacctccctgggccctgccccagcagcccagtcggcctcctcgggccttctgtcactcgctcacacacagcaccatgtcagtaaacagctaactcaggcctagggagttag

SEQ ID NO: 131751 - DNA, 662 bp, Homo Sapiens
tggaaggaggcctctggtttggccttggctaggcctctgagactgccgagggtctggcggcccctgtgggggtcctgggtgctgcttgaggatacagactgggaatcagaccccatggccaatttccccagactctttaacacctggaattccttggtttgcaatttaaaggagtcatagtaactccctttcttcttttccttccacacacagatgactgcaaacagaagaaagaccaggacgcagcagctgaactttttcttcaggttggtgtgaatcataatgaagatgtgttcagggaagtcactttgttctgagcaggaaaacaagcctgcttctggctaatcccccaggggcggcaggcccttcaggtcctcaggaattagcactattatccatgggagggaaggtttattgggtctgcaggccaaggcccatttttctcaggatgatcaaaactcatctcagcacggggatggacacctggcaccagggcttgggacaggctcaagggggccagtccatttcagctgggctccatgacattcaccacttctccctggactgctggttgcagggctctgcgcaactggctctccccttgctcgctgcactctcggccgcggaggctgcggttgctcagcacgctcggtggcggccgc

SEQ ID NO: 131752 - DNA, 541 bp, Homo Sapiens
  misc_feature (44)..(44): n is a, c, g, or t
agagctcccttgcagagcagaggaggtatacttaagcattcacntgaatccggtgcagtcttacctggaggataaatgtattcccttgggaattcaaatttcaccagcaactgagaaaatacaactcccatcaagattccaaagacctgctctgacaaagcagaagcctctttggccaccaattgaccttgcctcccaacgggctgaggctgaagcagatggtttgactgaaccagaaacaactaactgctccttctttcctgagaaggccctctgcctcctgcccctgcaaaaaaggcattgtgtcctctcttcctcaggctgggcttcagggggtcttacctcagcacggggatggacacctggcaccagggcttgggacaggctcaagggggccagtccatttcagctgggctccatgacattcaccacttctccctggactgctggttgcagggctctgcgcaactggctctccccttgctcgctgcactctcggccgcggaggctgcggttgctcagcacgctcggtggcggccgc

SEQ ID NO: 131753 - DNA, 1288 bp, Homo Sapiens
  misc_feature (84)..(99): n is a, c, g, or t
  misc_feature (111)..(111): n is a, c, g, or t
  misc_feature (113)..(114): n is a, c, g, or t
  misc_feature (117)..(117): n is a, c, g, or t
  misc_feature (123)..(218): n is a, c, g, or t
  misc_feature (231)..(242): n is a, c, g, or t
  misc_feature (245)..(245): n is a, c, g, or t
  misc_feature (247)..(249): n is a, c, g, or t
  misc_feature (252)..(252): n is a, c, g, or t
  misc_feature (255)..(256): n is a, c, g, or t
  misc_feature (1089)..(1089): n is a, c, g, or t
  misc_feature (1094)..(1094): n is a, c, g, or t
  misc_feature (1116)..(1116): n is a, c, g, or t
  misc_feature (1129)..(1129): n is a, c, g, or t
  misc_feature (1131)..(1131): n is a, c, g, or t
  misc_feature (1136)..(1136): n is a, c, g, or t
  misc_feature (1170)..(1170): n is a, c, g, or t
  misc_feature (1221)..(1222): n is a, c, g, or t
  misc_feature (1254)..(1255): n is a, c, g, or t
gggggaacaaagtatagcccccttttcctttttccttgtggggggccgccgcccccaaaagaaggttttttaaaaacttttttnnnnnnnnnnnnnnnnccccccattttngnnttnttgttnnnnnnnnnnnnnnnnnnnnnnnnnnnnnnnnnnnnnnnnnnnnnnnnnnnnnnnnnnnnnnnnnnnnnnnnnnnnnnnnnnnnnnnnnnnnnnnntgttttgtgtggnnnnnnnnnnnngtngnnngtnttnnttttccaacacagcactattttgggtttttattttgttgatgttggttaaatcttatctctttttttatacacaatacttcatgtacctatgaaataaaacaggtagggaatatgtccagtgcaaacagaggactcacacctgtgcatagacagcaccatccactgattgtcgctgcagtccacggcgttactaagcctgcgccacccacgtgctgccccaggaggcgctaccaggctcttcgggccacaggcctctcctccactgcatgtggcggcagggcgggtaggtcgcagggctccatgattgtggggcagcttcaagggcacatggggcagaggccctcgaaggtcccctcctcagtaggggatgtcattctgatagtactggatcatgttgtaggtccggctcctgttgctgaggaagcagctctggatgaccttcatgatgaaatttgcagcctcgcgctcagtcatgttggggctaaacctgtgcttcaagagcttgattgtctggccgcgaaaacagggcaggcccgtgtccaacatgagagtgaccagggagacgaccgcgtccatgtagggccgcacagccaggtagcctcggacacacatctccatgaaccacttgaagggtgtggcctccatcttgccccccatgatcatcaccatctcatccgtcagcttgatgtcgggttcccagccgagattgccgcccggcgagctttcaaacatgaagccaaagtcgatgtggatgatatggcccttcttgtccagcataatgttgccgttgtgtctgtccttgatctgcagcaagaacagcaggaggctgtangcggncatgcttcggatgaagttgtancgggcctgctggnanggcanagtggactcatccccgtactggcgtgtgaagtantcgtacatgccgaagtctgtctggcggcccaactggtcccgggaggtgcanntcgggatgcctcgatcacccgcaccagggganntggcacacgcggtagggaaaacaagaggtcagc

SEQ ID NO: 131754 - DNA, 471 bp, Homo Sapiens
caggcccgctacaacttcatcagaagcatggccgcctacagcatcctgctgttcctgctgcagatcaaggacagacacaacggcaacattatgctggacaagaagggccatatcatccacatcggtcagccagccacagcgccaccctcctctcccttcaccccggcacccaggggtggatagggatccccaccccacagagaggagaatgcccaggaccaccctgccaggagtgtcagggtccagctctgaggtccgaactgtcggccaccaagctgttctgctgtagagggtgcctgccccggccccagggagctgggcgagagccgccattgctctgagtcagaagctggagctgggcggagtggggctcgtccaggttcagtgccccagcttggctccttcctccacttcctcccttctctttctctgcctgctgccccaccacccaccccatcactgtctcccccc

SEQ ID NO: 131755 - DNA, 1357 bp, Homo Sapiens
  misc_feature (1241)..(1275): n is a, c, g, or t
aggtgatagcaacattattttcaaacacattgattgaaaattctagtccagataacagaataggagtggtacttgtggtctccagatatattccactgtcagacaaaaatacttttcttcattgaagtacgcattatgtaacactgtgtatcagatgaccttagccatagagttggtctttagagcttcttcttttggtcaacaaagccatccattgcatgaaggatgcccaaatagtcagctataagcagtcctgtcttgaggggcaaaaagcttttaagaaacatcatgaagtataacaactttggcatatacaagtacattttttcttgtagaatagcttctactattttttcaactgcatattttggttccagaattggcaacagagaaggacagcctgtagtacaaccttcaaacattccagtttttataaaaaaggggcacacaatcgtggttttgatccccttttgtttttggacaaatgtttctacaaatacagattcagcaaacccaaaggctgcaaatttacttgcacagtaatctgccagcccatttactccacttaatccagctgaacttgaaatgcaaaccaaatgtccatggtcattagcaatcatagcaggtagaaaggctttataagtccataaatgtgctttgaaattcacatcaaatgacttttccataagctcatctggacagtcaaggaactttttgcctgttacgattccggcattgttgattaggatggaaacatcgccgacttcttttttaacctggtcggctactctatacactccttccttttggctgcaatcgcaggtataggcgtgcactcttgtggctccagcttcccgagccatcttacatgtttcctcattcccctccttattgatatcccagagaacaagaacagatcccagccgggcaaactgcaaggctaagagccttccgagtccacttccagcacctgtgatgaggactatttcaccagcaacgttcttccgtggctttgggagtaaggcaaaaatcatagcctccagaagactaaacagtgattttcctaagaaaatgaacagtttctttgatgattgcaggttgaaagacatgttctggctgacacccaggacactctccctagctgtccgcggagaagccggcctcgtctgccccaggcacccgagtccctccccggccgtaatggccgaattcccgggcatatgtccggtaccgtcgactgnnnnnnnnnnnnnnnnnnnnnnnnnnnnnnnnnnncggccgcttcctcgctcactactcgctgcgctcgtcgttcggctgcagaccgagctagcgccctatatgatgtatacaattt

SEQ ID NO: 131756 - DNA, 1193 bp, Homo Sapiens
ttctcatggaaagtttcgtttatacggagacatgaaggttgagcattattacacaggtactcgcagagctatgctctgcacacagagccagggctggctgggcgagagggctctgattggagacaggtgccttggggagagttgaggaacgacttccttccaggcggggcctggggacttggtctgcctgtgtctttggtctagaatttggtctgagaatcttataagaagaggccttcctcaggccatgtccagaatgttgcaatttgcctaccaacccaaaatactgtggcctttcacccagggagcccccgctggggagatggaaactgaaatgaccacaaatgcccaggtagccactgcgtgccaagtcccctcttccccacgtgccacctgccctcaatcattgacagtggttagtttactaaagttatataagacaaaggaaaacaggtcacaatgctactccataaaatcagggaaaaaacagtaaaatcaaatcagacacaaacggcaaccataaatacatagaaaaacaggaacaagatagaatcgttgagagtttggaataggactgggtgttgtttggcagagtagatagctttggaaacagtgaaatatgtatgcctgccaaagatggggttcagaattgccccttgggagggggacaccaaaggcatactcctcctcccaaatttaagaagggggtttccagagttccaagagcccctgctgtgaaaattctgcggtctgcacccctcgaggcagtgactgcctttgtgcgtggtcacgtttcggtttcatttagactgagcttggaagtgactgttcaaatggcacagtttaggtccaaataggggctgggtgggggtgtgtctgccctggggatttgaaaggtatagtacctgtctctcctggattcagagacaacctctgctccacataaggcccttgatcaagaccagttgctggggggccaggaccctgacaatccctaaccttctagaaaactctcctaggccttctcttttgggtccccaggtggtaaatgtcgtgtaaagcccagctattgcaggggttttgaagcggacgcgtgggcgacgcgtggcggacgcgtgggtcgacgatatcccgggatatccggaccagtaccagcctgctttttttaaccgcgggtctatagtcaccatgcc

SEQ ID NO: 131757 - DNA, 2109 bp, Homo Sapiens
  misc_feature (1799)..(1799): n is a, c, g, or t
  misc_feature (1816)..(1824): n is a, c, g, or t
  misc_feature (1861)..(1861): n is a, c, g, or t
  misc_feature (1924)..(1924): n is a, c, g, or t
  misc_feature (1929)..(1929): n is a, c, g, or t
  misc_feature (1932)..(1932): n is a, c, g, or t
  misc_feature (1946)..(1946): n is a, c, g, or t
  misc_feature (1952)..(1952): n is a, c, g, or t
  misc_feature (1965)..(1965): n is a, c, g, or t
  misc_feature (2058)..(2059): n is a, c, g, or t
tttaccatgattctcattgagtttttaaggcacccaaataattgaagcctaagatatattaagacaagttaaaattcccaaaacctttgaagacttttaaagaagctattactttcctgggtagggtcagctttcctgccatggccccgttgaatgcagtcattgtcagcttcataactcagtgggctgatcatgtgtgtgctgatctagaaaattataacgtactagaatacaggtctgtcatttctattgcctcaatttcccaataacagaaactctgggctatgtcctctttttagctttaagtcaaattttctttaaaaagcaccctttcaattttcatttaagaaaatgcaatcttgaattatggtactagggcttcaggcagagcagtaaagagtcatcttcattgttttagaattttttggtggaataatttttattatttagttatgaggcagggctgtaatggtgaaatcttttagttttatctgattccacaaatattttctactaagaaaatactactaaaatacaaattaaggctacttagtaaatgcctcaggatggccaaaaattgtaagaaagaaaacctttggatgatacatcctgtctacatttctgctactggtctcctgcttttatgattctccttgacaaaatccacgtgacagtaattttgtgtaaccttttgaaagatgaatttgtcaaaaggctaggatgtagatgacacttgctgtttaacgcctttttgctgttagttctatacagaagtacgaagtggaggtatgtcatccataggaatgccatcacgtgcattttcttcactttctggcatggctgaatcattcaaagttggattgtagtagctagaattcccaaaactcacatcataaggttccggtgcattgtctaatcgcagaactttttgggtttctgtcgtctttggaaagagttttgacttattggtgaattttaaggtaggctgtagatttgttttttcttgataaggggtagcccacatgtgtaagctatgagtgtttgtggttagcacctccacttggttccgactatctaggggttcactgtatttctattttctttttggggatctgacgtatttggaaagagttttgaattattggtgaattttaaggtaggctgtagagttgttttttcttgataaggggtaaacccagtgaagctatcactgtttgtggtaagccatccacttggttccactatcaagggggtcacagatggagaagttggttctgaagagaggatgctaactgtaatggaactgttatcaggagttttcacggtgtcattgaccaaagaccaagtgaagttttctgaagacagagcaggtgtagcattgggatgtgctgagatgggcaaaagatcttcatctgctataggtgcattccaaggcactttagaaacaaagctatggatcaagggagggcttgtggaaatggtagatgtgggttttagactgcccaaagaatgctctgctgatgagttactggagaaatctgttattccgtggctgttgttgggtagattcaaaggaggggaatgactcgccttgagatttgaggtggttatattttctttatctgagtttaagtttgcttcactttccaaagaaataggtttattttccattgttttaaaaacttctgcaatgttctgtgttgtgtttatgtcttgattttcttttccatggctccccgatagaagtgaataaaacaacgttgacatcaacagaattttggctaaggccaacattgtangcttcttttggtatggnnnnnnnnnacaggaataacaaatccttgatgtggcacgatagatngtattatgccaattttgcagatgaagaaactgaagctcacaatggctagtaacagagctcaangctangangtattacactcgtngcgaantctggctcgaggncaattcctataggagtcgataatcgtatcagtatagctgttctgtgtgaatgtatcgctcaaatcaacacaacagcggagataagtgaagcgnnggctatgagtgacatcaaatatgctgcgcatgcgcttcagtcgaacgtcg

SEQ ID NO: 131758 - DNA, 666 bp, Homo Sapiens
  misc_feature (18)..(35): n is a, c, g, or t
  misc_feature (563)..(563): n is a, c, g, or t
gatgacaatcctattcannnnnnnnnnnnnnnnnnggtgaagggttttctcagcagccagttaccacatggagcatttcacagtttcaaagaagttttcctcattttaaaactgcaagaaaatgctacacttgatggtagttcctaaaaaaatagttcaatcaaccttctagaatttttgtaatataacttcaagtatgtaatgatttaattaacacaatactcttaataaacaacagcaacaacaaacccaagtgctagctcatttctggtgccatgagacataatagcaccacttgtttttctattttagtggttaaaatgtatgcaattttagcacccatctacaaaagttagatgttaataaaaatatggtattacttggcttactaggaagtaacagtcttaatatccccttaagagaagaaatctgtttcatttgctgcatcctgggtcatggaaaagaatagtatgaaagggggaaacaaagaacagccttttaggtaaggcttttcagtacctgaatcactgaaagtattgaagtcatgttccttggaagagtanaattataccacacataggaggttccaaggagttatgttgttatacactgtatgtcaggatagaccacatttacaatgctgaacatggcttagcagccttaaat

SEQ ID NO: 131759 - DNA, 598 bp, Homo Sapiens
  misc_feature (343)..(343): n is a, c, g, or t
  misc_feature (348)..(348): n is a, c, g, or t
  misc_feature (350)..(350): n is a, c, g, or t
  misc_feature (371)..(371): n is a, c, g, or t
  misc_feature (387)..(387): n is a, c, g, or t
ttttttaaagataaaattaatttatttgacttcacaacttcatgggccacacaggggccccacagtcctagaagcacagcctgtggcagtgggctggggaggccagttctctggactgcctgctcccttgtccagagctgccttgagccaggtccctcctgaccccatcatcctgttcccatatgcaagggctgctcaggtccacctgcaataaacccaggcctgcctctggcagcaaggacagggcctcgtgggtggcagcagcactggtcctcgtggctgtgggtgtgggtgggtgggtaggtaggtgggaagggagggcaggcaggagggtgtggttcantgcananagctgctgttctgctcttcanaggccatcttgcccanaagctggctgtccaactccaccccacttacaggcagctggaacaagttcatttcagctgctaaggctgccatggcagaagggtcctggccaaactgagctcgcaacatcatgtccattttctccagcctcctcttgagccgcttggcctctcgctctcggatgacccgggccggccgcttttccggggtttcattggcccgcttcagcctc

SEQ ID NO: 131760 - DNA, 905 bp, Homo Sapiens
  misc_feature (852)..(862): n is a, c, g, or t
tgaatggttttctaacaacttgaagcacaggatcaaggaattagggtggtctacttgaggcagatgggatagtagctgggaactgttccctttctgattaatttcagcagcatcggaatatatttggagcacaccctagtaacctcttgagattaaattacatagtcttaatatttctgttcctccatgcaactgatgtttgttttttaaagggtaagatgctgcctcccaatgggtgatgccatctgactggtttccccatgtcctcccattcacccatctctgctcccacccttgcctgcctctaacccaccactggccagcccccttgccctactctgggctgctgaacactggtgctgtggtggttttcaaggttaattcctaggctaaccgtatggcctatagtttaaaagcacatctatgttcactgccactctgaaaaagggaattatttctcagtctttcaaggcttgagactaatataggccattgtgattcaggaagaaacccaaggttggagggtgggatgagtaccctctgaaaaagggaatttgctggtgaaaagaggctggatcttgtggaagactgtcttggatggggaagtactacctggagatttcaaattcacttggcctgcaaacaacagagttatccgtatcttccacatgtgaatgtcattgcaagggtgactctagacaaactacaaaccgatggaccgtcaagctccccaggagccccttggatggcagcgttgcttcagagtgttacctgtttctggaattccttgttagggaactttaaagaagaaaagaaaaacttgaattgtgttgaattactgtatcttttacnnnnnnnnnnngaaaagataaacttgtaaatagagtgatttgaaatactaaaaa

SEQ ID NO: 131761 - DNA, 734 bp, Homo Sapiens
aatgtgggtatttaatatgatttcagacaccactgattcaattaaaaggggtgtctcagttcaaatgtaaaaatgatcttttgtaaaatcagcatagaatgattttgagaaataggtaggggatagatgaggcttagaataagtcactccagtgaaattagggtagaaaatgttcatttaaggattatcacttccactacactgaggcctctgaaaatgttcacaaatttctcaaaagcagcagggggtacacaattttttaccacaacacaaagcaaaaacagatcttgccatttgttgtcatctctgctgagtgctaatagtgggggttcaaagttttccatttgtttaaatgctgctttgaagtttccatgaagaattacagtttggtgacactttttatccaaggtacaaaggctgagactttggtataaacaccaggagaatccttgactccacagccatacccccaggaggtcaccccatacaccacccagctctctccgggccgttcacacatgagtggtcctccgctgtctccctggcagctgtccacgcgtttgtgttcatggaggtttccagcacaaagcattctccctgtaaaccgacccttataacgttcttcacaaaaccttttaggaagtaagggaatggctgcttgttgtagtgttcttgaataggctcgtcctgtgtcaccccatcctgttatgtaacagttggatgctgttttctgt

SEQ ID NO: 131762 - DNA, 632 bp, Homo Sapiens
  misc_feature (531)..(543): n is a, c, g, or t
acccttcaaatactgagatgtttattgcattttaaaaatatccacactcttaaatatcctgtttcaaattcctcctaaaatcctttacagcacacaacatcaactactgcagtagcgttctcacaatattacacttgaaaataccatttaggaacaatattttaggaaatagagggtttaaggcaagacattcatttggaaaagttaatttctctctatcatccagattgacacgattatttttccacctcttcagtgccttgggatacgcaacatacattcagcaacagggcacgcgtgtgaccctacggacaagtgctgaggttgggagtgcccactgaaatatggaaatattcttacataaggcgtggcccacggggacatggcatgggagggcttgtttcactccatttccaatctggtgtacaggaaattccttatctataactgtccatttccccccagttaactgcttttccaacaaactcaaaccccttgaaaaggtgctaagattggtttctgttaacatcnnnnnnnnnnnnncagccctcagagccttcccgatcactgctttagtgatgaatgtctcgaggctatttcttgattctgattgcaaacattgtttgttgtag

SEQ ID NO: 131763 - DNA, 1041 bp, Homo Sapiens
  misc_feature (946)..(946): n is a, c, g, or t
  misc_feature (965)..(965): n is a, c, g, or t
  misc_feature (1013)..(1013): n is a, c, g, or t
tttttttaaacttcaaaacaagttttatttgggaagtttctcattttgttaaagctgcaagcaagtttctttcacaattacacttccagagatctagtagttttacggatctcagtgttcaaaagtgtatttcaaaatgaacaaaaccaaacccacaccaaaaggaaatagcgtttagattggtttggaatgtatagccattgatttcaggtgttctcagaaacaggttaccatttccttggaaaacaggtgggatacagtcaatgcccacagaaggaaatgtcttttaaataagttagttactcggacaatattattcactccttagaaaatatagtaggataacaagtcacagctggcagggtatgcagtacagcaccgatttcacagggggcttatgcaatcctggagtcagcggttgttggcttatggtacacaaaataagagcagtcactggaagtggggagaaaatggtgaaaggcaggcagtctcccgcagtcctacccagccttttaacttgctaaaaggagaggctgtgtttttagcatctttgggagaacatttgagacagttcaaaaacaaaaacaaaacccccagtattattcccagaaagtccttgacagaaaagagggacctggtcagggttcccatgggggactgcgcctcccatccacttctgtctccacgtgatacaagacgtcagccagggtgtgctctaccacggcgccccagcctatgtcactcatagggcgggtagtgagatcttcggaggatactttgagcatgggtccaaagttatggaaccgtgcagctcttgtacagtgagatggctgggaagtaaccccctcaaaatatctttggtagcacaccttgattgacactttttatacatatatctcctatgggggtctgctcaggtctctctgcttatcctcgtgcgattctngctcgaggcaatccccaangagcgataatcgtacagcaactgtcctggtgatgtacgtcaatcaaanatacacgacaaatgtagctggtgcagag

SEQ ID NO: 131764 - DNA, 1878 bp, Homo Sapiens
tttttagcttttcaagagcgatcttttattttctgaaagtcctaaaactgatccatttatcaaaagatgattgatgccccagttcacaaaccatatctttttctctttcagcaaatcctggagccccaagagggctgcagcctgagtgaagtggtgacatcagaacctgccctccacacccaacagctggactgcagcctcctgcaaggcctggtggatgtgcctgacctctctctgggacagagtccgttccatgtggcggtacgtgatgcggtagcagtggctggtcttgtgcgtctttggatgtacaaacttgtctatgagatcaaccttttccaccaggtctcctccaattgttcggactaagtcatagaaatcattttctgcgtaattctcagagggcaaccagaatgaaatatcattgatcacagccggatatttgctaagaggctgaaacttcaccttctgattaatgttggatacacagaactgcttcaggaagcgctcgtcctcacaccagaagagacggatatcagggatgtcgtagaggatcatggctagcctttctaatcctaggccaaaagcccagccgattcggtcttgagcaccagctgaattgaccagttgttgttccatcaccccgcagccaagaacttccagccattctccatgaaagttgatctccatctcaaaggaaggatgtgtaaaagggaagtagcagtctacccatcttatctccagctcatctccaaaaagatgtgccatgagcctggtaagcgtttgcttaagatcaacctgtacaagcttcacggcctccatggtgtgtgtctcttgtttatgcgcagagcgagaactttgttcaaagagctgcaggcttttctccatcctttaataccagcaaataactcatgcttggagaagagccgcacggcctccagctggtggaaaatagggtagtgctgggagtcgatctggtcacgcctgtagacatcacccaccaccaggaaggcatccagtcccgcgtgcagcaagtcccactggtgtgcagacgtgtgcgctctcagcatgtgagtccgattcaggtaatagttgtcccccttcttcctgctggggtgatcagctgggatgagcaggctgtcaaagttctgccaggtcgtgaccactggagaaaggttgtcgtagaccgagaacaacggggtcccaaagcggcccacatactgcttgtagaagtgctccttcaccctctccttgatcagccacagagggtgatgctgctggttgtgcaggttcctgccaactctggtgaggaccttccgggtgaggttgctgtggtcgtcctgagggtaggatttgcccagcagctccaccacactgcctggagctctttgggtggcacactctgctgcaggaggcctcgatccccaggcctggtgctgatggcctctggagatgtgactggccttactcaccaggtagacatatgcatgggcacctctcctgagagctgagcccaccattgtagaaacttctcacaggttccaccgctcgcccgggaagcccagacccaggtgtttcaaaatcagaagtacggcaggctcgttcgctctcacgggcaagaatcttaaaccccaacttcagagatacccgcgcacgctgggcgctgccattttgacagaaagcgggcctgccccagaggcccctacgcaggtcgccctgagcagagccggagtgccacagaacccctagctcatcacctccacacccagacgtcgcatcccccggcctgaggaatgccaagaaaccccaccctgccgaccaggatcaggcggaaatcaagcctcgtgccgaatttaaacacccggcctgctactgccgtat

SEQ ID NO: 131765 - DNA, 993 bp, Homo Sapiens
  misc_feature (982)..(982): n is a, c, g, or t
caggccccaatgcttaatacttcgttcatttgctctttgctttacccatccacagcaaagacctggatactcttcaccaaaaaatgtacaactaagaagctttatcaacattttctaaatgttaggagtagtattaagatctgtcagacaagtatgccaggtcacagtttaaaggatattgatataatgccatattgtgcattaaataaaaacaagagaaaaatataataaacttgagaaactcactaaatttgaaaaataggctttattttaaccagtggtattgtctgacatcctatacggcataactgattacagccaagttcatgaatacaaataaaatagcaatttccctcattctctcttttgttttctgttcagagaaatcaggagatgggagcattatgctcagaaaccgaagagctcttccaagagctccagcttagagtccaggcttccagagcatgcagcctcctaacacgtatgtggtcacatgtgcaaagacctttattacaaaatattcagagcagtatttctgtaggaaatcacacgagcatttacaaccaaacatggctgataaaattcatcttgctgtggatggtgaggatttgaactgcaataaaggagatgaggcctttactttaaaggttcactttccttgaaagggggagagtcccgggtgagagggaatcgccatcagtctgcctccttccttcttgctccagttgactcagggggtccaccctgtccctctggagtacatgtatcactgcactgattgagaaatggaaacaccttggcccaaatacaagattctgtcacacagccaacactggaagtgactttatactttcttattacacaaaaggcttaaatatatgagtcctcatgtagaacacaatgcctgaaattcagcaagttatgaaaacgacacttctccaccccctgaggatatttttatctttataagttgaaaatacanaatattaaaat

SEQ ID NO: 131766 - DNA, 1524 bp, Homo Sapiens
  misc_feature (164)..(214): n is a, c, g, or t
  misc_feature (1334)..(1346): n is a, c, g, or t
gaaagcatcttttatgggtttattggtcctttaagttaattgaagtaaagaaactttaaatttacaagctaatatttatcaagcaatacaaattcttttgtttacctcaaaatgtaatactaattccatagtaaacaacaatttttttatacacagatatatgnnnnnnnnnnnnnnnnnnnnnnnnnnnnnnnnnnnnnnnnnnnnnnnnnnncgattctttttccattttacaatctctggtttccataacaaacaaaaaaaagggtgacattctttttaaagtttggtagcttcatgaaacaaagacttccatctgtaaataaatcactttcttatcaacacactctctcaagcactttttttatcacagcttttgttttggcataatggcagcatggagagaaggtaacatttacacggtggactacatcaatacctcagaaggtttttattttaaaattttaaacgtaaagaatgacttttaaaaataagatgacagtccataatgtggacatgtccaaagccgaagtttttaatctcttctttaacagttaaaatacaagttagaaagtttgctggcagtttatttcacaggaatatatcagatggacatcatctctcaatgcactcccaactcacagcaatgaagggaacaggcacacagaaatacaacggacagggaatccaccagacttcatccaaacttcaggggtgtctaggccaaaagcgcctttaagagatgctggtttgttattggataaaggccgagatgacagagccactgcttcatcacactgactcacattttggtttgcaatccactttcctctctcctcatttccacatggaggaaaaaaagtgattttcctttcctcctcccagtaacatttctgactgaagtgttggtctaagactgcgaacaatcaatcctgtccaacaggggtgttgctgggtgtcacctactaggaccagcctacagagagcccagaaccacctggtgtgggagtgctgctgctgacagagaatatgcaatgctcctcgccactggtgttaacactaaaggctctgctaaaatggactaaattacatgagtcaacatcatgttttctgtttttggcatttcaacccatagagaatttctatctgaaacaagctgctctgaggcttgaagataccccccagtatcttcaaaagctgttctgcagaatcaggagtaacatttaatactgttgtcatctatagcattctttgtttctacgtgatttgtcaatgccgatactatatcctctaaaatcaaaagtatgccaaaaggcactaatctttcacacttnnnnnnnnnnnnnggttttgtggtccctgtgtttccttacattatcaaaaatatcatttggcaaaagcagtccttagttttcccctccccaaagccaaccctagtgatggccctcactttcttgcttgtttctttagggggcctgaggactgactatgttagatctctatattattgaagctgaacaaccc

SEQ ID NO: 131767 - DNA, 213 bp, Homo Sapiens
tttttaagaaagcatcttttatgggtttattggtcctttaagttaattgaagtaaagaaactttaaatttacaagctaatatttatcaagcaatacaaattcttttgtttacctcaaaatgtaatactaattccatagtaaacaacaatttttttatacacagatatatgaaaaaagtggacaaaaacctcgtgccagcatcaaaaagtcaac

SEQ ID NO: 131768 - DNA, 1346 bp, Homo Sapiens
tttttatatggggagatttagattcttaatttctattttatatttttaaaacatgatattagtatataagataatatagctagccagtgttagtaaagaagtcatgattgagtcttaaaaaagaacaatccagtgttgcagttcagagaggttagcatgtcagggcgcaggcctcggccgaggtgtgctttgcatttaggacacagcccggagccgcagaaggtcagcaggagcacgtctggcaccttcagtaccaggctgggtgagagagcccgagaggggcccgggcgggggcagtcagggccctgcttcgctgcctgggcccttgtagatggccttctccaggccgtccaccacctccctgtattccaggaacgattggtagtgtgtgcactcaaagcagctgctcccgcgcacgtgtgctaggaagtctggcgcacctgggcagatcacgttgtcagccagtagcactgtccccttccgcagcaggccacattcctccaagagaagcgtgtccggcaggtaccggtccttccagtggtcgaggaagaccatgtccagtgtgtccacatcatacttcttcttcagctgggggatgatgtcctgggacgctccaaccacaagggtgaccttgtccttcatgccagcgaaatccaccatccgctgggtgatggcggcacagtcggggttgatctcgatggtgatgagcctcgcccctggtgacagcaggcgggccatgcgcacagctgagtagccacagtaggcccccagctccagcagcacggagggctggtgctcctgaatcacggcgtccacgatcttgcctttcttgtcgcccacgttcatggcccactccttctgctcgcagtaggtgtcaatggcctccagcacgctctgtgcgttcccgggctccgcatgctgcagcacatggttcaggatgcgctgctccttggtgtcacccatgagcaggttgtggatgggctgcaggatgaactcgttccagccgataaggcacaggccccagccccagtgcctcagaagcagcagcagcaccaccagcagcaccaggcccagcaacacagctgccaacagcagaggcggggcctccggcatcttcaaagcacctctgagcaggctccagccctctggctgcgggaggggtctggggtctcctctgagctcggcagcaaagcagatgttatttctctcccgcgacggcccgcccgggactggacccgccccggtccggcgcaggcagcgcggcgggcagccctagctgccccagaagccccacgacgatggcggcaatggccctcgtgccgaattcgccacccaggcctcgctac

SEQ ID NO: 131769 - DNA, 1180 bp, Homo Sapiens
  misc_feature (85)..(104): n is a, c, g, or t
  misc_feature (895)..(950): n is a, c, g, or t
aaggggtccgggcgaggagacgcctgttttggggcaccctttcgagtgttcccagggtttggggtgaagaaaacccccgagaaannnnnnnnnnnnnnnnnnnnccaattctaggggcccctgggtttcggtgtgactggggccccctggttaaatgggccctttctaccaggggccggttccaacccccttcccctgttatttcagggaaccgattgggtaggggggtgccctcaaaagcaggctgttccccggggcagggtgtgtttgggaattctgggcgccccttgggcagatccacgtgtccagcccagtagccctttcccctttccgcagccaggccccctttcttccaagagaagcgtgtcccggcaggtaccgtcccttccagtggtcgaggaagacccatgtccagtgtgtcccacatcatacttcttcttcagctgggggatgatgtcctgggacgctccaaccacaagggtgaccttgtccttcacgccagcgaaatccaccatccgctgggtgatggcggcacagtcggggttgatctcgatggtgatcagcctcgcccctggtgacagcaggcgggccatgcgcacagctgagtagccacagtaggcccccagctccagcagcacggagggctggtgctcctgaatcacggcgtccacgatcttgcctttcttgtcgcccacgttcatggcccactccttctgctcgcagtaggtgtcaatggcctccagcacgctctgtgcgttcccgggctccgcatgctgcagcacgtggttcaggatgcgctgctccttggtgtcacccatgagcaggttgtggatgggctgcaggatgaactcgttccagccgataaggcacaggccccagccccagtgcctcagannnnnnnnnnnnnnnnnnnnnnnnnnnnnnnnnnnnnnnnnnnnnnnnnnnnnnnnaggcggggcctccggcatcttcaaagcacctctgagcaggctccagccctctggctgcgggaggggtctggggtctcctctgagctcggcagcaaagcagatgttatttctctcccgcgacggcccgcccgggactggacccgccccggtccggcgcaggcagcgcggcgggcagccctagctgccccagaagccccacgacatcccgggaatccggaccggtccagcct

SEQ ID NO: 131770 - DNA, 882 bp, Homo Sapiens
ttttacaaggaatttcctccaaacactttattcaacagaaattataacaataggcttcaaagtaaaatccaggagacccgttgtttagttgttctggtctcctttttcacgtatcataatgacttttaacaaaacaaacactactgaaataactggtggcattagccaaacattatgctgtgtcctgccatcgccatcaaataataatattgagagtggcataactttgtcatgtttaatggtcatatctgtgaaatgaaggacagttgtagaaatagttgacttgcagaaaaagagaaagtataagaaatattaagagagctgctgtctgtgaagttccagttcttgattaccattgctagcaaggttgctcactgaccagcttccttcagtcaacgccatatcctacaggtattatccttgctgcctgtaatgactatgttgcctttatagttgaaagcacatgaaaagatttcatcagtgtgcccctcaagaacctggaggcactggccagtctgagcatcccagattctagccgttttgtcagagctgccagttagaagatggttcccttgagggttgacagaaatctttgaaactgacaccttcatgaccttccagtttggcaatgcattgacttgtaggcagcactagaaaattcttgactgtgccatcagctgaagcagtcgcaataagctttccagtgtaatcaaagcagctgtctagtatttcatcatcatggcctgttaaggttgccacacatgtaccatcctgtagcatcccgcaggcttgcaggtaagagtccataggatccagttaatatcccgacgagcaatcctcagattggaatgaggcactgctaaatctcaagcacaatgacca

SEQ ID NO: 131771 - DNA, 642 bp, Homo Sapiens
tttgagccttagcacaaagcattttaggtttatttaaataaaaattataatttatacaatactttttctttaaacaaacaaagttttcttaaaaaaatgttacaggagaatttttttcatcggttcttaatacagtacaatccttttgttgaacaaaagtcacactggcaatgattatttacagatccaaaatagactcaggcttcagacataaaaaatttaacattcgtctagttcagtgattagtcacagaaattaaacatctgcccagatgtacacaatttggtaaaaactacagcttctctccacggggagcccagagcccgtgccgatccgcgctccgctcccgaggacttccagggaggggcctgtgctggcagcagagccagtcggtggccctcccccgaccccccgctccccgaatgtggccctccctgggggcttcggccacacctggcacgtggtcagttttcatctccctttctccacaaaagggactcgaactaaaccacccgacgctggtaaagccccatctgccccagggacccctcccgctgtgtttggggactgaatcccagcacctaggaagaggcgctcattggccccgaggccccggacccatccttgggcactgccgggccc

SEQ ID NO: 131772 - DNA, 860 bp, Homo Sapiens
  misc_feature (74)..(74): n is a, c, g, or t
  misc_feature (201)..(244): n is a, c, g, or t
cgttcctgaaagaatctgtttattttgagataaaaagagtctcatctccctgcatatccagcaaatactaaatntgatctttttaattttagaaaagggtcaacaaacttcagctggagtatgatctctctttcaaactcccattctggtttaaggagccccaaagggtaactcttgacaaaaaagtggctatgtttgcannnnnnnnnnnnnnnnnnnnnnnnnnnnnnnnnnnnnnnnnnnnagtttataaaatgtttgctgttgtatccataaatcccctgtggacaacgttccttttcgtactccgctgtacacgtgtgcagtgaatgtttagcaaatacataatttggtataaatcccatacaatgtgatttcacaaccagaagcctgactgctgagatattactgaattttttaaagtgataaacaagattattatgtgcaaacaaacagggcctgtgctccagctgcgtccaaatttacttgacaaagctataaacacaaggccctttctgaagtcctgctgattgagtttccccttccttttgtcggtggagaggaatgtaaaggctaagcgggtgcactcggactgtgtgcctctgggcttgctggcggtggcacttaaaggaactcattcattctctggatggggcaacactcctcacccgggatcccccaagggctttcccacacggagaccttcccgaacacagagacatctgatcttggcttgcccaagctggcccaggcctcggggactcaggagcctgtggaatgtgctgagagcctgaggtctctggcggggaaagggcaggggtcacagccctcgtgccgaattcgccacccaggctcgctcc

SEQ ID NO: 131773 - DNA, 1176 bp, Homo Sapiens
ttttttctgcgaatcactttattgcgcgcgtttcggggagcgggccgtccagggaaggaagcaaagcgggaacgcactgcaggccccatccaggtgagcccctcaggggccggcgccccggggcacgatctcggggccttgggttggctcggatggtggcggctgccgctgccctagccgttgtcgctcctgctgaaggatgcctctgttggccctggcccgtgcccgggcttcgttgtagaaggctgtgatgatccgatccttttcatccatgaagttaaggtgcatctgcttcaccttcctgaaggcaatgtagtgcaggcccatgcccgccagcatgaggaggaggcagtaccccagcacttgtttgttttgtttgtgttgctgctgcctcaactggggcccctgtggcctcacgctgtgaaactgggaccagtactgtgcgttggggggtgtccaggagctgtgtgtttggtgggcagacttgtcatggactgtggttcgtggagactttgggggactacctgagcggagctggtcatcatagctgcggcggctctgctcacggctgagcacacggtatgcctcgctcagctccacaaagcggctgtgcaggcttgggttcccagggtcccggtctgggtgcagctctttggacttggagaagaaagctcgtttaacttcctcagtgctggcaccaggatgcacccccaacagttcataataagtactgggtctggaccgctgcccggcggccgctccgaggagccgggagggagggttgcggggccacagccggcacaggcgcaggggcagtaagggcggcatggcggcgggcgggcagctgggaaaggaggctaccaagagcgcattggaccaggatggggctagacttcaagcacccgggggcagagggaaggggcctggcccgttgttctgcaaaggaagactgaagcaggcccggagagggggcggttcttgcccaggaccagacccgcgtgtccttggacctgccccttcctctgacccgggcatccgcagcccttcccagcgctggcttcggggtctggccacccagtcagggaccccaagaccccgttcccacccagggaacttggggacgggagaaggaggggcccctcgtgccgaattcaccacccagcctcgtacctagct

SEQ ID NO: 131774 - DNA, 1236 bp, Homo Sapiens
  misc_feature (154)..(199): n is a, c, g, or t
  misc_feature (575)..(706): n is a, c, g, or t
ttttgtattgtgctcttgctccgcttttcgttgtttccttctttgctttctcttttgttccttcttcggctcttcgtgtcttcgcgctctctcgtgcggcgtgttcggtttccctctgggtctcagtcctcttcttctgctttgtctttttgtnnnnnnnnnnnnnnnnnnnnnnnnnnnnnnnnnnnnnnnnnnnnnngcggtggttgtattgcttttcgttttatgtgctccccgtttgtttgttttttagcgagtttgctcttgtgcccgctcgttctttctggccgctgttttcgttcgtgttgtttccacggccatcgcccgcttgtgttttgtgtgtttctccctgagcttgtttttctttggttggtggtgtggtgcccactttgggccgtcccccaccggtgggtggtgtcgtttgtcgatgtgtgtctgcgttgtcgctttttgtcgctatgctgcgtattttgtttgttctcgtcgctccgctagcctcgtcgtcttggtttaattgacgcgccctctttttggtggtcggccttcgtgtgctcgctactgcgggtggtgtcggnnnnnnnnnnnnnnnnnnnnnnnnnnnnnnnnnnnnnnnnnnnnnnnnnnnnnnnnnnnnnnnnnnnnnnnnnnnnnnnnnnnnnnnnnnnnnnnnnnnnnnnnnnnnnnnnnnnnnnnnnnnnnnnnnnnnctgcgaatcactttattgcgcgcgtttcggggagcgggccgtccagggaaggaagcaaagcgggaacgcactgcaggccccatccaggtgagcccctcaggggccggcgccccggggcacgatctcggggccttgggttggctcggatggtggcggctgccgctgccctagccgttgtcgctcctgctgaaggatgcctctgttggccctggcccgtgcccgggcttcgttgtagaaggctgtgatgatccgatccttttcatccatgaagttaaggtgcatctgcttcaccttcctgcaatgggtcacaattaaccctgggaatccaattcctgctgtccctgaagtcctgcccccttccaccccactctaggggcctcacagctttttacccttacacagggttaggaacctcagtctaacccttcctgtgatagatagggagggctcagagtggccctggcttgtctagggtccaatggcatccgaagtccctggtcactttgaggtgtgacagcagctgtggacat

SEQ ID NO: 131775 - DNA, 601 bp, Homo Sapiens
gaagcaaagcgggaacgccactgcagggccccatccaggtgagcccctcagggggccggcggccccggggcacgatctgggggccttgggttggctcggatggtggcggctgccgctgccctagccgttgtcgctcttgctgaaggatgcctctgttggccctggaggagagggcacctgggtggttgggatagggatcccgaagtgtggttcctggacagggagcagggagcagaatagagcagggacagacctggcccgtgcccgggcttcgttgtagaaggctgtgatgatccgatccttttcatccatgaagttaaggtgcatctgcttcaccttccgctgcccggcggccgctccgaggagccgggagggagggttgcggggccacagccggcacaggcgcaggggcagtaagggcggcatggcggcgggcgggcagctgggaaaggaggctaccaagagcgcattggaccaggatggggctagacttcaagcacccgggggcagagggaaggggcctggcccgtttgtcaaaaaggaagactgaagcctcgtgctgagatcgccacccaggcctcgctacttaggacgtttaggg

SEQ ID NO: 131776 - DNA, 512 bp, Homo Sapiens
tgcgaatcactttattgcgcgcgtttcggggagcgggccgtccagggaaggaagcaaagcgggaacgcactgcaggccccatccaggtgagcccctcaggggccggcgccccggggcacgatctcggggccttgggttggctcggatggtggcggctgccgctgccctagccgttgtcgctcctgctgaaggatgcctctgttggccctggaggagagggcacctgggtggttgggatagggatccccaaatgtggttcctggacggggagcatggagcagagtataacagggacagacctggcccgtgcccgggcttggttggggaaggctgcgataatgcgatcctgatgatccgtgaaggtacaggtgcatgtgcgttaccttcctgaaggcaatgtattgcaggcccatgcgcgacagcatgaggaggatgcagtcagtggacacttgtgtgtgtgcgttggattgctgtggtctttactgatgcccctggtacctcctctgtgaaaa

SEQ ID NO: 131777 - DNA, 617 bp, Homo Sapiens
cccagtacttattatgaactgttgggggtgcatcctggtgccagcactgaggaagttaaacgagctttcttctccaagtccaaagagctgcacccagaccgggaccctgggaacccaagcctgcacagccgctttgtggagctgagcgaggcataccgtgtgctcagccgtgagcagagccgccgcagctatgatgaccagctccgctcaggtagtcccccaaagtctccacgaaccacagtccatgacaagtctgcccaccaaacacacagctcctggacaccccccaacgcacagtactggtcccagtttcacagcgtgaggccacaggggccccagttgaggcagcagcaacacaaacaaaacaaacaagtgctggggtactgcctcctcctcatgctggcgggcatgggcctgcactacattgccttcaggtgatgcctgttctccccggggtgatgggcagagggcaggagggtgggtgaattccagtgtggtcagccagtcctccacagcacctcgtggcccgtactcttgtgtctctcaagataagagctgcttgaagttggtctctggagcctctccttacttattaaaggcagcgccgcaccaagaaa

SEQ ID NO: 131778 - DNA, 1220 bp, Homo Sapiens
aacaatcaatcaaaaagccactggtcagtatgctgccttctccagctccagctccacagccaagttaaggcacagcagttccgcttcctgtgtctctgccgagggcctgatctagctgctgccaagacatgccaaggtcaccagcttcccgtcctgaccaacagccacctctcagaaggctggcttaactactcagccccagtcttcttagcagatggcaaggagctctggccaagattttagtctaaacagaaccctaggctgctgatgcaacatcaagcacagcaaaaggtcacccctttccggggggacggctactgaaccctggcattccaattagaaacgtgtttcaaggacacagttactccggcctcagaactctccaatgtgagtaggtaagtacaggggggattacaagtgaagccacaaaaaaacagtatttgatcagcaacaaaatatctgagactttcttaagctacctacggcacatactattttgttctatttctcatttctatcatcagccgctcactcagctaaccccaggattcaaataggaccgctggtttttaatttgtgaatattcttatttaaaaacaaaacaagctctacttcagatgtccaaacaaaaatcacacagtagtaaaactgctacaaaatggtactgtcaacaggctggaggtgggggtatgggtgccttctgtgtgtctcagtcacaccggggagttttgcttacctaattctgcttctgaaataagcaacatcaaaacagccaggtgtcaggaatgtgccatttaccgggtggtccccagactctgctgctccttcccagcattactaaggtttctctcccagattccccaccacccaccatacagctccctttgtgggattgatgcaaggtaggccccatcttgaagagtgacctagaacagggtaccagggcctccagctggaggacgagagagccacccctcctcaagaaacacccttgggtgacagagacagcatgatattctaggcagtgctgcccagcccagactccacaaacaacccttctgaccttgcagaggcagtccagagctgaggggccagcttgagccagcttgcaatccctcgggagtttactgagggctttctgttgttactgatgaccacaattcctccttgtaaatgaccacactacgactccctgtaactcaaaaagcgggaaggaggcg

SEQ ID NO: 131779 - DNA, 688 bp, Homo Sapiens
ggtaattgacagagcataagcagtttttaattttttcaaatttacaattaggctcctgcacggcaactctcttcctgtgaactgaagggaaacttggagtctccctctccacagggttctcgtcttctgaaattctgtactgcgtcaaggggcgaagttaatacagaactgtctgggcacagggagacgtagagcaggagcagcggcccggccctcacgacggtggcgagggaggacctcatccaggagctgagctggcagaagttactgtagtgcacgacggcaatcagtgcggccgagcctgtgaacagctgggaagtgtagtgttggtctcatattcggaggtgacatgggagtagacggccagtgcgggaagcgacaccaggatggccccgatgcagtgacgtggtagccagccggcgatccactccagcaggcgcttggtgcaggccatgacgtcctccaggaagaaaccatcctgatggaaccgcgagggacagacctccagcagcagggctgcactgaagaccgccagggcggcgggcgggggaggcacggtggccgcctcgtacttcaggaagcaggtggtggacagcgtcagaaaactgtggtcgacagaaaacatccaggagggagctgaaggtgggactagcaacgtcttcacgggggaattcttcatgactcttcc

SEQ ID NO: 131780 - DNA, 959 bp, Homo Sapiens
caccacttttccccaaatgaggccatcaagtcaggcaccgtcagatagcagaaagaaaaacaggaattaataatccaacataaaatgacactgtcaactattcagtttagtgccctagttcaattgattcaacttctgccttcttaggcctggtgtgaccaatgccagcccaggtttttaaaccctatggtacttctagacaacgtatgtaaatttacagtatacaatttggattcaccatgcatgaatactttgtgtgtaacatttaataagctcaatctacatccagaataatttacatgaaaggacaatatttatttaaacagagctcaatggggtaaccatggtatcatcagagtgcatccagaggaaaagagggaggaggggccgaaggagacacaatcaacggcactcccacacttttactgtttgatctacgctgccagtgacgacatagggtgccgtcttgtggaaatccaaggaggtaacaaagtgttcatgcgcattgagggtcttcatgcatcgcttgttcttgtaatcccatacgcgtagggtcttgtcatcagcacaactcaaaataaacttccccccagaatggaacagaactccacgtacccagttatcatgacccacgagggtcataaggcacatgccagtactgacatcccacatcttaatagtcttgtctctggatccagacagcaagaatggcccaggtttaccactttttttagtctcagatcctgttgcttcagagatggaggaatatgagctttctggagcccaggaaatgcattctaccacatgctcatgctctcggagctcagccttgcattcctttgttgctacgacccatacacgcacagtctggtcattggaacagctggctatcagagtgccatcttgatttggccgtaccatacgtacccattctctgtgtcctgtgaatgtcttcacac

SEQ ID NO: 131781 - DNA, 1107 bp, Homo Sapiens
  misc_feature (567)..(592): n is a, c, g, or t
ctttttaagttaatatgttaactacaatttaaaacagctatttctaatgttaagcacaaatatttgtaatacaactcttaagcaaaatagtatttttattataatgaaacatcagctaacttgatatttttaaactgtaagtctgggttacaaagtaccaactgctctgtaactgaatgcctactgcttgaagggtcctgaactcagtccatttttgcctacaatcttaagcctacatgaagcccataaacatttttgtttgcagaaaacaacaatgacaaatatgattgttaaggaggtgtaacttacagtatctaggtaaaaacctttcatttccagaaggtcgacaaatgactttactgatgtaaaaacatgctttaacatacattttgcttaaaatcaaatagaatgtttataaagaaatacttcagtccaacatacatattacatcagtaatcttactgctcacaattattttctaacgcccaacacctttagttgttttcagttatccagaatacataagaaattgttactaaaactatagatataactctgcgaaatgtnnnnnnnnnnnnnnnnnnnnnnnnnnttatacaaagaatcattaatctcttagttattttaaggcaatagagccagtaaaaaaatcatttcaaaactgagtaaaataaactaaatgtagttttttagatattcattaaaacacagaaaatgcttggttgtctttgtagctacaatacatttctatgttttgtaataaattggtaatttcaaagtaacagcttttccaattctaaggaattactctgccaaaataaggtttaaaataaaatacataaaatggcttagtttatcctaatctgatataaatttgtgattgattgacagcaagaatataatgggaacgtacataaatgaagcaaagcagtcatcacattcttatgaactagaaataacatcataaaaacatgttcattttcataaaattttacatttttgtacatacactcctcctaagtttgtacttttgatatgttcagaatgtggctatactatttacttatggggcagtaatctttagagcagtatattacatcaattagc

SEQ ID NO: 131782 - DNA, 374 bp, Homo Sapiens
tactcattttttgttggaatcctacccgcccccctccgccccgcccacggcccctttaaaattgacagccaagatttgctggcaaacattctttttgtccttggatgctacaattccaggttctgccttttatctcccaagctcagaagtttcctggggccaatttttgcagctcaaaattgtccgtgcgattttgttcttcaccgctttgaaacaggaacaccttgccctgttgctttgccactccccattttctttggggatgactgcctccaggaatactcattttatattagtcaaaggggtgaaagtttgcattgacttcttaggtggtgtatggggggtggtgaacgtatttgagacatgcagatggc

SEQ ID NO: 131783 - DNA, 670 bp, Homo Sapiens
tttttactgtatttaaaaaccaatttatttattgtaaggctattaatataataattattcattattaatgttatatatgtattagtgtaaattatttctactttatgtttcaatttagaccttacactgattttaaaaattatatgcataggtaggttatattatttctgaatttcatttcagaaattagtaaagagattttcagaagacttgttagaagaagtcagtgattgtggatgggactgagaatttctgctttagtggagccaactctctcttggttgagaccagggaagtggcccagcacaagagagcttctgcactccaagaactagcttcattgcttttggaaaagattcaacgtgtcaaacagctaaatgataactttctctcctgaactgatatgcgtgattttggtggttccttagttcttacatgggctaccttggtagggggtatttttcatctatttgattacttctttgtaaagttaactctctcagctttatgcatgggaggacacagaggagaaaagttaaccttcaaggacaagatgcttttcaccttgaaaattgtttgtcatgaatgtatttactggccatgggtctttctttggaaaatccttataatgaactcaaaatggcagggctgtattttggttattgttccc

SEQ ID NO: 131784 - DNA, 1019 bp, Homo Sapiens
  misc_feature (763)..(763): n is a, c, g, or t
  misc_feature (778)..(778): n is a, c, g, or t
  misc_feature (799)..(799): n is a, c, g, or t
  misc_feature (820)..(820): n is a, c, g, or t
  misc_feature (904)..(904): n is a, c, g, or t
  misc_feature (933)..(933): n is a, c, g, or t
ttttttctacaccaacctgcttccactttattcttgtttacacattctcctgctcccagatttggagtcagaacactatgtgagctcaacagtcctgctcagagccatgttccatatcccaccagtttcccttttcccaacccccacccacccccactcagtaagtccccttgcccaggttttgctcttggagggaagaaagcagaagaaaagatgcaggactgagatgattgtcctgaccccgctaccctcaagtgtaagagaagtcctggatggaatgggtggtgattccaatgagggatgggaacctctttccaaggcacaaggggccatcttctcaacatgctgctttttcagatttgggtagtatgttggccaggagctgggggctgcagcgcctccagctgactgaggaggagaggaatgtgaggacgctgatgcgggtccacggtcatcatcgagttcaggagctgccgcaatgctgaagaatgcctggggctttgtgggatgctgagttggttctgcacagcaagggccacactgtcacccttttggaacaccatgtcataagggccttccccaaacatcatggcatatagcacgcagcctagggaccagacatcagtccgctcatcgatgacacagtgactctgcacagaggaagagctctggggctcggtaggagatggtgcccgctgggctggccagtcctgcagggtcagagctggcgggagcctccacatggatgcagcttgattcatgngaccaagtccattanactggctgccctcatctccangcatatattggggggcttcantctctgtgggcataccctgggatgatggctcaggctctgcaattcccacacagcaaagattgatctcgtaggagttgcttgtcntcagcttcattcatccaagggacgtcacncgtgcgatctggctcgaggcaatcctaaggagtcataatcgtacagtcaatgttctggggaatgtaccgtcaatccaaaaagagcg

SEQ ID NO: 131785 - DNA, 749 bp, Homo Sapiens
ttttttccttgtcagggtttatttcatcagctaacattcattctcgacctagacaaaaacaattagatgattatgacttgcttttccatcatcaactcatttttttgtatgaataaccaaaaaatttcttcaacacttttttttaagaagaagctataaataaataaagctttaaacaatcctgggttcaagttaaacagttccagttcccgaaaagttcacagccttgttttgtgggcagttctgctgttcctggcttccccttccaggaggggacgtttgcaggtctgggggtcctggtgactaagctgttagctccactccctgcctgtttccgtcctcacagccctgggagggccccggtggacagagtccttacaatttaggagatgctgctggcaaaggaactgttgacccaaagcaggtggcctgaatgggaagtgccaggctggacacttgggggctgagggcactgccagctgccgccgcctctggacacctcagcccggcgctggcccgagaggagactgctttccaaatgcagcgaagagactgagacaagacccgtgcttccgtgtgagttgggatgcggggcataagttaacacatattccaatatgtacaaaacaacctgcgctcatgcccgcgcacccaggaagcccatggtgaaggtgaggtcaccttgagccaggcctctggctgggtgtccacctcctgccgggaagccaaggtgccccacgtggcttgcc

SEQ ID NO: 131786 - DNA, 759 bp, Homo Sapiens
  misc_feature (270)..(280): n is a, c, g, or t
  misc_feature (663)..(663): n is a, c, g, or t
  misc_feature (720)..(720): n is a, c, g, or t
ttttttcaggcttcagggtttgatatttatttttagcaggaagaatatactaatggtgacgacatcgttagaagatacgcccatgtccaatatctgcaacagaagctcaatagaagttaaagaaaccatactaaaagactaaagacaaaaattgtatgacattacttacccttaattctgtggacaataaaacaattaacactatgtttaaaattgaggtttcatcacaaggtgaaatagtggcaagttaattatcaaattcatcttttnnnnnnnnnnnccatcttttcctttccatgtagaagtgggcaacctcttcaaaggtatagtggccaccaactatcatcatctgagggtatttatacgagcagagaaggagtaaattgcaaaggagtagtgctaacttgagagctgggaatttgaggtgggaataattaagtagcagctcccatgggtagcaatggcaatctaatctaagcaccatttttggcacaattagagactgctgaatcaataactaaacactaataaaaataacttaatggggtagtaccatgacattcctacaaatttacagtgagctttctgtaaataaagggattcaaattagaaattctcctacatattattacaataagaaattgccacagcaatacaatttanacaagaactcatcaactgaaagattttttttacataaaaccaaatctggctcatgtnatcctaacattgctactcctatcaaaggaaatacgagca

SEQ ID NO: 131787 - DNA, 808 bp, Homo Sapiens
  misc_feature (347)..(356): n is a, c, g, or t
  misc_feature (629)..(644): n is a, c, g, or t
ttttttttcattttgttaaaaatatttatttaaaaaaatacaactgctgtccatatctagttgcacatatatctattaacatatatgtatacttttagacttgtagtaaatttgctacagtgcttttgtaaagccagcctgcattatacaaagcaaattcctctgtcagttcttacataaaatagatttttaaaaatgtatatctttcctaaaagatgcatatcaccattatagaatttaacaaaatttttgcataaaacctgggaagtgatagaaaaaatgatcacctgattggtcagagcaaccccttactatgtctggagatgcactgagtatcaactacacannnnnnnnnncaagcagcatattattataaagccctcaaagtgcttttgcatcctttcgctcacctctctacactctataaagtttctctgccgtatacagatagaattcaagactctagctacaatcatcctaatcaatcttagagcaatatccctttgtttcccaacaggtaagtcagactgcttagctaggagatgtggcagcttccctccagctgtttcatcaactaacatgaagtttaataaatgttagcagtgaccattttaattgcttttttaggnnnnnnnnnnnnnnnnggtgcttttaatactttgaaggtgctttttaggtctccctaatgtaaattatgctgaaatcaactaagacgagctattattaacactttaacagttatccattcctctgggtaggtgtggacttacattatatgtaagtatctctacaaagtgttagatactgg

SEQ ID NO: 131788 - DNA, 911 bp, Homo Sapiens
aaggaatataaacatttagtatattagaatgtgaaattacataggaaaataatctcttcaattagctaaaatcacttgcgaaagattatttattgcacaatttatcagtgggtactaagaataacacagatcctattattctcaacctctaaattcagtacatagtaaaattcattttctcaaactaaggttctatacataatcggagtaaaccctctgttactgagttaggatagggaaaacaaattccttagagttcatgaaaccacttcacaaatcctagaaggcacacattatatttcctatcatagtaagtacatttaagtacttcatatttaaaaaagacaaagctgtacagaatacaaaaagtgtacatttcatccattaaacaaatttacaacttttacgattagttattacagtagaactgacctaacattcacatctaaataattatcacccagttcaatagagcgaacaaagagctgtgctcatttatttatttgataaggctaataacattttatattcacagtagatcagtaagtgtcttggagctcatattgtaaaataaaaaggtttgggccctattgagtcactgggctcattgttaaataactccttgaaaggtgaaggattctgggggattaaatcattggctatccctggaaagatccaaaactctgtaaggtaactctgttcacttttcagaaacattttaaaattaggtaatctgaattaaactcagcaagtctaatctaaaaggacaatttaaaatcttagagctggaaaagatttcagtggatcatctatcccaaggttttcaaaatatgttccatggaatactaagaatctatggaggagatacagggttctgcaaatttgacttgaatttaattaaaaaatttttt

SEQ ID NO: 131789 - DNA, 1105 bp, Homo Sapiens
  misc_feature (52)..(161): n is a, c, g, or t
  misc_feature (314)..(323): n is a, c, g, or t
  misc_feature (409)..(433): n is a, c, g, or t
  misc_feature (454)..(573): n is a, c, g, or t
aaaacgggcgccaaaaagggacaagttttttcgccgccccgttgtttccccnnnnnnnnnnnnnnnnnnnnnnnnnnnnnnnnnnnnnnnnnnnnnnnnnnnnnnnnnnnnnnnnnnnnnnnnnnnnnnnnnnnnnnnnnnnnnnnnnnnnnnnnnnnnnntgataaagaattccacccaccttttccgaaaatctcccgcccccggggccaaattttaaataaagccccccgggggcccccttgtagggagccacaaaaggccccggaaccccccttggggtttttttaaaaacccccggttcccccgggggnnnnnnnnnngggggaaaccaaccccttttttttgcccggatttcttttggaaaaaataaaccccagttccctttccctttggggcccgggccccnnnnnnnnnnnnnnnnnnnnnnnnngggggccggggggccccccannnnnnnnnnnnnnnnnnnnnnnnnnnnnnnnnnnnnnnnnnnnnnnnnnnnnnnnnnnnnnnnnnnnnnnnnnnnnnnnnnnnnnnnnnnnnnnnnnnnnnnnnnnnnnnnnnnnnnnnccaaagaattgtaaaatttattgtataagtattgcagcttttcagaatgtcatcattgccactaatgattactgatacacaacaagcagtttcttcaggcctgtggattggcatccaaatacagagtcttacgcagcggggacgtgggtgcgcgccccgcatgccacggaaagcttacataagtttaacttgaacagagcttgggaaatggggctgcaaaggagagcagttcccacgccaggaaccaacgtgaaagcattggaatcagcacaacagccatggaatcaggcaggcaggggaggacgggctgtgtccttctgagctctatagtacagcaagatttcaagcagtttccagaaaaacaacaacaacgacattttctttccttatcgacgggatattttatggttctggaagcttcgtgttgcacataggaaaaaatttctctgaaacgtacaattcatagggacgaccaatgaggacaggtaatgaacccggctctcccccagccctgatttttgctacatatggg

SEQ ID NO: 131790 - DNA, 607 bp, Homo Sapiens
ttttgtttggttggttttattttgacattgttaaatttagcttagaggctgacacataaatgttgattaaatgatagaaatacaaaacatatataccaatacagttaaatgtaacagtcacagcacatataccaaacaacgaattcatcacagatatgtacacagatgtgcacaacacacagatgtgccacccctatctgccaagggctcacaaataaatgggagaaacagattccaaaacagatcatggtaatggaatggggtgagtacaaagagaggtccagggtattttggaagtcctgtggaggatgcccagtgtggatgtatgtgttgaggggattgagtagcccaggaagagaaaacctaagcaaaagatggaaggagcaagatagcagtgtttcagaagagctgggcgggagcttgggaggcaaccagaagaataaatgtgtttgcctggcaggatatgaggctgtgcagagaggcaggggccttgttaagaagctatgctctggaccaaggtctccagggagtcactgagggtttaaacaggaccatgacctgaacagaaatgtctaagattcctccggatgctatgagggtgggtagc

SEQ ID NO: 131791 - DNA, 1263 bp, Homo Sapiens
  misc_feature (186)..(227): n is a, c, g, or t
  misc_feature (381)..(381): n is a, c, g, or t
  misc_feature (1173)..(1173): n is a, c, g, or t
ggccgaggacggctgaacaccccgaatggggccgcgccggtcagggaataaaaagggacaaacgcacgggccgcggcgattcggagtcgccgcgtactgccgagggggggcgggcgcaaaaggaggccgcgaggcggaaggagtaaagcgcgaagagtcgccggggggccgcggcaaacaacccannnnnnnnnnnnnnnnnnnnnnnnnnnnnnnnnnnnnnnnnnggtttgcagtgcgggattcaagcgtagaatcccgcagcacatttaactgtagttctgggacatatgtatggtcaggacaacagagcagaagttgataatgctccgaggaatcaggtaagtaaacggttgtcctgagaatgagatcactccaccnccaaggagaaagatcggaacctttaaactttgggttattaaaattaagcttattagtaccttgatgcaagttagagtttcttacaatgactctaaaagtagagccagggtcctggcaagtaaatgaacaagcttttaatacagcttagttatgtaaaatactgtacactgtaaaagatctagaaaactagagcttcaagtcatgttttaaaaaagccattaagcttaattgaaaaaccaagtatagagtacaaaactgcaacaagagccacagtgattccatggcatccagaccccgagtccttcatgcagagctgcagccggtcagtggaagtatcacattggtgtgctgtgtggacacaagcatgtctagcctggggagtgggttgggagctgcatttgggtcctgctgtcgcttttattcttgaacttgaacaggcggcagaatatcaagaaccaggtggtatgaaggattacgctgcaacattcccccctcttctaccccgcccttcaacctctggctattgttactttctgggaattgtgttgggttcttgtaagtttacttgttaaacactgtctgtagtagggccttacagcttggtctaaacggtggtgatttctctagctcgctcatgttaaacactgtctgtagtagggccttacagcttggtctaaacggtggtgatttctctagctcgctcatgtactacagcctcttatttcactgtgtgctgcagatgagccatttagctgaccttctctcaccatccctgctgatgtaccccttgtnggagatctcacatgtcagtcgcttgaaatattctggaagatcggcatagtcatctccataggagatgactttaatcccccttgtcagcat

SEQ ID NO: 131792 - DNA, 1064 bp, Homo Sapiens
  misc_feature (45)..(57): n is a, c, g, or t
taacctcactacaagggaataagcttgcggccgcggctgtaggcnnnnnnnnnnnnngctttcagctttggggctgtaacaggtacaaatatttggtttccctatgatttatagagaagaagaagaaacccagctttctatcagagcactgcaagagaagagtcttacacctgccctcagtgggagatgagaatggtcattatgacttagagaatgctacacgtgtaggttgctggtgtgtcctgaatccacaggcataaagcactccccatttttcctactgtaatgcagattctccggctcaaggtctagaatatttgatcctaagatcaagacatcatgcccttcgaatagtactgctctttgttttcaggagtcacgtgaacacacaactctcctgtattcctcacgaacctcaggattgagcaaggtctttgtaatttttttggttcactttattgacctgggagcaaggtgctaattctgtggtcagtattcaatgtttttttcagtggagctttttctttgggccatatttgccttctaatacattcctgcaatatgtagtggtgatttcccttagcttcctcctactacctcttatactcatctccccaaattatttgcctcccttaaataagttttcctagaaggtaagctggtcaggcaatttgaaaaatattagatcccaagaaatctattccgtttgcattggacttctcggattccatgtgtttgcagcaggactacatcgaactctgatgtgccggattgtggcatgtctgcatgtctcatccatctattgtttttggtaactcagtttggaatttcagtgtctgtcttccctgggttgacattggaatcagcctctcctttgagcttattttaactcttgagcaacataacatagatttaatgtgaacagtttataccaaagggcagcctgtgcctgtttatggatcctctctgcctttgtacttgaagagcgcattttacatttccagtcctttcacagacaggagctccaaccttacgatggagaattaaacttgcttgtatttcca

SEQ ID NO: 131793 - DNA, 1533 bp, Homo Sapiens
tttctcataaagtagttttatttagatttcaaacaaaccaaagcagggaaaagagtcggccacggtgaatccgtccactctgtgctggacgtggctccaggacctggagctgacaggcaggaccgggcccctcggaccgctacacctgggcctcccaggctggtagtgtcaggaaacggccccccgcccacgttcccagcagcgcccccgtggctcctccggggtgcggccagtccggaagctgggggaccccggtagaagtcgggctcagctcccctcccgaggggacaggtgggccggccgctcccaccctgggcccgtccaccgagccccgagtgacgtgagtggcggtggggcagcccctcttctctgaagcacgtgaaaacccagaacagacatggggagggagaaaaagccaaaacgaaacaaccagaggagacggggaccagcacaaaacctccgtgaggtagtctgtcgtctaaggagccacgggtccggccctagtgaggtaaactcggcaagtttattctggtggtgtcaggactcctccgtgccagagtcatcctcatcgtccccgaagcagctgtcggcctcctcctccacctcgccgtcctcgtagtagtcgtcgtagaagaggtctgagccctcgtcgggcgccggcgccttggtcttcacgcagtactcggccagcgtggtgggcaccttcacgccgtcacgctccgcgtccaccttggtccccaggacctgcttccggatgatgtctgtgtactcccgatccttccccttgctctctttccacttcctgtacatcacggaggcgtccacgtttgcgggcgagaaggtgttgggctcgttcaggagggagatcacactcaggagaatggtcctgacgttctgcgtggggttccacctctctgagggcagctccccgctctgggggtcgtccaccggcgggtggaggatggagatacacacgtcccccgtctcgtagatgttagggtgccacatcttggtcaggaaccgaaaggctggtggagagtatgggtagtcgatggggaacttgaggcgcgccttgaagtagccgccctcgtagtaggtgttggggggcccgaagatggccacctcccagttgtatagatcgccctcgtccaccagtgtcacgcggaatccctcgaccggctcttcctgcagccccttgagctccagcagcagcgccttctgcgagctgggcactagcggccgagccatggcggcggcggaggggcccggggtcggagcagcgcggggccgcgcgaccaccgcgagttcgcgagacgggccgggccgcgcaccgtccgggggggagccaccggggccgtcgcctgcctcctcctctgcgccgccgccgccgcccggggaccccgagcgctccagcagctctggcgccgccgccccaccggcgcttgccttgcgacgcgtggcgacgcgtgggtgacatatcccggaattccgaccgtaccagcctgcttttttacactgtatagacaatgcttc

SEQ ID NO: 131794 - DNA, 621 bp, Homo Sapiens
  misc_feature (610)..(610): n is a, c, g, or t
ttttttttccaactccaaattgtttaatctcaattccagaggtctaggccaggccaggcacctggggctctgggctgttctgcttctctgggccctacacccagaacctggccttggcttctcgctcccgggtctttagatcgtcatcttggagtccggttccatgttctcaccgctcctccatgatgactccttctgctcagcctcctcccttgccagtctcagggaggatccttcacagccaattcatccttgggtccccttcccaggggacgtcaacagtctaggcagggacccttgcccccaactcaatccccatcaccacagccagcaaagcctccgtcaggggccctgcctcttcacctgctgcctccacaagccccaccagggccagaccccgcttcctcgggcactgctctgaccccagtgtccagcgggcacagtgggcagccagccggggccggcccaggcggaacacctcacccactgactccgggccaccctggggtcccaggtggatgcggcccacggcctcttccagctcctcctccagcccaggcagtaggaaacggccagcagcctccagtgcctcctcggcctctgaacccancaggggctggc

SEQ ID NO: 131795 - DNA, 865 bp, Homo Sapiens
tttttcatcatcattaaatatttattgagtgcttactgtatgcaaggcactggggatacaaagaggtataattcatggctctgcccttaaggagctcacaatctagttggaaaaacaagacatatatatatatatacatacaaaaatcagtaacaacacagaggcctgaacaattgccaagtggacaacagtacagataataaagaagcaagaaacgagggttcactaaaggctatagtggggaagggagtgcttcactgagagagtgggacttgaactggtattaaaaacaagagcatcccgggcaaagggaacaacactcacagctcagaggcaggaagacactctgcgggtctaagaaatgaagagttaaatgtggctagattggaggtttggtgcagggctaagagagtaatactcgcttagccaggaaaggatgcatttgttttacgcattttgtgcgtctgaggggctggcaggccttgcacgtggcagtgtctatcctgtcagatttgggaggtcagctattaattagatcagctattaatcagactgttctcctaacactttaacttcatggatgtaccttccttcctttcctaatgccaactctgtttcccgggtaggtgtttcactgcctgaatgaaatcctagatctctgtcacagtttttgttcgctggtcagtcagaacctaggcccactggatgagcgtggagccgcccagctgagcattctcgtgaaggtgcgtctgcctggaagtatgcagccttgccgaaaggacagaggtggttttgccaatggagaattcatgatctttcctctgagtcagtaaagcatttcctcaatacacacacgtacagagat

SEQ ID NO: 131796 - DNA, 1639 bp, Homo Sapiens
  misc_feature (53)..(73): n is a, c, g, or t
agctaaaattaacctcaactaaagggaataagcttgcggccgcctgctcaggnnnnnnnnnnnnnnnnnnnnnaacaattttacattgacttttatttaataaaaccacctatttacaattcaaaaaagtcctactttgatacactttactaaataaaattaaaggttaactgtacaagcaattaaaacatgatatgtagcaagtgttatcaggagttttcagcaaactatttaaaatagtcaaaaactgagcagttaaaaagtaccttctgaagtgaatgccgtttctaaatgggatcccaatgcctggcgggagaggcagcctcactctactgtgcaggctggacaaaggtcccggccctgaagtcttagactgtgagagtcaacggcatgtgaagtggagtgtgcagacctctggaggagcagcacgtcaatgtctcatttccagtttacttaaaccacacacagaggcagcctctacacttgccaacagcctctgtgccgaggtgttaagggaccctggccggggactcagaacttagaactttctggcctctgaagaggacccaggaaactggcgagacctcatgtgacccctgaacaggtcatacaagccacttctgaactaagattgggaaggtgttccacactggcatgggatcctgttcagaagcggaatacatcgtagtgctatctggagagactgatgtgaaactgcttcaccaggaacacgcagggctgggcgctgaagacacagaagatccccaggggcaatctgaacacactgcacgaggccctttgccgcgccaccttctgtacgacttaaggaacatctttatgtacagtaagaaaatatatacatctttaaggaacggaacgcccgtatcatgaacaaaaataggtacatctgcgaggacaacagcgcacaggcttcaggcggcccctcccacaggcccagctcagaccagattacattcaacatcttgatgtcaggaaatggctacgtctggaggccaccgggacccccccgtgaagacaggacgcctctcccgagaggaggtgagtcagcatttaaaggccgaggcagaaagtggtctccacgatgctctgcagcctccctggagattcagctgagatgtaggggcagagtccgggaaacgtgacacatgatagtgctgggaaggagggcacggggcagccactggctcagcaacctgctcctgcacctcgaggagcattagcgggtatggcaggcataaaaagtccagagaacgaatgccagctcggctttccttccccagcccctagcccaaggctcctgttacaagctatacagacagagccaaacagccctcaacatcagaaatgagatcagcctgggggcaccccctggggtgggaagtgtggctgagaagggccgtggagtgcagagcaccccaaggcacacatgtacgcatgactaaccaagcccgtgaccgggtccgcagaatgctccccaggaccagcctgccagcggaccgccacgtgggccctgcttccagacactggcctgccctttagactgcgcagctgcaaaacggttcatttctgtgattttggataaccaaagtcctcacacaaagttctacaattagtcaag

SEQ ID NO: 131797 - DNA, 1126 bp, Homo Sapiens
cacacatttcagagttatattattgtaacaaatcagtcaaaattccattttacagttaaatagtacagaagacagtttactgtacaagcaagttgtgcgttaaaaacaaacaccaagcaaacgatagtgcaaagcagtttccacccagctccatcctctcgccagctctgggatggttttacatcagatgagtgcagcaggtgtcacacctcagcatgacaatatgtcacaaaagattggtacccactactgacaggctcacagtaacactatatcaaaacgtcttcctttcctcgtgcttcctacatcagtgtgtttgcctagtacaactttaacgcagccttgtaaataaggacctacttttaccagcccaggctgtctgtacccactttgggccttacagactcagtacggctgccgtcactttttgtcaggggatgggggatggggtaggaagagcaatttatttactatccctgcctctccaggatcaggaagggttagtaatctgggatgagactacaaagtgctgggcactgggaacccaaaggtgcctcccacgctgacctgggaccagctataaccagagaacaggagggaagaaactacaaggacaatggattcatagctgcttcctaagaaggcatggagaggccccttgggtgcagggagtcagcaactattttgaggagatggagactgtttttccagtgaggacaggccaagagaaaccgcagcaggagggaatggaataggatcaccagaaggactgcctaacctgccagtgtgtctctggtgtatggttctggccgttgtgacaggttgggtggggacagtgctctcacagagacaaccaatgaagagcattttgtagggcagatttctgcatccacagaggccgaggcagaaagttaaaataccgcatgctgctagcctttatgagttcccttatgccttttctaagcctttctagggccagagaactctgatgtgagaatccatgcagcctggcccttgggcaagcgcccactttcccattttgcaaaattcaggggcaagacttcacctcggaacgcagtgcagctgagctgcggctggagagccctttacagtgcttctgtcctgc

SEQ ID NO: 131798 - DNA, 522 bp, Homo Sapiens
  misc_feature (19)..(19): n is a, c, g, or t
gcgtgagcattgctagacncgaggactaggcggggcggggactgcaacttggctaggcacccccattcctctgattcccagtggctgctagctggacccagctggtgtcctgggcatgaaagccagggccaccgtccccagcaggtgctgccctcctggccagctgagcatcctggccaccatcagcgtccaggtgcccctactcgcccttcctcttcttcagaagcctttgcggacctgacctgggccagcttcccgcgattccccttccgcttcctatcaacgtccaggacccaagctgcccgcccaggccagcccttgccacttggggcccggtcttcacacgtgggagtctgaccggggctcctccctgaacagtcctgggtctgacgctctcaattatcacccacggacccacacggacgcccggctctgggcggggatggggccggggctgctcggggtccgccaggctgagccccgagctggaggcaggcgccaggcggggtaaccctcggtcgc

SEQ ID NO: 131799 - DNA, 963 bp, Homo Sapiens
  misc_feature (119)..(131): n is a, c, g, or t
gacagcaccgcatcagcatagtactatgaacacgtcgttaaaaagcaggctggtacggtccggaattccgggatatcgtcgacccacgcgtcggactagttctgtcgcgagcgccgccnnnnnnnnnnnnncggtgtacatctgatttactgaattttaaagtctgggatgttagtggggaagaggcgaggtgagcattgcgtgacgccgaggactaggcggggcggggactgcacctggctaggcacccccaccctgggcaacttgcccacggaccccagggcagtgagtagtgacaggaggtagcccggggtgagacctctcacagcaagaagatggtgtggttgctggggcctccctggagagtgtcgtccctgcggcccctgggaagtgctccctcacgacggaaggtttcctgtcagtgcggtcccggggcctgatagtggcggtgggcgggtggggtcacgtgtcctcaaggtcctgaatgcccagctctgccccattcctctgattcccagtggctgctagctggacccagctggtgtcctgggcatgaaggcagggccaccgtccccagcaggtgctgccctcctggccagctgagcatcctggccaccatcagcgtccaggtgcccctactcgcccttcctcttcttcagaagcctttgcggacctgacctgggccagcttcccgcgattccccttccgcttcctatcaacgtccaggacccaagctgcccgccccaggccagcccttgccacttggggcccggtcttcacacgtgggagtctgaccggggctcctccctgaacagtcctgggtctgacgctctcaattatcacccacggacccacacgacgcccggctctgggcggggatggggccggggctgctgcggggtcccgccaggcgaggccccagccctggagggcaggcgccaggcggggaagccctgcggccgc

SEQ ID NO: 131800 - DNA, 631 bp, Homo Sapiens
tgaatcagaacttttatataaaacccaaacactgatgtttacacagaatttcatattctgcaaaagggattttttgatccaatcatgactgtagtcttccatgcttgacaaattggatgtagacaacattacttaaaacttctataaatccctacaattaggatatttatttaaccttgaatattcaagaacattctcccaaatctaaatggctactgtgcattcttgagctttttctgctaagcacaaaatgaacgcaaagctaaatgcatatttttaagtattattcacattttttgttacagaatctattggatctttggctggaaaactagaatttatagcagtttattaatgataccttaaattactcaggacttaatgtagcattgcacttctgtgtacagtaaaactgctttgttttactaaagagaaaaatgtgagtggaaaaaatatgtatgtggtatatactcaaatgtatataattctatctatagatttatatatgtatacattctgtacagtagttccatcaaaatatgtaataattcacaccaattttattaaatgtatttgctttttcaaaatttaaattgagctgctatcaatattaaatgaagttatggcatct

SEQ ID NO: 131801 - DNA, 742 bp, Homo Sapiens
cacatcttttgtaatccaccttattttcacagcttgactaacaaatacaggtaagtttgtcctccatcaaataatccagaataataactgtaggcctgtcattcataagaaactataatttgttatattctgacactggcacttaataaaatgttaacaactaaaatttctctaaaaatttcaatacattacagtaaaggagataaacaatttaagactgtttaaatctgttactgtggaattccaataattatcattttatatgcataattgaattcttaaaattgtggccattttccaaagacaccaatctatattatgacaaactcagaagagaacctatctccttcataagaatgttttttcccccaagctaaaaatttccaacatcctaaacccaattactcttagtaaatgttttggtgactcacactactgaaaaaatctgaagcagagagtcaaaaagaatggaaaggatctcaaccaaaggtaaccacacattcttacactctgcttaagcaaacacttagaaaagtcaaagggatgttttgaacaaatatagattcaaggttatggtacaattctgattatattaaggctttcactatcatgatctcttaaaagtctctccactttagtgttctccttctgattcatatggtgaacttaaggggttattaagggccttgttttggcttctcagtggggaacactctatcatctctgaatgttaaggtgatcc

SEQ ID NO: 131802 - DNA, 529 bp, Homo Sapiens
accaattatattaaatttttaaaataggcaatctaaacatttatttagggatgcatggttacagactaaaactgcaaagacaagtgattaccataaaactgaggatgaaggtgattaagcgttaaaatcaggaggggacataaaggagcttttggggtactagcaaagttcaatttcttaacccacataagttacacgattacaatgagttttactccattactgaccctgtcagttgaaaaggcctagaagcaatgacaccccagtagcaatgaacatacccagcacgcagatcttgatttccaaatgctattctccactaaaagaaatagaagtgcctggctccagcgttgaaatgagcctggaatatctgattgtgctcaacagcaaagaaatcactcaatggatgattaagtcatatcaaaaggacacaggatcagcttgaaggagctcccattggcctgatttaggacaatttgggcatcaatatgaatgatagtaaagaaatatacacactgaagaaaataag

SEQ ID NO: 131803 - DNA, 718 bp, Homo Sapiens
ttttttgtgttttttgctttatttattcagagagtgaaactgtgttacagtgagctaaatttttagctgtacttagaatgtgctccctcctacatttcactctggaaaagtgaagtatcttatcatttcttagaaacctggatgtgaaactagtcaatattaagatcttatacacatcctgagtgatgcccaatttaaggctttgaatagctattcatgtaagttgacttttctgtgcatttgtatcggggaggatccagttcaggttgatgtcctgggaaccagtgaggctctcgcttaaatctatgtgttgaaagtggcattttgttgttgtagcttgtatcatatgttgtttcaaagtagtgtccaaactgggaaggcaagggtttgggctgcacgatattcctcaggtcatatctttcctggttccagttgcccatcagggtacggtttgaataggtattctcattagtggtgcatcgccatccatactggaaaaacttggacatattattccaatctgtccacacttcaccatggccatctgcattaacaaggctgccacagtgtgggtttgtgaggaaacaggcgaggttctgtctctggaagagaaattttgagcagcagagacactgggaggcagccatttcagacgaggtgaaaaaaggttcaaaacttctgcgtcaggagcatgcgagacacagtccaactcttcctt

SEQ ID NO: 131804 - DNA, 1047 bp, Homo Sapiens
  misc_feature (721)..(721): n is a, c, g, or t
  misc_feature (725)..(725): n is a, c, g, or t
  misc_feature (732)..(732): n is a, c, g, or t
  misc_feature (757)..(757): n is a, c, g, or t
  misc_feature (763)..(763): n is a, c, g, or t
  misc_feature (806)..(806): n is a, c, g, or t
  misc_feature (820)..(820): n is a, c, g, or t
  misc_feature (825)..(825): n is a, c, g, or t
  misc_feature (852)..(852): n is a, c, g, or t
  misc_feature (862)..(862): n is a, c, g, or t
  misc_feature (882)..(882): n is a, c, g, or t
  misc_feature (892)..(892): n is a, c, g, or t
  misc_feature (920)..(920): n is a, c, g, or t
  misc_feature (932)..(932): n is a, c, g, or t
  misc_feature (947)..(947): n is a, c, g, or t
  misc_feature (980)..(980): n is a, c, g, or t
  misc_feature (991)..(991): n is a, c, g, or t
tttttttgggggggtttctgtatttccttttacaaatgaaacaaggtggcaacagggtgaggggcggggttgggaaggcatcaggacctatatacatgggacttggagggagtttgaggtgaggacttggggacaggcagggaggggagccctggcagaaccataatcttcatatgtcagtggcagccggggtccctctgaggccccaggggcccgagtcccagcagtccagactagcacccctggggctcctcctccccgcaggatatgttaagtggggtgaggctcgcggctaggaccctgctcacggcccgagtcccggtccttggcctccgaggaggacgatgaggaagaaccagagctgtggctgcggcctgactgccggtaggcagcactcagctcctgcagccgttcaggcgtcggcgcccacttggcaaagccagggtcgttctgtaggaagagcacagccgtgttgtggacggccttgtagtgcatttcctccttcttgcagatgtgctgggagccactgcggtactcatgctcaaaggcaggcaggatcaactggtggcgtttgaagcggctctgctccatgcgggtgagcgctggtgttgggggttcccgccactcagggatgaacacgatgaaggacaggggctccggtgagctctcaagcagtctctcaaagtgagagaccatggcatccatgagctcctcgcagaangganggttggnctcaaatgaacactcagtggagcanatctangcagggccgcgggagccaagtaccgtctgtgtcggggaagcanacactactggcggnagtancagtgaggggtgaggcgaagactcgangctgacgccnagagtcggtggagggctcanaacatgccangcgcgatccctgcagcagtccctcgtanagcccacgcganatcatctgtacgtcngagagaacagaccggggcagacctctcaagcanatctcatgcanctgtacgtaaggagcacactgctgagtattgcgctgacctgacactctccctatcg

SEQ ID NO: 131805 - DNA, 2030 bp, Homo Sapiens
ccttgattcaactgtttactaatcagaaaggtcggtatagtcggtcctttttctactgctggcaagtgatttttgtatattttattacaaataaaacaatattgcttgacagcatcatctgtcatcttacaaatatacaactacacagtcctaaagtaatagtatgtctctagaactgagcttttcttaaaaacaaacaataactatactattattaagtcctgcaccctaaatctatacagcagctttaatcaatgtggaaatgaaattatgatttattaatttacataaaattactttatacattaaagaataatttttcaaattgttaaaaaaacaaagtctgaagctgtcattattgggattcgtgggacgtggtttgctcttctatcacctgcttcacaatttctgccagttttagtcgatctactttatctgtgaatccacgaccattccagctgaagctctgcagagtatctcttaggagtttgcattcccggttatacttccaagcctcctgcattacttcattcagtttctcatcttcattctctccagcctgggggagaatacactgagcaatcacatctcggagtttttccaaggcaacattggaatcctcggctccattctcatggtcgtggatatagacactgtcctttggcttggtgccaagtaacttcctcttccgcagaatggggttgttcactgagtgcaggggtttgaggctgactttcagatcctggattctcatgttggccaactgttccgcgtgagcctgctggattcctgcaaccactgccttgtccatcatcagctgagcagaaggcagcacattatccagggcctcggtggaattgagccaggggtggtccagcactccctcgatggtgagtctctcctccggtttgaccttcaggagcttcctcacaacatctttggccatctctgagatctgactccactcttcctctgggaactcaaaactgcctgtcatgatctttcttcgcatatcctttgggatagtccggctgtggtgtttggagtaaaaaggagggtatccgcacagcatcacatagataatcacccctagggaccacaagtcacagctcttgttgtaagtgtagggcgtcggtgaggtaggtatgatgccagatttctccttctgatgccttctttgcgcctccagtacctggggtgctacataataaggggtgaactggggtgtcatcaagtcaccttggtcaatcttggcaaatccaaagtcacacaacttcactggggcatctacagagttatccttaaaatgcagattttcaggcttgaggtctctgtgcgctatgtttaacaagtgacagtgccgcagagccaaagctatctgctttgttacttggctggcttgcttctctgtaaagtgccggtgctggctgattctgtgaaatagctctcccccttccatcatctccattacaattaagagtcgggccctagggctggactcatggggaaactggacactgttagcaaacacttcaataatctgaactatgtttgggtgtgtggcacacatcatgtgcagacgtacctcatttctagcttttggacgatcaagaagaattttcagcgcaaaccgttcttgagtagatttctttacacagactctaactggaccactaattccagctcccagcttctgagtccaattgatactgtattcttctaaaatggaagtttccttgatggctttgtccatgtcgctctcctccgacatactcagtggggcccccacagccgggagaggcggaggctgctcagcagccctgtccccgcgcggccgagggagcaaagggctcggcactcgggcccctgggcctcgtggcgacgggcagcagccgcccctcgggaccggtggggatgaggaccccggcgccggctctgcttcggcgggcggctctaggctggcggcagcagcagcggcggaggcggcggcccctggggacaggtctttgtgctgggccccacgcggccgc

SEQ ID NO: 131806 - DNA, 680 bp, Homo Sapiens
  misc_feature (601)..(601): n is a, c, g, or t
  misc_feature (629)..(629): n is a, c, g, or t
acatgaaaatcttccatcctctccatacatcccatgctatcctccattacccaccctgcttggcccaggctatgcctagaagcaagtcaaaggcaggtagaagcttgggctgaggctgcctgagatgcctcaagcactctggtccacagagacagtcaacaagtgaccgtggtctccaggcccagaaagagtctgaccacatctgatcatggctataaacaggagcctggcaacaggagcaggacctgctgacaggatcagtgggctggtcatgtcagctcccagtcgtaggagtggggcagggtgagggcaggaagagcagtctctgggtgccacactcatcctcacctgtttgtctgcccttacacctcaggctggtcccgaaagtggggctctgtccacaaaacccctgcctggacagtccttgacctacaagttgcaggcatgtgtctggccattggtcagactcactgttctcacgaccacaggaaggtgtccagcttggcctggaagagagaaggcactgtcttcaccctcaccctctgcttaaccttggtcttgggcttaacaggcaatgggcggatcatgactgtgtcagtangctggatgaattttgtccggccaccgangccatcgaagcctgtcccttacacatctttgctgcaagaggactctgacct

SEQ ID NO: 131807 - DNA, 717 bp, Homo Sapiens
ggctctagactctgattcacagcctgaaccctatctcatgctgaaaacacctcccaccttcccaccaagagccttaacgtgggtcccacaccgctaagaccaagcaccttggatattggtatctatcttgatggaattttaggttgcctcatttctttttttcttgggccctggtggaaataaacctgagtgactgctccccagtgccatcacttgggcaggacactctgtcttagtttctccatgctgcctgtacaaggtcagtcccctatcccggctagcttggggcttcactgtggctgacaagagtattattactacctacacttcgtacagcacacaaccagaacctagagaaacttctttcaggcccactgatctataagcacaagcctccttagtgaactctgccctaaagtcctccttccagcatttggaagcattccaccatgaggagcaggtttaccttaagtctttgtccactttcagtttgcaataccactaggagagaaaaggtctggatgaagggatgaagatatcaggctgcaggtatttgaggtggctatgggggaagagaagagcaaaggagagggcaaaagaccaggctatggagaggcaggggagggaaaatcactgcttcactatttccattgggcctgacgctgagtggatcctggattgtttgcgtttgggaaggagggcccaaagggagaacag

SEQ ID NO: 131808 - DNA, 1121 bp, Homo Sapiens
ttttttcattttaaaaatgtattttattcaacttggaaaatgagtacaaatccctgggtgttttttgtcagggaggagtggggagtaggcaggaaagagaagagggtaggaggcaaggtaaggtatgagcatcacagtggctgcctcaagaccctgcccagggagggtggggtgggctgggggttgagcacggagctcaggtccggaggaacaccatggtgaggaggcccaagacgtaggcggccaccaacttttgtcccagggagacgtgcaggacttgaggcagctggctgccgagttcgtccgggagtgggagcagcaggaaggccacagacacaatccccgtcagcaagaagaggaggaaggagctggtggccagttgctggcgggggtgctcctggaagtgtctggccgtgggtggtggtgtcccagcaggagccctgggcgaggcgctggatctggctgtccctgaagctcaagggggtacgctggggctctcagaatggaggtaatgtccttgcgtcccaccactcggccctcagctccttcctcagacagctcaatgcggaagcggtcctggacatcatagtggctgggaatgggtgccacatggcgaatcacaatgtcaatgcaagactggggcttcacatatccctctgcgtcaaacaccgtgtatttggcaggtgctgtgcacaggactcggaagcgaagcgcagttcctgtggggttatagagggtcagcagctgtcggggtccgctccgctggtccgccctgaatactagatccgggggaaagaccaggaccgggacaacgggtcccaagggaggaggggcgccccgggacccccgcccagggggccccggacccaccagctcctggtcctggggcgccccacggcgcatgcaggctctgggcggtcggacatccgagggcagagctcaggggacagggcctggagtcagaggcccagctcacgatctccataagccccgccccgccgctggcctcgccccttccgggcgttcccggacgcccgcctcctctctccagccagactccgcccgctgcagcgggcgcctgcctcgtgccgagatcgccacccaggcctcgctacctagga

SEQ ID NO: 131809 - DNA, 579 bp, Homo Sapiens
  misc_feature (79)..(98): n is a, c, g, or t
ttggcggcagcccgagggcaggtttattgacaacctcacgggacacaagcaggctggggacaggacggcgacaggctcnnnnnnnnnnnnnnnnnnnnctacctgcggtaccagatctgcagcctccgctcccgcttgatcttcctctgcagctgcaggatgccgtagagcagggcctcggccgtaggtgggcagcctgggatgtagatgtccacgggcacgatgcggtcgcagcccctcaccaccgagtaggaatagtggtagtagcctcctccgttggcgcagctccccatggagaccacgtagcgcggctccggcatctggtcgtagaccttgcgaagcgctggggccatcttgttggtgagtgtgccggccacgatcatgacgtcggactggcgcgggctggcgcggaagaccacgccaaagcggtccatgtcgtagcggggtgctgccatgtgcatcatctccacggcgcagcaggccaggcccgaaggtcatgggccacagagaactccggcgggcccagttgacgaggtcatccagctttggccaccacatactcgccccggctgctgggtt

SEQ ID NO: 131810 - DNA, 795 bp, Homo Sapiens
cccgagggcaggtttatttgacaacctcacggggacacaagcaggttggggacaggacggcgacaggctccggcgccgcggcgccggcgctacctgcggtaccagatctgcagcctccgctcccgcttgatcttcctctgcagctgcaggatgccgtagagcagggcctcggccgtaggtgggcagcctgggatgtagatgtccacgggcacgatgcggtcgcagcccctcaccaccgagtaggaatagtggtagtagcctcctccgttggcgcagctccccatggagaccacgtagcgcggctccggcatctggtcgtagaccttgcgaagcgctggggccatcttgttggtgagtgtgccggccacgatcatgacgtcggactggcgcgggctggcgcggaagaccacgccaaagcggtccatgtcgtagcggggtgctgccatgtgcatcatctccacggcgcagcaggccaggccgaaggtcatgggccacagagaactccggcgggcccagttgacgaggtcatccagcttggccaccacatactcgccccggctgctgggtttgggagccacggctctggcctttggcagggcaggctgggtgctgcttgggccatcggtggccacgctctgatggacacctcgtgcctgcacagccaggcccacgctggagcgcagaccaaggatccggaagccgcgcaggccaggagctgacagcaccgccatcttggcctcggccttcagacaacctctgagtcggcacgagcctcgtgccgattcacccaagcct

SEQ ID NO: 131811 - DNA, 877 bp, Homo Sapiens
  misc_feature (774)..(785): n is a, c, g, or t
ttttaatttaaaaaaagttttattaaatcatttagacttgaaagaagtcacaagttaacacacttaagtgtgttctgtacaccaccaacccaaatggattgatttcagaatttttataaataaaacataaacatatttacagtgaaaaataaaaacatgttagcaagtgagatgattaaactgttacctataatcagtttgggggaagtaccaacctacaggattacatataagacacttaagatttcattaggcttaaaaagtccatagttgaagaagttagttgtaatatatatgatccatttcttactacggcttttttcctcccaaaactagacctttcaaccaatttacataaaaagcttcattttccctttattggaggtaaaagtacaaaaagctgtaaacccaccctagaaccatctaaggaataaagctattgaatgctacaaataggactataaaactacggacataaaccgttatacagtttgtgctacttgtcctccaaaatagtgcagattcctaatttacccgccagggacaaaaatggagtcagctttttctagaaatcagtttcaaaatcatcatatctctagaaagcatatttctagaacaatacagttaccacacagggggactttccttcttctgcattataaaaatatatccattttagttctcactatatatatatattagggattgctgctacctccttaggcaaatggtgagggctataaagcttggccagcagccagtttcaagagactnnnnnnnnnnnngttggccctttccttaagtatagcaaaactcaggagttggctcaaattaggttatgcccccaaatccagcttaaatttgatataaaaaaagt

SEQ ID NO: 131812 - DNA, 743 bp, Homo Sapiens
gcactttaaaatatttaattcatttaatccttacagaaaccctgtgacataggtactataatgattcccactttaaatataagaaaactgagacccaaagaggctaagcgacttgtccaaggtcacgctgctagcatgtggcttctggctcaagtccacagccctaacactacaatctgctgcttctctataggatatttctacccagctctcagacattttggacaatgtcaattgtgtcatcaaccgcttccaggaagaattaggatatgatttaaaagaaaatgccaaatctcagcagagagatccaaagggcaagaagagattcatcttgctggaaaaaaattgcctccttctccaaagatgctatgatgaaggagaagcacctgtatgacattctccgctggctgggtgactggggtgagtttgcaggctgggcaccgtgcctcctctgggaggggagtgtgggtggcgagcacagggacagcacaggacacatccccttctccagtgaagcattccaccactcgtgtcacagcacatcacctccatgctccccatcctcagagaacccatgtccagcggttctcttcctcaggaatggcgcccatccttgcttccagcctaaggctgagactccagaaagctgaggaggatgtggggtgtgaacagctggttctgtggatgatgccaggagtaggatttgttttctgagtcgcagcttaagatatcgcgaggatgcc

SEQ ID NO: 131813 - DNA, 739 bp, Homo Sapiens
gagctttcctaaaataaaccatttattgaaaaaagaacctttttcttaaatttcagtaatcagccttttgcattacaaacctgcagcttgccaacaacaacaaaaaaggtaaaggtttcacagtcagtgcactcaacaaacaggagattaaaaacaaggtatgggacgcctgataacactacaacttcttttgaacctagaaaggtcaaaacactacgctgatgtcacggttctcagtcgcgcgagacacggaggagacagaggcgatggtccgtgtacagtagtaatggcacttaacatgcagcttctttaacctcgtggccaccagccctccagagggccttttgccacatcagacaaacaggagcagcaggagaagtgacgcttgtcacctgtgcagtcttcagtcttggaaggttaaaaaggcttatactgcttctcagcacagtctttatgtaaatattacatacagtagtgattaagagaattttccaagtccatattctactaggcttcattcttcatctgtgcaaaccttgacaaacgaatggtcgaggagctggctggcggtccatctcatctattgggtcactctcaaggcagtgagaaaggaagtcctttccttcagggcttaatctttcagggattggtggcttatgtcccatccccactttatacataatttgaaagttgtgctcatactcatgccaaggcctcttgccagtcaccatctctatga

SEQ ID NO: 131814 - DNA, 1007 bp, Homo Sapiens
  misc_feature (248)..(265): n is a, c, g, or t
  misc_feature (822)..(822): n is a, c, g, or t
  misc_feature (837)..(837): n is a, c, g, or t
  misc_feature (862)..(862): n is a, c, g, or t
  misc_feature (864)..(865): n is a, c, g, or t
  misc_feature (867)..(867): n is a, c, g, or t
  misc_feature (901)..(901): n is a, c, g, or t
  misc_feature (911)..(911): n is a, c, g, or t
  misc_feature (926)..(926): n is a, c, g, or t
  misc_feature (972)..(972): n is a, c, g, or t
tgtttttaaatgtggttgctttattttgcacttttaattcacaaaaagctttacaatatctacattccacctgttgataaccaaggctttatatggcaagacaatgaaaattttatcacatcaactgggcatatgcaaaaacaacggataatttacaaacaagtctttttaatcaagaacattatgtaaaatacacactctggtaaacatctgaattcatccatcctaaaattagactttaagaggcnnnnnnnnnnnnnnnnnntcaaatagattttaacactaacaagcctaccagaataatgctgatggcaagccataaacagctttaaatgctgactgtaatttggggaaggggagaaaaagaaattatttgttgtacctatatttaaatacatctgttagtgagacttctctaatttaatggatttcaacaaagtggacaactcctgagcctttggtagtttctcaagttttgtttttaaacttgtgacatcttgactaaaggaactgaaccctcggaccagaatacttatggtaaggaaaaacccccagggaagcggggagaaggagaaacaagactagaactttcttagtctatctaaggtgggtaacaaataaaatcactgctcatatgagggaagaataccagagttgttatgtgggatttagcttggcttatgttttataaaagctaaatacgtataaacatctaaatggcaaaaataaaatccaaggtggtctcatttaggaaattaaaaaaattgtccctcaatagcttttaaatttgcggaatggcacatacatattttgaggcacccnatatagatctgttanattatgcaactgctactcctccttnannanatttttatgtactctagggtaggtatatcagtanaggcactaanaatatgccagatcangtgagagagatagaatgggaagagaaggaggatatgaattgggtantagtataacaaatgagtttaaagtcctcactatac

SEQ ID NO: 131815 - DNA, 932 bp, Homo Sapiens
  misc_feature (873)..(890): n is a, c, g, or t
ggaccgtactggagctctatgagggcactgagcaatacaacgccaccgccttcagctccctggaccgcccccagctgccccaggtcctccagcagtcctatatcttcccgtcctccatcagtgccatggaggccaccatcaccgaacggggcatcaccagccgacacctgctgattggactaccttctggagcaattctttcccttcctaaggctttgctggatccccgccgccccgagatcccaacagaacaaagcagagaggagaacttaatcccgtattctccagatgtacagatacacgcagagcgattcatcaactataaccagacagtttctcgaatgcgaggtatctacacagctccctcgggtctggagtccacttgtttggttgtggcctatggtttggacatttaccaaactcgagtctacccatccaagcagtttgacgttctgaaggatgactatgactacgtgttaatcagcagcgtcctctttggcctggtttttgccaccatgatcactaagagactggcacaggtgaagctcctgaatcgggcctggcgataaagaacaaagactgtgcctaaaagtggagagccaggggagtgtgggtcagataagcagctacagctgcagtttggtggattggtggagtatgtgtgtgtgtcagtgctcagctaagaactgtagggaagatggatgaccttcacgcagaactccttttgggatatacatgatgcagaaaggatcctacatggagagagacagaactctctcagctgacactctcagagattcctgatgggctttctcttgaagtccaaaggcgtctgcattgtttcctttctttgcccatccatgaatgttctgnnnnnnnnnnnnnnnnnnaataagaattccggctgatttttgtgaggcctgtttaaattg

SEQ ID NO: 131816 - DNA, 810 bp, Homo Sapiens
tttcttttctaaatcaatacaatttctcaaatttatttttttcttaaagaagtacttctaatctctgtcaaaagggaggtgaggaaaggtccttcctcccttgtaaacactgaaatacagatctgggaaaccaggatcaacacacacaaaaagtgcattttacaaaatatcaactaaaatatattttacatggattatgcttccattgaaattctaccagctgcattttcaggttcgaaaaaatatttccacatctaagagatttcaaaagcatttaagttcggggcagccaagaccctacctcctgggaggagggccttcatctcctttcctgctaggtgaggctgggctccttggcagcaagggcccagaatgagcaggctccaaggctggctctgcagagcccccactgccactctgccaacctcatttactgccccatcctcccagacagacaccttcctccaaacagcttattcaatataaggagatccaagtcccttcccttcaggtttgggatcaggcttcccaagcataaattcacctctgaagcctccaggcctcacccaaacccaatgaccaatcaggagcaactcatctactaagggacagggcatggcaagttgggggagccctcagggttcatttccacctccctctgcagcccctgcccagctgtcctcacccagtgccacctcctaagcctgctgggttcatctgcccttcctccctaagggaagacccagggctgcagttctcagccccagcccctgcccccaggggtatgcccttgtggaagtgctcagctta

SEQ ID NO: 131817 - DNA, 632 bp, Homo Sapiens
  misc_feature (564)..(564): n is a, c, g, or t
ttaaataaataacttagaaataataaataggggccagctcccatgagtgagtacaggccagttccagcacaggcactttcaaccaagcaactgcaatatgtgtccttcaaatgctgtccctacagggcctgggcgggggctgatgcctcagccactgtagtgttcatcagaggaggggtcccaggttcgaggcctggccagtgccagagtctgtgagaagtgggtccgaagggctccatagctgaggtctctggtgtcttttaggctgggatccgcagggtgagggctctggggctgctagtcagttgtcccttcacctgttcggggatgatatccatcacccaccggtagggtcctctcagctttgaggccttcgtccctggctgaggccgctggctagtgggactctgcgggagggtcccaggcaggaagagccaccggtaagggtccagtctgcaaagccctggagcgagccctcagcccaggcagccgcaggcggtggcggagaggcggtccacggttctccaggtgctgttgacgtccatgaaggagaccgcttcgtancgcgtgggtcggcagcagggctggctgacgggccgggagcccgggggcggtcgcagggccccggcgcc

SEQ ID NO: 131818 - DNA, 1068 bp, Homo Sapiens
  misc_feature (42)..(61): n is a, c, g, or t
  misc_feature (822)..(822): n is a, c, g, or t
ccctcacctaaagggaataagcttgcggccgcctgctcaggnnnnnnnnnnnnnnnnnnnnagggggttaaatgtttattaaatcaagcttttaaattatatatccacctacagtctataaacaaatatagtacacatgtatgtaaaaggctagcagataagaaccagtggaaaaactaaagttccctttgcacaccggcacctcatcacaacaccctcttggtgtggatgccatggggccatgctgtagtcaaaagttaaatgaaaaaccacaagtttagtttgactccgtctcctagggtggatttcattcagatatttgttccatattataggagggtggatcctagcaaggcaacagtgtagtttttacattcacagattggctgaagtagtacaaattgagctgctaatctaggtgtctccctccctgttaccatacttcataagaaatgtgaattaaaatgaacaatggaccacaggtggttataaaaatagataactcgcagagtcataaatatctacagttagtagagcagaaacttctaaaatttacctttttccataatgtgcagaatatcctaagtatgttcaagagacacagtcagcagacttcagagtggtaattacaagggcatttgtaaagaaataacactcgagtacaaacccagagtaagaagctgaatgcagatgaaaatacgcaaaacacgcaaagttccaactcctcacatctcattatgctacttactagacaccacaattagcttacagcctttatatatcttttaaagtactttttgttacctgtgtacaactttaacnagattttcatgagaaagcaagtgggttatggtggcgctaaactgctgaacttggagtgtttgtgtgcttcgtaaccctcgtgcgaattctggctcgaggggcaatcctatatgagtcgtataatcgtatcatgtcaactgttctgtgtgaatgtatcgccacatcaacacaacagcggagcaaatgtaactgggtgctaggatgacaccacatatggtgcgcatgcgcttcatcggactgctgcag

SEQ ID NO: 131819 - DNA, 482 bp, Homo Sapiens
tccacctacagtcgtatgaacaaatagtacacatgtatgtaaaaggctagcagatagagaaccagtggaaaaactaagagttccctttgcacaccggcacctcatcacaacaccctcttggtgtggatgccatggggccatgctgtacaagacgccggcgtgtgtcattctcagttcaagcgatcttccccctagccactctaaaaccagtagcctctagccctcagcagaagccaaagactggagtgatgaaatctgtttttgaatacatttactaagagtttgaggtgttcgttaaatcacctttatggcttcttaaggaaaaggttgtcaggggttcttacagattgtataattgggtttattattagaccatgagcaagcaggtttggacaagtattaaagttctagatgttcagggggagttagcttgcagtaaatggagaagttctaatgatactacaggataacacgttcgcgaa

SEQ ID NO: 131820 - DNA, 596 bp, Homo Sapiens
ttttgacttgtagacaacagccaaagtttatttaacgtgggaatgcttacaataaataaagcagaggggtaaagagaaacagaacagtaccttgaggacaaagaaaccccaaacccaacacaaaaatcaactcctgccttcttctgtatgccccaggctctgagaagccactgttcctccccagggtagagagactgcaaggccggcggccagcagtgcacatccccaagcagcagctgggaccctgggtcctgaggggccactggagacctaggaagcctttgcaagggcaaaacccaatggcaacatgcccacgaaagcttcaagtcagaacgtgggcctgcaaaagacatttctgggctctgctctctcctctaggcccacacacctgctgaacagacatctgtgcccaggcacctcccagaagcccctttattataggacatctactctctgttcctgtcctcactggcccctcccatcatctctctgaagactcttattatggctgcctcctaattcttccagagcagccacacccaggactgtgacgggctctcacccactgtggggtcacagacaggcatggggctggc

SEQ ID NO: 131821 - DNA, 1433 bp, Homo Sapiens
ctttctggaattcagtatttattttaaaaagtgcataacaggagtaagagaggcttaccaaaatatttcaaaactcaagtacattttcctcatctccaatattttagaacggaataaaacataaactgaatcaaattttgaaactgtctttgacaagataaaaacaccaaatatctacttaaaattcattttgaaaatacaatctcagataactcaaaccaaaagtgctgaccattggttttctccagaatactcagttctaaatgaacaaaaatttatatgcacttttctagattttgagaaacatttttgtttcattagaaaagttatttctaacaatatattaatagagaaatagcacaattcttattcagcgcctaaatttttacgagcgaaaatatgaaattttatttttatgcatagtttatgtattgatccatggggcttacaaatagcaacacactcttgggctgatactatcgtggattttgcttaaattatgagggcaggaaaattttaaaatcccacaggtcacaactgaatcacattaactggctgatttagtaaatgaagggcaattctaaaatgcaaaataaaaatggaattaaggcagctttaaaagaaaataaaactcatccacccaaaatagtgctacataattcattacttaaaaagctctctgtggagtatagacataaagccaaaaataaaaacaaacattgcagttgtgatgcagcatcaggtgctttttacttcagtgaaatgaaaaataatggtcacaactcaaatgaatgggaatttaatatgaatatatgcaccttaccagagatgtttgctaccaatgatatcttagcaattccatattccttacaaagtcagtataattgttgtaaaaaaatcaactgtggttctgaatacccattcacagttgacctcaacaatgtatctgatgtaggagactgagtatccgtgacaggcagaagcatgtgatggtcctcagtcccaagtggaagagctaatggtaaagtcatatcagaaggcttcacatccatagtttctgataaaggacttttttgtatggaatcctgttcactcaaagtatgatcctctgcactggagtctagagttttatctgcaccagaatggacttttgttttgtgcttctttaaatttttaatatctgtgtaagaatttccacataattcgcagataaatggtctttctcctgaaaaacaaattagaagtttaaatttcaatattttaaaagctgctagctaagacaaaaatatcaatgtttatgaacacaaggcaaaaattattatagtgtttaaatttggtttcaaattgtcactttaatcacctggttataatatagtgaaatgaaagattctatacaacctagacactcctttatacaaaaaatctgtatctca

SEQ ID NO: 131822 - DNA, 1057 bp, Homo Sapiens
  misc_feature (1033)..(1033): n is a, c, g, or t
  misc_feature (1035)..(1035): n is a, c, g, or t
tttttttccccaagatgattttattgaatgcacacaaagttcatccttggggtttgcaaaaagtcccacaagtggaagaggcagcagtgctcatgtgaacatggagcgctcaccccagcccctcagcacagccagggggccttggggtacacaccctccttccctggggccgccagcacctcctctgccctatcccggatggtgcctgggggtctgcccagggtgcgaaactggaatctatgctgaaacacctaagtgcccaggaggtgcccccatggcccaggagtgacacggctcccccagcagccagagcccattcctgagccagacaggtcacggttgacccaggaagagccatgtgccaggatggccgccaagcctcactgagcatgtgcagcagtggcagcctctcagacatagagggggctccctgggtgacatctccagagacccccttgtcccccagacacccctggggtagactgtgtctgacccttcacaaataggaaatgagagctcgggtcgaaatgctcacaatttcctgcgtgtctcagatggttgttttcttaaatggtcgggccatactttaacttggtttatggaaatgaatccatttcaagattcatcaaatcaataaggtaaaaaggaaaaagaaagataataaacattcaatctaactttggtgacgttggcctcaggaatttctgtgctggcctggagctctgggcaggtggggagggactggcttctagccctcctcctgcttccccgaggcagagaccaagtttgtcctttctacctggccctggagaaggggctcagggccactgcctcgttccaacccaggaaggccagctgccttccacatcagtctgaggcattcagcttgacctttttgggttgaaatctgggttgcagcttctcagctttgcccacaaagctccagatgacaagaggctgagccccagctttgaccggacgcgtgggtcgacgatatcgcaggaattccggaccggtaccagctgtttttttntnccgcctgggggcgggcaaatcg

SEQ ID NO: 131823 - DNA, 703 bp, Homo Sapiens
  misc_feature (17)..(17): n is a, c, g, or t
tgacccagctcgggccnccgaccctccagctcctgactttgcctattgttcctccagttcctcctcttcgtccctcagcgtcctgggtggcaaatgtggccaacctggggactctggccggacggccaatgggctgcctgggccccgaagccaagccctttccagctcctccgatgaaggcagcccctgccctggcatgggggggccactagatgcacctgggagccccctggcttgcactgaaccctcgaggacctgggcacggggtcggatggacacacagccagaccgtaaaccctcacgtatccccacgcctcggggcccccgccgcccctccggacccgcagagctggggacatggcatgccctgcactcagtcaccccgagggctgagccagattcctggatgtgatggaccagctcagctgtccccagaccccatcccttctccttttcctttgtggccttaacccttctgcatcagggagccccctctgcctcttgagtaccagacctcatgggaccagaccccttgggaccacatggcacaatgggacctctgttgtacattccggttgggggatgagcgttgctatttaattactaatattattgaatgccttagaggaggccgggcgagcccggtgttctgaagacctgtggcccagcagagcctctgacagtaaagttttactacagcaaa

SEQ ID NO: 131824 - DNA, 1279 bp, Homo Sapiens
  misc_feature (480)..(498): n is a, c, g, or t
  misc_feature (661)..(683): n is a, c, g, or t
tttgaaagtcataagtcatttattgaatgaatagtatatgcaagaataccaataaaaggaaactaatactacaaactacaattttgaaaataaagccaatataacaggaacaaaatatacataacatgagaggaatgtttgatttttgacccataatgcattccttatctttacaattaacctaaatgtctgttagaacaaaactgtataccttggtctaacttcagcgctttttttaaaaaagcaacaacactctagaacactttttcttttgctttgagatatttgagattcacacatttgttcaagtacacagattctgattcaatagcagatctacagatcttgttatctcttaatatcttgagtagcatgtacttctgagcaagtactatctgaaattctaaaactgctgattcttgaaataaaatttacttcagttgtgggtttttaataacttgagatgaaagtaaaattcannnnnnnnnnnnnnnnnnnaggaacaaagagctcttcttaaaagtatagaaactcaagtctatctttctactctaaagaacatttcctactaacatttctggtaaggcaataaatgctccagaataatcttcaatatacgcttgcaaagattacactgtttaatatcaatagcaaacaaccnnnnnnnnnnnnnnnnnnnnnnngacgcttcaaaatttcaggctaaaatatgcataaaagacagtaacggcagtattttttgaaatgatgtaaatgttatatacttatcaaataatgtcatgcttattaaaactacagttaaggacttaagagatgtacagtaaatacactgctgaggtccatttttctaaatattaataccacaatgtaattactacccagaagatgatgatgctacttgggaacataagtactgtacaatttttacattgtaaggcacttttactcagcatgtgacgaaaacatgattagagaatcaaaacattggaggtttacaaccaaacatgatttttcatgtgaattcaatttacatttgaatttttaatgcgagattgtttagccaatcacaccacagtgagaaaaacaggtagtcagccacttatctagccaaccaaaaggtaaagtgctattctggttgctagtggcagaaaaagggctgaagaaacccatacaaagtcatacattttactacataacaaattcatcaactgacagctatagtatttgaactcctttatataattattgactggccatgattacccccggcaccatccat

SEQ ID NO: 131825 - DNA, 2632 bp, Homo Sapiens
acagctttccctgtggcaccctccacccccaaccagtgtctttgagcttggtgagactctgcatacattaatatgaaaagctggaaaagaattaagggctagcgatttgtacactgagtacttttaaaaaaataagattgacaatggtattcttttcaatatatggatagaaataatatctaaaatctgttctgaaaatattcctaaatcctggcagagttctgccccagtctaatgtgataaaatgatcctcactgactgagcttttttccctccccactcccaaacctttgaaatttcctgtaacaagatctgacctgtaaagatcccatatacatggaacttctgccaactcccctcaaataatagaaaaatcacagaaatggaaccatttaacttgctgatacaggtttgattttaatcacgtaaagtggaagagtgctttgatctcagttgctaatgatgatggactaatctttagaagaacggaggccttgattggtgatttcatgggaacaaaacagatttctgcattacctctgcctgctttgtgggtcccttagttggcgtacactttctgatagtgcctgccttatgaatgcctgaagtctaatcctgaccttactttgttgcccataaatatctttcaaattgaatgcatcttgcctcttcctgaaactttctgtaggcgtctgtgtagactctgatttgccctaagttcaaatacacagaaatcagctgccttgggcttggcatcaagttaatttcagcaccatgtatttgttttgctttggttttttgccttaatttctgtgctcagatgtcatgccaattacttggtaaagcttgcagctaatagagccacatgtttattacgataaaatgatgtcagtcaacatcagtcctcagtgatgggatacggtagagcactggttatgacagtgatcactggggaaggagttgtgtcttctgtaagttagtgtcttcgggtgatttaatatctgcataactaatcccagaggaccccttaggagttgatgtaatgcctgtagaaaaagcagtgcgcagcagtagcgcacagaagagtcgaagctcaagagaacagggaacatactggtttgtttcaccaagtatatatcctagctcctcacagttttaccaaaaaaaatctgtgctcaatacatgttagctactgtattatagtaggtactccataaatacttgttgaatggcattcttgaagagtcagccaaagtaggagagagggcagagtggctttaactggctataagtgttgctgcccccagtttccccattcagtgctagacaccaccatacttcatggcaaggactgagaacacccagcaggatctaatggtgcacaagctcattttaacaatataaacaatagaatgacagtgagatgcgtttcagcaaggccagtatcacagaagccattctgtattttggtttttgtagcagctgtgtaggtaggctaccagctccttacttccagtaagtggatgtctccattaatttccagcgtgtcaatactgctgagctctttaaatctgtgtttgtactccaggctgtgtacgccatttactgcaaccttgaattctctaacatcacagtaaattatcatctcaaagtacatcccaggactaaatgggaaagaggtaatatttctctcttcttctccccaggactcctgaagaaaagaatttcttacaaatgctttaatattcaggcgtgggttcaagtgtagagcaatatcctttgattttcctgctagtaggtcaacattaaagcttttggcatttgcattcacttctcctttaacgacgacagttcgtccagggcccatgggggtgttcaaccttgcagcgaatggcaggctaagctggggcgtgccagactttggaacattttctctacttatctctgtcagttccagactagatgcttgggtactttgtaagtccgagctgaagctaaaaccaattgagtgaatattcactttgccataaatgcccagagtgtctattttctctgggccgatcctgtggccatagagcagagtatgttttccatttacagccacctggaatttgtcctttagcaccataatcacgatctcaaaagacttttctcttttgaaaggcgtgtcataggtgatctcttcccgtccccatttttcatttatccaagtattgcaaacaatgcagccggcccttttgaaacgaggattgaaatgaaaggccacatcggctcgaggtttcatgctgctgccatctctgcagatccacctggaatctgtctgcgtcactaggaacatgcccacgtatcacaatcaaagttcacaggactccagctgatcaggtaactggtgccaacctacgggattaccgggttatagactgatattctgtagggttgtattaaggacaacatcattcttttccagcttcttgtcgattggagtctcttctgtgtatgaccgtaagattttaggcaagtttcatttaaaggttacctggattgacacttgaggcactggcccccaagactggtgtttcacggcgctccagcggagcaggttgtttcgtacagcagctaagtagccgtcagg

SEQ ID NO: 131826 - DNA, 1322 bp, Homo Sapiens
  misc_feature (528)..(541): n is a, c, g, or t
  misc_feature (1264)..(1264): n is a, c, g, or t
cctgctggtagcccttggcacaaggcctggtaggcagcctggtgctgccatgtaccaaactctgctggggaaacctcagccacagcagatgcaaacccattaggtatagcatggttcaagatatttttgcttgtttcaataacacttttgttcttgattttaagggctattttagaaactgctttaaaatatttttgaaagtataaagaggtgaataaaacatactcctgttccactgtgcaaagatagtcactgttaatgtttctttccagtcgttttctatgcatagtttagccatgacttctcatggggacaaacccactggtttaattcaacccccaatgtcaggtttttataggtcagcccagagttctcaagcccagtcacaaagcagagccaggactcaaattcacaccctgtgactgagctgtttccactgtaccatgagacactacccacaaatcgctccttctccagtatctatgacacgaccataacaaaccataccccttggacagatattccttnnnnnnnnnnnnnngtttcagaaatagccaaccaaatacaaaaagtttggatgttttactttagcagtggtgtggagactctggtgtgctcttgtatagaagcgtagcatgcagctaaacccagtgccctggaaaccttctttgcagagcatctgtggacaggggttctggaacatgctctgggagacatggtactttgcagtttgtggcagaccccaggcctgtgtccttagatctggcaagggaaaggcaagtctttggtggagatgtatagctagaaaggggcccctcttctaggaaaagaaaaacacagttccttaaaaactaatctaattctgccacaaataaacaggatccgttattcacacagtgaggccatcctcagcagggagaagacaatggcagagtggagatgctggtcaggttgcttagcagatcatttaaagcagttgctttcctagtagctttgtcctgaattgggtttgggagatttagagaatacatcatagtagagacaaatacatcatattggtgtgcaagtcgataattagcacaccagtcgacttgaagaagaagggttggaaacccaaaacaattattttgaggctgcaaatgttctgacacgttgagtttgcgttcagttgagttttgatggataaggctctgcctctgggagaaccgtgtatgctttctgagagtggagagaggcttactacgaacttggtcaaaattcctgntggtgacacatcataatgccaactttcccagggtgtggcttggctcagctcacgttgg

SEQ ID NO: 131827 - DNA, 994 bp, Homo Sapiens
aggtttttttcatccaataggagtatactctttaatagaactgtatttgaataagaattccatacaaatagaatatataccttaacacaagaaagcaagaaaagaatattttacattacatagaacattcaggtgattcgatcaaattatccctccaactaaatacttattttccctatttactacaaatattgcagtcagtcagtatatgccaataatcatatagttttaacatctagtagtgtgaagtacacttgactgtttccaaagggagagaggtgatgtagtcttcatttcaggggagaagaatggactgaattactgtctgctttttaatgtttcaactaaccattccattgcctcatcaaggccggtgcctttggttgctgacgttttgaatatctgccattttcggtccttcaaggcaggtaacccaagtgaatttgccatctctgaggaagtcatggcctgttccatgtcctgtttatttgcaaacaccactaaaatggcttttctcagctcttcttcctccaacatggcaactaactctgatttggaaatgccaattcggtctcggtcacaactgtctactacataaatgactgcatctgtgtttgaatagtaacatctccagtatggcctgatacttgtctgtcctcctaaatcccagacttggaatttaaggtttttgtacgtcaccgtctctacattaaatccaatggtaggtatagtagtaacaacttctcccacttgtaatctgtacaaaattgtggtttttcctgctccatctaatcccaaaattaaaattctcatttcccgagttccaaacagactggaaaatatacttgagaaaaagccacccatgatgaaccccctgtcctccctcgccgatcttcagtgattccttggccttcggctgcagctccgaggcggtttcctcgcaagcccagtcagccagcaacttccacgtcggactccaggcgggggcggcccc

SEQ ID NO: 131828 - DNA, 785 bp, Homo Sapiens
gttatatccaaatcagacttttaattttcacagatatgccaaattgtctgttccaaagatgggcatcacaatacatcccattccatgtgcttctcttgctatgtaacactgacactccttccaacaggtggtagaagtctgtcttctccccgtgctcctaggaagaccttcatgtcctccttgaccaacaggggatggtggaagtgactctgtgtgacttgtgagacaagattctaaaagtcatgcacttctgccttgttctcttgggataactgctcttggaacccagccattgcagtgaggaagtcaaatagctccatggacatgccatgtgtaggtgttctggcaaacagccccaggtgaggttccaactgacagccaacgtcaaccacctgacgagaatgagtcttccagccttgatctgctgagtcatcgccaactccagccaatactgttaggagcaaagattagctgttctgccaattgtagcccaaattgcagatttttgaataaaataaatgactgttatcattgtaagccactaagttaggagtgctttgttatgcagcaaaaaataattagaagaacaaatatgacattattaaattagtaatgcttttgactttttagtacacgggggaatagataagtaaaatgttgaataaatatgaataaagtggaatatttctgaagcagtcagagggatgaattagccatacatgcagcaacataagtcaatcttaatacacagtgaagaactaatcatcagaatgctatacagacaa

SEQ ID NO: 131829 - DNA, 1902 bp, Homo Sapiens
  misc_feature (1820)..(1820): n is a, c, g, or t
gctttacaattcataaagtttattctatttgatcttcactctaatttacaaagaaaagcagggaagtctatttctgttttacagaggtgtacagggaggctcacaggggctaagttcacacagtaagccctcgaagctgccagggctgcaaagcccaccctctttccaccgcaccgaactacctcctttcgcctacaaaacgtaggtggggaccactggtgttggaatgacggcccacctcgagtttcaggtgacttccactctgcaattaacttgcaggcagccccagacctgcaatgaacacacgggtgggggagagatatgcacgccagggtcagtgggaaccaacagccgaggggtgagcggggctaggggccccgggccgccggcggggcaaacgcggttcagaaacgcaggccgcgctctggcccgccccctgcagcagcactgcctgctcgccatcgcccggagagcgccgcgggttcccgagtccgggcgcggagggcgcgcgggcacggcggcaggggcgtgctcggaggacgcgcgctgcgctgctcctccaaagggcagctccgggggaaagagggtggcgtctcggggaagcccgcagccgccgccgatgtcgctgggactcggaagtgccgaaagaggggtgttgggaactcgcggcgcgcgtgaacgttgccgtcgccgccgcccgggacagcccggagaaactctcagcgtaggcatcgggaaccttcgtgccaaggagccatgctgccccgatgggaactggcactttacctacttgcctcactaggcttccacttctattccttctatgaagtttacaaagtctccagagaacacgaagaggagctggaccaggaatttgagctggagactgacactttatttggaggattaaagaaggatgcgaccgactttgagtggagcttctggatggaatgggggaagcagtggctggtgtggcttctccttggccacatggtagtgtctcaaatggccacactgctggcaagaaagcacagaccctggattctcatgctctatgggatgtgggcctgctggtgtgtgctggggacccctggtgtggctatggttttgctccataccaccatctctttctgcgtggcccagttccggtctcagctcctgacgtggctctgttctctcctcctcctctccacactgaggctgcagggtgtggaagaagttaagagaaggtggtacaagacagaaaacgagtactacctgctgcagttcacgctgaccgttcgctgcctctactacaccagcttcagcctggagctctgctggcagcagctgcctgctgcatcgacctcctactcctttccctggatgctgggctatgtcttttattatccagtcttacacaatgggcccatcctcagcttctcggagttcatcaaacagatgcagcagcaggagcatgactccctgaaggccagcctgtgtgtcctggccctggggctgggccgccttctttgctggtggtggctggccgagctgatggctcacctgatgtacatgcatgccatctacagcagcatccccctcctggagactgtctcttgttggaccttaggaggactggcgttagcccaggtgctctttttctacgtgaagtacttggtgctctttggcgtgcctgctctgctcatgcgcctggatggactcactccacccgccctcccccgctgcgtgagcaccatgttcagtttcacggggatgttgaagggatttttgatgttgggactgcataatttcttaatcagggatgtgtacattcccantggggcgggttccccagcatgggcctggctgggggacactgttttttccaccgcgaatgaacatttggcattttgtggagct

SEQ ID NO: 131830 - DNA, 863 bp, Homo Sapiens
  misc_feature (72)..(85): n is a, c, g, or t
  misc_feature (95)..(237): n is a, c, g, or t
gggaaacaatttgcccctttttcctttcttttgggggcgcccgccccaaaaaaaagttttaaaaactttttnnnnnnnnnnnnnnccccccaaannnnnnnnnnnnnnnnnnnnnnnnnnnnnnnnnnnnnnnnnnnnnnnnnnnnnnnnnnnnnnnnnnnnnnnnnnnnnnnnnnnnnnnnnnnnnnnnnnnnnnnnnnnnnnnnnnnnnnnnnnnnnnnnnnnnnnnnnnnnnnnatttgaacaggggaagtttaatataaagatgaactctactcggagcatagagtttaaaaagagttctacacaacaccctagggatgaggaagaatgcctcagggaagaaagcacagaaaaggaggtgccctcccgaggctgggactgagacctcctcgctggagaaggtgtgggaggcccctgagggtgaagttccccgggttgctcgagccagagtctgcacagtcacagggcaagcagaaaattctttcgagagggtgggcgctcacagggaatcgggaagcagagcccacctgcctacacctgaaaggccacagccagtgctgggacctctctgaggtctgcagactccaggcagagcactcctggcagctgtgcagcaggagcaggaaggaaacgacatgaaagcccctttctccccagtgtcccagttcaacaccgtgcacgctaccaaggagaaacggcgcacgggccccacccacgactgcagagcaggcaggggagggggatctagagctgaaaggcaatacatggataacgcgcacgccccactcgcacttttatttagcaagagtaaatgcagcctaatgacagggcgtgggaagactcctgctcacagtgtgggc

SEQ ID NO: 131831 - DNA, 2103 bp, Homo Sapiens
  misc_feature (329)..(358): n is a, c, g, or t
agggtaaaaacggccaagcccttaaattgacccaggggccttggggaaaggacctcttcctggcttcaacccaggtttgggccaggaaggtgtagccgttggccctgggggcttccttaatacccaggttaaattggtcctcccaaagggatttagtaaaaggtggactggggtcattcctcctggccccaagggacccttgaataggagaaaatccgttttgtgctggcaattcgggcagtcttggaccactcggaattcccttgaaggcaaaagccaaggaacagagcgtgattaggtactggacaccctgccaagtggtgggctcnnnnnnnnnnnnnnnnnnnnnnnnnnnnnntcctcgagttggagctgggatgccagcccccatggacctggcagaacacgctcttgacagccccacagggcttctccctagggcgtgcccttagaagattccaggcagcaggcggtaaggcactgcggcggtgtagcgctcccagtcccggccgtacttgctggcgcagcggtgctcgtcccggaggcagcggtgggtcagcaggatggccatgtagatgatgtagaagtagggcagcaggtggccgccgccacaggccaggcagtaggccaggctgcccatcaggtcgccgacgtagttgaagtggcgggccacgccccagaagcccgacaccagcagcttgctgtggtgcctctgcccgtcggcggatgtgtaggagcactcgatgaccttgggcttcctgccccagatgaggcagcgcccatccgtgcggcggaacaggtccttctggtggttggccacccggaagatgtagtagcccaccaggcccagcagcaggacgcccacggcgtgcggggtggacagctgcacggggtggtacaccaagtacagaccctgcagcgtgtaaagataaggcagccagacacagtcgccccagcccaggtaccacccgaagtggtcatggcagatgtcaatggtcttcaggtaccaggtttcgttccagaagaagtcaatcacgtagatggcctgcaggacgttgaccaggaccatggcattggtcacatggctgtggagctcccgctgcttcgctgcgaaggacaggttgatgagggtccaggcgacgatcccggggcgcccattgaagaacagcttgaagtcaaaccacttcccgatccgagggttaaactcgatgcccatcatgtagttgtaaaagaaattgcctgtgaatttgcagtctctggcgctggtggggaagaagtagcccttgaccatggcgaaggtggagacggcatagccaaggatgttggcgcaccacagcagtgggatccagttgtcgaagatgatggtgggcgagaaccaggacaggagatgagcgtttgcaaaccagagcaggtgcgtgaggagccaggcttgcaggccgttgatctgatacttgttcacaacccctgcaggagtcacggccccctcctggatgcctcctacgtagccgggtagaaacttatggcagaagtcagggagagacgtgtacagaagcacctggaaggtgacccacaaggtatagagctgggcggctttcctcgttataggtggagtcttggcccagatgtccgagagccgagcatgtccggtgacgatgtccaccacagggccggtcagggcgcagctgtactggtcacaagccatgatgaagtagtagacgatgaagggggcgaacagcagtaggaagatgacgctcgccagtgaaaaccagtccacctcccaggcacggccccactgcccttgagatgcggttctgtcattggtgacgccatctagactcttggctttgggaatgttgggttgcgattttgcagccattgggccctccagcctcttgccaaatagtttcacagcagaagggaacttttccttcttgaaccggccccttaaaagtttctagacacctgtgctccaaatgcctgcttgatccttctcaaccggctaaagtcctgcgcacacctcggcccctcacctgcgcccaccttcccctggcctcgcttgcgcgcgctgctccacgccgcctaccctctagccaggggtcggag

SEQ ID NO: 131832 - DNA, 1100 bp, Homo Sapiens
ttttgaaggttttgccagacttccagggcagaagcattcctgggcaacttgtgcagccgggagcaggaagggaaacggccctgaaaagccctttttttcccccagtgtccccagttcaaccccggtgccacggtaccaagggagaaccggccgcacggggccccacccacgactgcagagcaggcaggggagggggatctagagctgaaaggcaatacatggataacgcgcacgccccactcccacttttatttagcaagagtaaatgcagcctaatgacagggcgtgggaagacctcctgctcaccagtgtgggcagagtgtagcgtggcctgggctcctaatacaggtaaattgtctccaaaggactagtaaaggtgactgggtcatcctcctgccccagggacactgattagagaaaatccgtctgtgctggcaatacggcagtgctggacactcggaattcccttgaaggcaaaagcaaggaacagagcgtgattaggtactggacacctgccaagtgctgggctctctccagtttacagatgaggaaactgaggctcctcgagttggagctgggatgccagcccccatggacctggcagaacacgctcttgacagccccacagggcttctccctagggcgtgcccttagaagattccaggcagcaggcggtaaggcactgcggcggtgtagcgctcccagtcccggccgtacttgctggcgcagcggtgctcgtcccggaggcagcggtgggtcagcaggatggccatgtagatgatgtagaagtagggcagcaggtggccaccgccacaggccaggcagtaggccaggctgcccatcaggtcgccgacgtagttgaagtggcgggccacgccccagaagcccgacaccagcagcttgctgtggtgcctctgcccgtcggcggatgtgtaggagcactcgatgaccttgggcttcctgccccagatgaggcagcgcccatccgtgcggcggaacaggtccttctggtggttggccacccggaagatgtagtagcccaccaggcccagcagcaggacgcccacggcgtgcggggtggacagctgcacggggtggta

SEQ ID NO: 131833 - DNA, 816 bp, Homo Sapiens
  misc_feature (664)..(664): n is a, c, g, or t
  misc_feature (764)..(764): n is a, c, g, or t
tgttttttttaatgtaaaacaagaccagtcacaagtttattctgtaatttttctttaacaggtattcaattctgtagaaaattgcaaatatttatttttaatatttacatttgggtctgtaaacaaagctggtaaaaaaatcctaagaatttccatacatatttataaaaatttcaagaatatgatccttatcacttctgaaaagtatgcattttttaaattctaaaagccagtaaatgtagaagttgaaggggacgagaaaaacgctgttaacagattatctgaattttcctcttcccaaatatctaaaacattgcatataccactcttttctgtgtagcttgtgaaacccaaaaattctgatttctcttcactagtctgaaacaagtctagtaaagactgtaccggtgaactacaaattctgttttcttcttgtgtaataaattcagttcttttatcaaattcagcatttggttccagattttcttttctatttcgtcctaatattattttcacttttcgatgtattttaccagaaggtaaactatccatattcttgaagtcacattcattgggttcctcaggaggagtatggaatggagcctttgcctgaacagttaggtgctcttgtgaactgtttattgttatcagaccagaatcatgnagtaatattgaatgaaggtccttttccttgagattctttgctggaaaaagcacagtatctgacttctgtttttggtgagatcactattatctgtactganatcagaacatgtacagatgcctgtatgttacatttatagtgatctaccctta

SEQ ID NO: 131834 - DNA, 339 bp, Homo Sapiens
tgagccaccacgcccagccccctgtctctttttttaaaacacaatttaaaagcagaaagaaaaaatctgtgctgtttagactcagattcttaattagctagtatttcttaattcaatcaataaattattaagaccttttcactgctccctttttaaagtcttctttggagtgatttaagtgcttcttattaccaagctctcaaagagaagataaaattaaaatctgatgggtaaccatttaaataagacaactggggtaacccatttctccaggacccctctctgcaacagagagctattctctttctttggcctagtaaacctctgctcttaacctta

SEQ ID NO: 131835 - DNA, 795 bp, Homo Sapiens
  misc_feature (715)..(715): n is a, c, g, or t
  misc_feature (742)..(742): n is a, c, g, or t
  misc_feature (758)..(758): n is a, c, g, or t
ttttttgatatttcaaccggtttattgtatctttacaataataaaaataaattagtcacacacaaaaatagtcatttttgctgaagagaaaacagaccatatttactcacataattcgccttctacctttcacctgcttatgtaataatttaacactgtagaggggacatggaggtgacggagtatttagtgggttccttgctcctggctgtgcagttcacaggccccacaggccttggccccagcatccccagcagggacagtggaagtgtcagagcagtaaatgccaccacttccctctcagcctctccctgtccccgccagccacctgcctcacccacggctctaaccaagcccaccgagcaactgacgctgccagtctaacaacggggacaaagcaaagagaaagggataacagacaccctcccatttccttctccaaatgtctgtggatgaggggaaggcagattagatgaggaaatataatatttaagatgaaaaagtagcaatcaggttcaggtacaatgctacctgaatgagtcgaaaagcagagtaatttatatttgatcttaaacctcagggaactggactgattagcatactaaacaattgtaactatggactgagaaaaagacatcaatcatcgtacagcgacattccaggaggctgggttagtatgatcacatgctttcacacaaatgtggatcgcatatgntaataaatacctatcagggtcctttanaattaacacattctanataatagaactattttggtgtagtgactcattctgca

SEQ ID NO: 131836 - DNA, 1022 bp, Homo Sapiens
ttttacaccactctcttttaatattaacatatacaagcagcagaaagagccaactgctctctgctgttccctgagggaaagccggagcacaaagctgttcctctggccttcctccaactgccgggcctgcttagctcctccctaggcagaagctttgttccagccccacttccacatcccaactccacagtcaggatgggaggcacatggttgctagcaggggaaagaatactgtagttccagcctctgctcctttcagtctcagcctggatggtggtcactcatccctctgcagctagttcctcacttgtcccagcccaggagccaggagggcactcaatcacacccaaaggagcaggcagtgtgacttcagtcatcttcagatgactcctcttctgcctcttttagccactggatgaacctctgcagctgttgattcttgcgcaactgctggcccttgtcagttgtatctctttggctgaaccagctcagaattgtttcctcagccaggatctccagctggtagaaagccatcagtaccttggccatggaaataccaagagcttcatgctctaggaagaagtcctcaatggctgctaacgcttccaaatggtcggctgcgcgctttatgtagttcctaaaaacagggctccaggcctttagcagaggaagcagcagggcacagtagcggcttgagtcaagcggggaatccatctgttgcagggggaactccaggaccacgtggctcagtacctgcatcacctcctttagacttatgttataggcatacttgagagagttgatttccaggacgagattgtcacaagaaatgttctcctctttgccccgctgtagtgttcctaaaacttcattctggaacactttgatgtcatccatctgaggggagcctccccggctgtccggctcctcagaatccatactttgctcactttcactttcactctcttcttccatgttgatcttgagtccccacagattctgctgcagttctctctccctaa

SEQ ID NO: 131837 - DNA, 1903 bp, Homo Sapiens
tggcaggggggaactttccagggaaccagcgtggcttcagtaccctgcatcacctcctttagactttatgttataggcatacttgagagagttgatttccaggacgagattgtcacaagaaatgttctcctctttgccccgctgtagtgttcctaaaacttcattctggaacactttgatgtcatccatctgaggggagcctccccggctgtccggctcctcagaatccatactttgctcactttcactttcactctcttcttccatgttgatcttgagtccccacagattctgctgcagttcctcctcttcctccatgttcatgcctgcagctttccagaggtagcccttgccagcagctcctacttctgctggattgtaacctttcatcttcactttgtccttttcttggtcagccccagaatcatcactgaactcgccatcatcttcatcttcctctgcatctggagggtgcaaagagatcaccgagccctcaggcagcgtgatatttgggcccacgaccacctgggaagtgaggacagagcgtggtttcagtgtcactcgttccttgacctcagcattgtcacaaagcagagactgatggatctgtgctccagccgccactcgaacaccctgccacaggtaggtctggtccagcaccacgttatcaccaatgtggcagccggggccaatgacactgttggtgataaagcaattgctgccaatgacagtgccagagcccaggagcacattttcctctaggatgctgccatggcccaggctgacctcaggccctcggtagatgttgtgccgggaatgagtgcagctctgggtggtgctgtcagtgaagttcgcctctggggtgagagggtagacccatcggcggatgacgtcagcacagacagctgagtacatgtgtaggttggagacacgggcaccatattccttagctgttacgtgcatgtggatctggttccctaggatctcctcattcactaagagacctcgcacaaagtcatctcgagtttggtagtcaaagttgtctgtaaagagttgtgccacctgaggagaacagatgctgatatgacaatccagtaaatcatatcgaacctccactccatcactactgccctgaaacaggctcagaggaaatgcaaaacgccggagaccctgggtcttctgaaaatggagaaccctgtttgtggtactatccacagccactaccacattgtcttcgtggcaacgagttgggtggctgggggatgactccttgaagatcatcgtcatcacagaaacatttttttctagcttccgtctcaacctgtgttcctcaagggctctggtgatattgatgtttgagatgacatccccatacaccagaagaaagtcagagcgcaccaaagccttggcatcaacatcacggaggacatctcccagtgatcgatagagctctgatgtaattattcgaaccacattgagagatgtagggcggcaccactttgacttcagtaaatgttctttgatttgagcagctttccagcaacaaaagacaaatgtttcctgtacacctgtggcagtcaggaattccagagtgtagtcaattaatgccacattggccaggggcaagaggacccgaggctggtccttggagatggggaagaagcggcgatcgaagctatcggccaccagaactgcttgtaggggcggcggcggttcctcctccgcccctctggctcccccgccaccgctgcctcccggccccgcgccgctgcgcttgttagcccgactaaccaccacaccaggcggcgccactacagggccgccgacgcgtggtcgacgatatcccgggaattccggaccggaccagcctgctttttgtaacactggttctatagtactatgc

SEQ ID NO: 131838 - DNA, 666 bp, Homo Sapiens
ggatttgttttgttttgtttattgtggtaaaatacaaaatctaccgtcttacagtgaggtggcgttcagtaccttcaccacgccgtgcagccatcccatctgattccagaacattctcatcacccagaaggcagccctgtccccattatgtcacctagtcacccccaggtccccctccccagtcccggcacccacgaatcctctccctgattctgtggattggtctgtcctggacatttcatagaagtgggatcacagcgtacccttctgtgtctggtgtctctcactgagcgtgacatcctcaaggtgcatccgcactgtggcctgggtcagagcttcgcacctccttgtggctgagtctcattccagcgcgtgggtgcgtgggtggccgcgccgtgctgatcccctcaccttcactgggtgttcggtgttctccgcctcgggctgtcacaaatcgtgctgctgtgagccactgcgtgcaggtctcatcctgggtgtattttacaaacggactggatgtgagtgggtgaggagtgaggagctggggtgacaggtgcctgcgaccccggccaggcactgcctcctgcgatcgaaggggcagggggagacagaagccctcaagggggtgtggagatggagaagccagaccccaggtggggggtgcat

SEQ ID NO: 131839 - DNA, 1432 bp, Homo Sapiens
  misc_feature (41)..(79): n is a, c, g, or t
  misc_feature (480)..(488): n is a, c, g, or t
  misc_feature (612)..(612): n is a, c, g, or t
  misc_feature (622)..(734): n is a, c, g, or t
  misc_feature (889)..(897): n is a, c, g, or t
  misc_feature (1383)..(1383): n is a, c, g, or t
cacctggttttaccgctcccggagaggtatcccccgcgtcnnnnnnnnnnnnnnnnnnnnnnnnnnnnnnnnnnnnnnngggggccttttccgcaacaatttttcgcctatttccgcaaagggttttttgataaaccttcttttgttttataaggaacccttgggggattttctcccagttctcaatcaaaccgggcgaaaattttcaactttttggcccccggggtttgccccatgggacaaatttatttgcacagggcccatgtttttgcgcaccttttccattccagggttacaaattccttatttccggggtttcattagggtcaaaaacccttttaattagaacaaaaagtcgggggagtgcctggtggggggacacagtaattccgcgaggcgcaagtccggttgtaaaaaaacaatgaagcccctcgaaattccttttgaaggtttccaaaccccctcttttcccccgggggnnnnnnnnnggaagaaatgccaaccctttgccgtgacaaaatggcccgagaaccaacctttatcctgttccaattctttttggggcccggcccccaaccttattggtttaaaaagttttgccgagggccaaangagacttccnnnnnnnnnnnnnnnnnnnnnnnnnnnnnnnnnnnnnnnnnnnnnnnnnnnnnnnnnnnnnnnnnnnnnnnnnnnnnnnnnnnnnnnnnnnnnnnnnnnnnnnnnnnnnnnnncaagagcaggtgacgtgtttattgtgggacgcctctttctgggggtcgtgctggctgtgagggaaccctcacaatccccaggtcccagaacagacagatacaagaacttgaatccaaactgcttgcacataaatagaacggaggttggcaaaggnnnnnnnnncaacaacaaatgaacgtgcagcctcctatgctagtgtgacacggtggcagagtcttatccacaccccgtctcttttcttactgtctccatgctgagattttcagctgctctggaaagattcaccaccttccgatctgactcagcagcagacagctgccttcctggtggcccctgccacagtctccaggactggcaaggggctaaggaatccaagacaggtattcctcaaacaaaacaaaaattgcttccacggtcctttgcacctcccagttctgctgggtgaacaatgtgtcccccaaccccaaactaaaccaaagaacatgctgagcacaagctgcgagtcagaataaaaacatattgcacatggttacaagagtcttcctgagggccctctcgctgcagatccctaaatactggcttttgatccaaccagtcgcttgcctatcaatggtggtatcaaacgcccatgtacatcccactccccanatacaggtgggactaagcaattttccacattgctatccttcgctatcag

SEQ ID NO: 131840 - DNA, 696 bp, Homo Sapiens
  misc_feature (295)..(343): n is a, c, g, or t
  misc_feature (345)..(603): n is a, c, g, or t
tttagtagtagtattacattgtgaattttattttcaaatttgatcaataaagatgaaaataataaaattaagcagtcaaaagaagtagcaaaaacaagatagtcattcatatatacagaacatatagattcatttctagttgattcaatcctatttatgtatttaaaatacaaaataatggccatctggctagttccaacggtagagcatgagactcttaaaatacaaaatacatcttaatgtgtcaagaagaccacagttagcaccaggaaaggaactttactttagcttctgnnnnnnnnnnnnnnnnnnnnnnnnnnnnnnnnnnnnnnnnnnnnnnnnngnnnnnnnnnnnnnnnnnnnnnnnnnnnnnnnnnnnnnnnnnnnnnnnnnnnnnnnnnnnnnnnnnnnnnnnnnnnnnnnnnnnnnnnnnnnnnnnnnnnnnnnnnnnnnnnnnnnnnnnnnnnnnnnnnnnnnnnnnnnnnnnnnnnnnnnnnnnnnnnnnnnnnnnnnnnnnnnnnnnnnnnnnnnnnnnnnnnnnnnnnnnnnnnnnnnnnnnnnnnnnnnnnnnnnnnnnnnnnnnnnnnnnnnnnnnnnnnnnnntggcatgagccactgcacccagcttagcttctgattatgacctcagtatcttggaatagatactgagggatactatgtatttatcatcatgaa

SEQ ID NO: 131841 - DNA, 677 bp, Homo Sapiens
gtgttagaattttattcattctctcctgtatccacagctcggtacctatacacaagaggaggaaagagggaggccactgatttaggtcgtagaaatggtgtgtgtcagagcttccctctcccctttgctactcttagcgagtcccggggggccaccaacacatggcccagccagtgctgctgggctctggtttctgtgttctggtgaggccatggggtggggccgtagcacagcctgtggctttgacccagtgggcttggcctggttggcaggcccatcgtcggagggttcaggcggcagaactgtctaatcccgggagacggttctggaaaccagctgtgccgcttcgctgttgaatgcccatccctggatccagttctcctctcttcgaggaaggaaacctgccagggctcccatcactagtaattctgggaattccccaaagtacccctttgcaagccgtgcgcgtgcctgtggctggcattctctagagctgccttccttcaccagggattgctccgggtagctgtgttggcagactgagccacgtcctcatttctgctaaggatttgcctggtctttttcctgagttatactctatctctacctatctcttcctatgtggccagcccctgtatgcgcctccctttgctggtggctccaggccatggtctaga

SEQ ID NO: 131842 - DNA, 1142 bp, Homo Sapiens
tttagcctttccaacttttattccttttccgcacagctccttctcattgcagcaatcactttacctgtctttcctgcaatgccaattcattcccacatccctccaagacccaggagagcttggggaagcagggtcagggacagaatccccaaagggtcacagtcccttgaggaaggtggcaagaggtgtagatcaaagctgagctgggacaaaaggctgctttgagcctctctgggtgagctcttcaggaaccaggaccccagaagggcaagctcctctctccacggccatcgccatggagggatcctccaagctcccactttctgtgatttcagagtccctcagactcggccgatgggtcatttttcatgtatattttctcttgattcccctccttcatggctgcatatctggctagcgtgaagagatagtcactgagtctgtttaagaacttggccacgttcgcatcggtctctcccatctggacaagaggcaccacacgtctctcggcccggcggcacacggcccggcagaaatgcagcgccgagctgatcttgcctcccgaaggcaggatgaaggccgtgagtggtgggagctggctggtgtacttgtcgatccactgctccagctccaggatgggccccgccttgaacgtggtatactttaagtgagcctcccgggccgaggagcatggtgtcgccagggccgagccgacgtcctgcaatgtgcactggattttctgaagctcttcggcaaatgtatggcccttttctgtgactaattccagagcaaacccaatagctgaacttaattcatctgtagttcccacggcttcaaacacttggtcatctttgggtctcctttctcctgtgaaggtactagaaaaccctttgtctcccgttttggtgtaaatcttggggatcctgggtgtcttcgaggaaggctgtggcctgtccccgtcttccacgccctgagggccgcggctctggaaacggggatacaggagcctggcggcgccgaagcacccttgcaggccaagacggctccccaggccaagacggctccccaggccgcacacagccatgagccaggctgctcctcgtgcctgattaacaccgaggcctgtaccttgccgatgtttc

SEQ ID NO: 131843 - DNA, 836 bp, Homo Sapiens
tagtcactgagtctggtgtataaacttggccacgttcgcatcggtctctcccatgctggacaagaggcaccacacgtctctcgtgcccggcggcacacggcccggcagtaaatgcagcgccgagctgatcttgcctcccgacgggcacgctgctccagagtaggcagggcctgggagggaccggtgaggacctggagggcacttggggaactggaggacagcgtctgtcaaggcaggatgaaggccgtggagtggtgggagctggctggtgtacttgtcgatccactgctccagctccaggatgggccccgccttgaacgtggtatactttaagtgagcctcccgggccgaggagcatggtgtcgccaggccgagccgacgtcctgcaatgtgcactggattttctgaagctcttcggcaaatgtatggcccttttctgtgactaattccagagcaaacccaatagctgaacttaattcatctgtagttcccacggcttcaaacacttggtcatctttgggtctcctttctcctgtgaaggtactagaaaaccctttgtctcccgttttggtgtaaatcttggggatcctgggtgtcttcgaggaaggctgtggcctgtccccgtcttccacgccctgaggccgcggctctggaaacggggatacaggagcctggcggcgccgaagcacccgcgcaggccaagacggctccccaggccaagacggctccccaggccgcacacagccatgagccagctgcgacgcgtggtcgacgatatcccgggaattccgaccggtaccagcctgcttttataaccactttctatattcactatt

SEQ ID NO: 131844 - DNA, 710 bp, Homo Sapiens
aacactgaataaatatttattgtgattttttccccggtggcataaggttgtttatttttcctagctctccaaatgacacagttgcggaacctctttcagctggtcttgcctgtgactcatgatatttccatcctatcatgtaatagatctggtatgtagcaggtactgaaccatcttcatttctgtacatttctaaaaagacaataatggttaaagtctgaaaaaatgcaagtaggaaaaaatttctgctcaataaaggtcatgttcttcaaaaagaaatgggtacaaggatacttgtaagattctgagaacatcttacatgaaaaattcttaatactgagggtaaggaaatagtaaaggctgtctggaaaaagctacaggatctgtgttttgagaggaaggacaagaagtctgagggagccttaacaggaatggaaaatgcattggcaacgtgaagggaatcaacatgatacagcacaagtgcctttggtgaggcgggtgaaagagtggtcgccccttacctctgtacactgccgcagctgccagcattgtgtctcgatgcagcagggcttttctattccaagcacagttactctcacccatacctacaaatacactacaggtagtttgagataatacagcaacaccctgaacagctcaataccacagacttaatcccgtctcatctaacagtatacctgtcctcattc

SEQ ID NO: 131845 - DNA, 985 bp, Homo Sapiens
acactgaataaatatttattgtgattttttccccggtggcataaggttgtttatttttcctagctctccaaatgacacagttgcggaacctctttcagctggtcttgcctgtgactcatgatatttccatcctatcatgtaatatatctggtatgtagcaggtactgaaccatcttcatttctgtacatttctctgtacactgccgcaactgccagcattgtgtctcgatgcagcagggcttttctattccaagcacagttactctcacccataccttgtaaatcttccatcaattcaaacattccaggatagttaacttgaatttcatcagtgtccacagtcagagtattaaagccagctctcccaagcagatgtcccaggtcattgacagcagtgaaaggagaaatgtgtggagaaaatcctccttccctttccgtttccgctaactgtaaggaacaccgaagttcatagagtgtgtcgcctccaaacattgcaccgataaacactccatctggttttaaaatataatgaatctgctcaagtgctctaggaaggtcattcacccaatgcaaacaaagcattttctgcaatgtcagcttggaaaaactttccaatagtttccttattcaaatattgtgcaatgtaacctcttccacaaccaagatccaaagcaagggggaaatttctgggtatgtcatatacacggtctgcgatccgacttccaacctcctccttcaggtagtcaaatttggtcggctcgggctgccgggctgcccagttcttctgtttccttttcaaatcccggtcgaaaatattcagggttctgggcgaggtgctaccgcggggagagacaccagaggtgacttccctacggccaagattctccgctgggaccctcgccgcccaaggtcgccgacataagcgccagagccctgccggccgcagcatcctcgtgccgattcaacaccctgcctcgtacctagc

SEQ ID NO: 131846 - DNA, 1211 bp, Homo Sapiens
taacactgaataaatatttattgtgattttttccccggtggcataaggttgtttatttttcctagctctccaaatgacacagttgcggaacctctttcagctggtcttgcctgtgactcatgatatttccatcctatcatgtaatagatctggtatgtagcaggtactgaaccatcttcatttctgtacatttctctgtacactgccgcagctgccagcattgtgtctcgatgcagcagggcttttctattccaagcacagttactctcacccataccttaagaccactgtgaaagccttgaaaatttctcatgcattcatcagctgatatgcagcttgttttgtaaaattaggtcaacattctggacttttgttcttgtaaatcttccatcaattcaaacattccaggatagttaacttgaatttcatcagtggtccacagtcagagtattaaagccagctctcccaagcagatgtcccaggtcattgacagcagtgaaaggagaaatgtgtggagaaaatcctccttccctttccgtttccgctaactgtaaggaacaccgaagttcatagagtgtgtcgcctccaaacattgcaccgataaacactccatctggttttaaaatataatgaatctgctcaagtgctctaggaaggtcattcacccaatgcaaacttaaactgctaaccaccaggtcaaatgtattttctttgaagggaaggaattcttcatcagctaaaacgctgacagtaggtatttctgtttctgaggaatttttcaaagcattttctgcaatgtcagcttggaaaaactttccaatagtttccttattcaaatattgtgcaatgtaacctcttccacaaccaagatccaaagcaagggggaaatttctgggtatgtcatatacacggtctgcgatccgacttccaacctcctccttcaggtagtcaaatttggtcggctcgggctgccgggctgcccagttcttctgtttccttttcaaatcccggtcgaaaatattcagggttctgggcgaggtgctaccgcggggagagacaccagaggtgacttccctacggccaagattctccgctgggaccctcgccgcccaaggtcgccgacataagcgccagagcctgccggccgcagcatctccagctgcgaccccaattcctcgtgccgaattccacacccagcctcgtactagcga

SEQ ID NO: 131847 - DNA, 334 bp, Homo Sapiens
acttggttcattttgtttcctggtggtttgagaagaaagttcctgtggtgaaattgaaaaggggataaagggaagtacttattttaaaacataagtaacttgtggattgttgaatactggaaaaagagtgttacttccccgttaacctacgcctcgtgtaatccttcaggttggaagtcggatcgcagaccgtgtatatgacatacccagaaatttcccccttgctttggatcttggttgtggaagaggttacattgcacaatatttgaataaggaaactattggaaagtttttccaagctgacattgcagaaaatgctttgaatattcttcag

SEQ ID NO: 131848 - DNA, 707 bp, Homo Sapiens
  misc_feature (246)..(254): n is a, c, g, or t
ttttttttgggttaatacttttaattacatgattgtaattatacaatttccactattcgatattttgtataaaaccagttacaacccacaagattttcaaatgtgacaatatgtatcaaactacatacatatgcaaagtttacacgccattaggaagctttatcttaaaaataccttcaggaaaataaacattcattcaaccagttctcttggctttaaaaaatatgattagaaatatacgctgtnnnnnnnnntcaagacaatgattgatcaatactgatcagttacattttaaaacttttaataatctgtacatgagtgcaggttagataaaagtctgcaaattattaatagaaaactgcagtactatcatcggatgaacatgtctgctgacaattctaccaggtaattaaggaggtaatttcctacacagtataggtgaattgtccagtctttaaacacatctggagtcatctccactgagtgacatggagaataacctgatgtgggtaaatggaagagcagcagatagcctctccagggcagtttcagcgggagagaaatttaaaggaacaataaaataggttttaaaagttgcttttgatgagcactgctttccaaaatgcaataatgattttttttaatgtagaaagagaagctgtgttaagaacagacatccaatgagtgcactgcttctgtggctccaa

SEQ ID NO: 131849 - DNA, 1093 bp, Homo Sapiens
ttttttttaatggaagcgagtaggttttaattcaagatacaggcccctcgcgttgatctcgtagaaggaaactcagtggactgacaagctcaagtcatgtatgaggcacgtcctgggacccccacccctcctgccataggaaggacagctttgggcagagggaaggaggtttgagatcagggttgggcccatacagattgtgtgaggtggtctcaagtacaaatacttatctgaggctcctgaacaggccagaaattggtgagtctcaagtaggtgtctggggaaagagagggaaggggcctgccctcgctccaggggagctggtcgccgtttggcaggcctaacagacctctaaggcacagactggtagcaggagagagctatgtcctgtactccagatgctgggtaaggagcagctggatgtgctcagatggggctcatctgagaaggtggaggtaggagagagggcagaagagagtaagccacttccaaacgtccctccaaaaaatctgaaaggagttactatgctaatgcgctgggcatgaatccaattcagaaccaatctggtgggcccctcatggctcagaaatactctgggtagggctggctgttactgcagtcacggacgctgagttatgtacagagagtacgtcaggaaagtggccttcagagaaagagccccatggcctaaccccaaagtcctagcccgtccaccagcacctctgagttcactggccacggcaccgggctgcttgatctctgggaatgcagtggtggcagcaaagtgcccttggctcacccggctgcaaggtcagcccttcaagctgcttgcagaaacgctggtagtttggggcaaggccttcggctgcaagcttggtgcccagtcctgcctgagacggctgccagagcctgtgcgcgctgcctgaagccccggtctctttctgtacaaacagaagtgctggatgaagaagacgacgtcgaagacgatggagaagaccccgagtccaaacttggttgggtctccgaagatcagcgtccactggtcgttgttgtaggactggaggaacatctgcaggaggctgaagctgccccc

SEQ ID NO: 131850 - DNA, 928 bp, Homo Sapiens
  misc_feature (783)..(817): n is a, c, g, or t
  misc_feature (821)..(872): n is a, c, g, or t
gagtggtttagaaatcttttattgtttctccaaatgacaatacaagtaccaaaaaccaacatgacacacaggaaaaaataaaagtgcaattttaatatagtgaatgtgatacatgtataattcctcataacaaaatggtcaaaacctttaaaagatccacaatagatatctgaaaatcttagcaatgctgtatatattttgaggactaaatgatgaatttatattcaaattgttcaaatatattttcaaaactttcagagcacagatcattgttaattttgcttttatttaaaaaaccaagagaatacatttctatgtaaattagcaatcaggaatttatctgtttttgggcttcttcatctatctaaagtgtatatttagtgaccagaattatagtcatcctatagtgaaaaaatagcatacaaaatcaaagtttaatgagtaaatcatgacattatgccatactaagaagacatcaaacatctaaaaccataggaagagaatatattagcccttacagaacttaaatttttagaaattctgaataaggaaatatattctgcacagataacggtatgacacacccagtgttctaatacagtacaacttaaatagcatcctagggtaaagagtaacatattccccaagaaacagaactaaaatatttcctattttatgagaagagtgagtaagaacaacaggatacctctctcaacagcacactaataaaaccccggccgtaatggccgaattcccgggcatatgtccggtaccgtcgactgnnnnnnnnnnnnnnnnnnnnnnnnnnnnnnnnnnncggnnnnnnnnnnnnnnnnnnnnnnnnnnnnnnnnnnnnnnnnnnnnnnnnnnnntagcgccctataggagcgagcgttggggacgggtcgggggaggaacgaggggagaa

SEQ ID NO: 131851 - DNA, 714 bp, Homo Sapiens
taacttgggttttaattaggtacataaatagcaacatgagaatgaggagttctaaggcttgtacattatctctaggtgaagggattccaggttagtttgcttgtaggatgatttcacagaagataacagaggtctggtctagtttttcctgattaagatggcagagcatggagttttctacttagttccaggtgaattcttcacatttcctggcttttgaaagttctccttccacaaatcttctatgactatatatcctcgtaaaccccagtcatataatctctccccactgacctgggcaaacacgatggcttgttgtggataatagagggaggcagctaatcccatgaaaccaggcggatacactagcttctttatttttgaacctctagccaaaaggagtccaataaggccagcaaaaccaataacaccaagtctcggaaaaaatccaggaggtgcattttggagatagtcatagctgtctaacccccattgaaccaaactttgcatcttgggcttagtttgggagtacgtttcctgacaccaggttgtgtatggctcgcaatagtgtcggagctgtgagatgctttcttcaagctggctccttgcctcctccacatacttcgattgaccctcaggaactgagtagagtgaaagctcatcaaccttcacggaatttttgggaggtgagtccttttttggtgctgcatagac

SEQ ID NO: 131852 - DNA, 1139 bp, Homo Sapiens
ttttaacttgggttttaattaggtacataaatagcaacatgagaatgaggagttctaaggcttgtacattatctctaggtgaagggattccaggttagtttgcttgtaggatgatttcacagaagataacagaggtctggtctagtttttcctgaagaagaaagccaatttaatacattcaatactgacttctatgccatttttctgtagaaatactgatttattctatggagtttccaatgtttacctataactgattaagatggcagagcatggagttttctacttagttccaggtgaattcttcacatttcctggcttttgaaagttctccttccacaaatcttctatgactatatatcctcgtaaaccccagtcatataatctctccccactgacctgggcaaacacgatggcttgttgtggataatagagggaggcagctaatcccatgaaaccaggcggatacactagcttctttatttttgaacctctagccaaaaggagtccaataaggccagcaaaaccaataacaccaagtctcggaaaaaatccaggaggtgcattttggagatagtcatagctgtctaacccccattgaaccaaactttgcatcttgggcttagtttgggagtacgtttcctgacaccaggttgtgtatggctcgcaatagtgtcggagctgtgagatgctttcttcaagctggctccttgcctcctccacatacttcgattgaccctcaggaactgagtagagtgaaagctcatcaaccttcacggaatttttgggaggtgagtccttttttggtgctgcatagactttgaaggtgagcaagctcaggctggctggccccacggacctctgaattaccttgaacatgtcgctggcagcggaggctccggcagggtcaccccggcctcggccacgcccactatagagaggtgactacggaggcccggtagggccttgatttctccaaccgcaagcaggcagcggtgcgggtgacggccgtactgccaactcggtgcggcgaaggtttagttcaatcacccggttctagaagccgcgtcgctgagccgcagcgcgtcgcgcctggcctcgtgccgaattcaccacccaggcctcgctacctagcctta

SEQ ID NO: 131853 - DNA, 697 bp, Homo Sapiens
ttttttgcattgccatgattttattattagtgtccaaaatgggactcccaagtaataaatgatttattccagccacagccaaaaaagactttgcctggctaaaagagtctctctctaagtatgtaatatacaagaaatacaattcaaagagatgttcctataagtacattttttacacggcatatatttaaaaaggaggccccttttaatataaaattccggttatataccaatatggttaattagcatttacactatagtttgaacgtattttaaatagcatgatgtgtatacaatgtctcccgcgcccattggcaaccagggtcgtgggaagcttggtgaggagttaaccaggtcctgtggtttaagcagtggagcacccgggattcctgcccccctttctgctcacacaattgcactccattcttccgccttccttgttttctccaaaaccacctgataggggggatgtcctgatttctgaggtgtgcttctcatcatgactgcttcgttttgcccttctgatttccacggcacaagattataggaggaaactcattctcatcatcaagacacactggtcccgtcgcaaactcatgttcaggaataacttctcctcgcagcgccccgccgtcctcagaataacctggcaccgtggaggctgaagatgcacttggtctggctacggtcgctgcat

SEQ ID NO: 131854 - DNA, 711 bp, Homo Sapiens
  misc_feature (577)..(577): n is a, c, g, or t
tttcatttttatagtcagtattttctagaactgtgtcatacttgtctacacctaaataagctgggtgaccattctgtggccatgagcgagttcagacagaaaaattccacagtgcccagcctctccctgctcactctgcatgggcacagacctgttgataatgcacctgcctaccagcctcttcctgagaagagtaaggccattctgttttgattttggtagataatcttgtgccgtggaaatcagaagggcaaaacgaagcagtcatgatgagaagcacacctcagaaatcaggacatcccccctatcaggtggttttggagaaaacaaggaaggcggaagaatggagtgcaattgtgtgagcagaaaggggggcaggaatcccgggtgctccactgcttaaaccacaggacctggttaactcctcaccaagcttcccacgaccctggttgccaatgggcgcgggagacattgtatacacatcatgctatttgaaatacgttcaaactatagtgtaattgctaattaaccatattggcatgtaaccggaatttcatattaaaaggggcctgctttntaaatatatgccgtgtcaaaaatgtacttataggaacatctgtatggattgtgatgctagtgtattgcatacgtgtgagagagacttctttggccaggccgagtcttgtatgggtggggctggcgatagacatt

SEQ ID NO: 131855 - DNA, 762 bp, Homo Sapiens
aaacactgattttgctgctgaagagtttacctataggctgttatttcaacatctatggatttggctcttcctatgaggcatgctttccggagagtgtgaagtacactcagcaaacaatggaggaggctctggggagagtgaagcttatgcaggccgacctagggggcactgaaatcttggcaccactccagaacatttacaggggaccctccatcccaggccaccccctacagctttttgtctttacagatggagaagttacagacacgtttagtgtaattaaagaagttaggatcaacagacagaaacacaggtaggaagaaaatgtgatttccgggtgattggtgctgagtagtgacacacagactctagtgctacatgatgccggtgttgaccttccttcaagaggaccaaatgatttcagaatttagttttagcagctgaaaatttatttctccctgtaaacgttaaaaacagttttccaaataacatcaacaacacagcaaaaccattgtttcttattctttctaaactacaacgaacacaagaattgaatagtaagatgttaattttttttactataaacatttttagagaagtaaaacatgctgaaaactacacaaattataagcatacaactggactcattatcacagtgaatgcactgtgtgatcgccacataggtaaaaactggaatggtcgtaggcctctccatctgtacccttttccatcatgtcctattccctgtcactacacactaaa

SEQ ID NO: 131856 - DNA, 862 bp, Homo Sapiens
  misc_feature (736)..(736): n is a, c, g, or t
ctatttcttctttcttttattgccaaatactgaaaggagactaagcaaggaagctggatatgaaatgtctaccttcttgacttacgggtcatgttgtggtccttcctatttccaccttaaaattgacaaggcctcgctcaaatttgtgctaccaatgatacagagtttatagcaaattttctaagggaagtatctgtggaaattttctcatgattcatgaaaaatgttattagaagtacaagtatcctggaatcagtcatcaggtcctccctctaagcccactgggaacaaactgaggtgtgtttatgaaagattccttactgttagtggtaagcaggctgtagaaagcccatcatccttagaagaagattcttctactaagcaatgttacatgatccaacctttaagacctctatctgtgagaggatcaaggatgcaccagtaaatgtgaactaatcatagttttctcataccagtctactccaacttggccaggattgaaggcaggcattcagatgcagtttcaaacccttgagaggagacagtctgaacagacccacaagctcaggccaaataatgttattgattaaaatggaaaatgtcatgcaagggtaaaaattaaatataatgcttgctcaccagtctgtctacgtacaaatctaccttggcttaggacaagtgtggagaaaagacagtgagttcagggattgtgcactcatggagatgaatcatcaangaaatgcaaactcttgtcatggctattcaggtttttagttcagctgctgaggcggtgagaagttttcatgtcagacgtacaggtagcattttaccccactttcctctgtccaaagcgacatacaag

SEQ ID NO: 131857 - DNA, 2008 bp, Homo Sapiens
gaaactagacagacatttattttgtgtttgatttcactggttcaaatgtctacatgctggagtaaatccacttgcctctcttcagggcttttcctctgcagtatattaacctggccgaggatggcatatgccactgttgactcctggtcctccaaggcctaggaggctcaccccaccggcagggcctggagccatagcaaactcagaagaaggccacaggtacagtctcagtgacatcagacattgggctgattcctgaggcatcgctcctgtctcccaggacagcagggtctggctctctgataagtagctaccaggtcacaatcacatgaccactgcaaaagcatcagccccagctggtccaggctccagccagtttcctctgggcagcatgttagaatgggctccctgcctttttgttttgatcatccaaatctagcttcaaagggctccaaaatgtgctcaccacatccggacccgaaagcaagagctgatttttaagagtgagattctcattgcatttggacaaaatgaataatgtgcctttcatattttctttgtatttctcttcaatagttgcttgacccaacatctttctgtctgctctatacaatgaaaatacaaactaaatgagaatagaaaaaataattaaagcattgaattgtacaaattacaaatctgttccaaaatatacttacattaaataaaatacgcatttcaataagagatctacagtgaatgactctatgcattctgggaggcttcacaacatctaggcagggccaacattcgtgaaagaagctaagagattttgcatccaatcacagtttgtagcgggtatcttattgccaatctgcgagttacactgaacacatcattagcatcgcttgtgcagaaaaccaattttgtttgggaaaagggaaagcaagctctggcctcaattttgagttcattacaacttcttaagaatttcaccaacagcctatacagtacaagttcaaaaaagtaaacatgttaaggtaagcagacaactcttcagaagcccaaacacattttcttgctgtatttatgttgaattctccatctacaatgagcagtcatgaagatggtcttcttcagggcaacatggtcacaggactggggcaatccaggggactgagagggagcatgaggacgggagagggggctacctcttgctgtttcatgttagagacaaactgtaacacagtccatgggcctgcaatcgtccccttttatcatctggcataacgtttgatgtagtcatccactttattccggaagtcctccttgtcccgcaaatgatgttctgcagcttcaatattcagtggatcatcaaaattcaaaagatcagtaaacaaagagtttaatccccaaacgacatcctttaatgttcttgtgggagcccagccagtgccatcaattgaatgttctctcaataaactcagacatatttcccctgtctctgtgatgttggggtgccagatcttggtcaggcatttcactttgggaggcaccatgttgtacgcatcgggaacttcagtttcaaactgaaattttccaccctggtagtaaccctcatctggggttactgttagctgaaaacaatgaagcttgtttggatcaggaaaatgcactttacatgtacaaggtaaattagcttcaagttctgcaacctctttaacaagcaatttgtctctcacagaaaccctccgagtcgagtcggacgctgtggctgccgtccgggaccctttgagaccatcgtcacgcttcagtttacttgctagcgttagcattactgctgcctttaccctgggctccccgagacaggcgaggcgggcccggcgcccaacacatgcccgtccggcggctgctgcgaacgcgcccctcacaccgcaccggctcccgcgaccgacgcgtggtcgacatatcccgggattccgaccgtaccagcctgctttttgacactgttctatattcactaatgccg

SEQ ID NO: 131858 - DNA, 706 bp, Homo Sapiens
  misc_feature (314)..(371): n is a, c, g, or t
  misc_feature (627)..(627): n is a, c, g, or t
ttactctactgtttctcccctaacatagcccactttttccagcatttactttgtactcagagatgtcttggtacaagtgtgagtgaggaggggaggtagtgaaggatgcaggagacttgtccatgatctctggcctgagctcctggaggagattgacaggaatttcatcctttgtttcccagtgtttttatcttgaagaatttgggaagttcatcacctagaaggtggctttgagctggatctagggttggaagtggaatctcagctcaggggagagggtgactgcacgctgcaggagtgcttatgtgtcaggnnnnnnnnnnnnnnnnnnnnnnnnnnnnnnnnnnnnnnnnnnnnnnnnnnnnnnnnnnaatctcaatgtgaggcctgttcttggaaagcagcactttcatgcagctgggccttgtttggggaatgagagatgacagtgtgagagaggtaggggcttgaagttggaccccacaggggagaccttgaaggttgttgagccagggaagggatgtactcagagccatggtggaggggcatccaggctataaacagctgccaaaatctggggaaaataggatcaaagttaggggacagttgtagttctggtgagagacnggtgaggtcccgagctcctgggatgagaaaacgaaactggaataggtagacacagtattccttcaagttgtgctttatg

SEQ ID NO: 131859 - DNA, 1605 bp, Homo Sapiens
cattaataatatttattttaaagatcaacttttattgtaacaaatataaagtcatcaatgttttacaaattgtcaaaaatgctttaagtacaaaaaaatacattagtaaaatgaaagttatgttgtattatttggtatacacttaatactgccaacatgcataacatatgccagaaaagctcatgcattattggaagagaaaagaaatgtgatgtaactgctatattgtctgattataaattcattgcttcagtcagttttctttcttcagggataccatttacctgtagtctgctgttggggaatctgagtctgatgtggcaagttctgctgcgtttgcatcaatggcatgtttgtgctatcatagttgtctgtgtgtaaaggaggtatgatttccccagtcacagggtggaacacaggaagcgttgacaggggccatgctatctctctattcttggacatgtctcgaagctccttggtagatttctgaatagcactgtgatggaccagttggatgtctggtgtttgcatgtttctcttttccacgccttcccgtcggcagcacatgatataagcaagtattagaaaaaggaccagtgccactgccgagggcacagccagtgtaattaggaaatccgtgtaatagtctctgcttttcaaagaatcagaagggggtttgtattctccaccatcaggtaaaatcccctctccacgaatcacttcctgataggtggacacttgctttgttttatcaaccaatgaaattttgcaccagtcaatgtaaaattgagtacgaaattttttatcacatgttattacaggctccatttcttgactacatctcaattgattctgtggattttcaacttctcgtaaacaagaagaaaacgggacatctgcaccaaccatgacataaacgccctccttcaggtcattaatgggaagtggcaccctgccacccctgtctagggccgatgtgatgtttatggcgttcaggcgctctggctgccacacatttttcactgcgccaagaaagtctccaagaacctcactggccaacatttcttctacattcatattcttaatgaagaattctgcttgatatggcaacgggaagtcttctgcagacattatattaattatcaaattatgccttgcagtctcaaaggtgcgcctgttgtaggcagttatctcaatgattgttggcttccccacattttcagctgttggggacccatataggactccatcactatatggtgtcctttggatatatcgaagccatccaggtcggtctgggtaacccattaaatttgtattaaatgttatgggatcattactaatctcgccaggttttgggtaaggtggaaattcccccttaaaatattctctttccaaaacatgaacaaagaggacacctgctgatgggtatacattccgatcggagtgtaccttggagaaaatactgtacactgtcagcaagaatgtgccagtggtcgcggggctcatcctgcgtgtcccccgaccctgtcccgtccaagcacaggggtctcccagctcccaccaccggggcaattgcaatcccgggaattccggaccggtacc

SEQ ID NO: 131860 - DNA, 768 bp, Homo Sapiens
  misc_feature (367)..(391): n is a, c, g, or t
  misc_feature (748)..(748): n is a, c, g, or t
tcatttttttccttgttttcttttaaattcctatcgaagctttaagaaatgaactagctgctggtgttgtgttcctggacttgagcactagctgggataatagagcagttaaaagctgacaattgcactaacttttggactaggcccaaaccattaggtttgatgccccttcaggttttctcattttctctgccctaccagcccacatgatatttttttaaaagccacgattaaaaggtacagttatacatcctgcagttaacctccattctttttgtttattgtgggaggaattttcagactgtacctcttgggaaatacaaaatattatagctttggtccaagaaggagaagactaatttagaannnnnnnnnnnnnnnnnnnnnnnnnaaaaaaaccaaatacagagaaataatgcaatgtaattattttacattgtattaagaagatggaaactttctccttgccataatttgctttgctcaaaatctaaaagtatccatgccctgactaactcctgcccatattcattcttacacattgcaggtaaatggtatccctgaagaaagaaaactgactgaagcaatgaatttataatcagacaatatagcagttacatcacatttcttttctcttcccaataatgcatgagcttttctgggcatatgttatggcatgttgggcaggtattaggtgtatacccaaataataccaaccataacttttcattttacttaatggtatttnttggtactttaagggcattt

SEQ ID NO: 131861 - DNA, 453 bp, Homo Sapiens
aattcattgcttcagtcagttttctttcttcagggataccatttacctgtagtctgctgttggggaatctgagtctgatgtggcaagttctgctgcgtttgcatcaatggcatgtttgtgctatcatagttgtctgtgtgtaaaggaggtatgatttccccagtcacagggtggaacacaggaagcgttgacaggggccatgctatctctctattcttggacatgtctcgaagctccttggtagatttctgaatagcactgtgatggaccagttggatgctaggtcaaaaagaaataaaacaacatatatttaaaatcatatattagcctgatgggtcatcaatttgaaaaacttatgaagtatttttatcttttaaaataataagacattatggcacattgggcattcaataaactatttcagaaaggcatacatctcacatacttttaata

SEQ ID NO: 131862 - DNA, 1657 bp, Homo Sapiens
tttttttaaccttagtttaggtaaatttaatgactgtaaaagctgttcacatagcagctttaaagagacacgttttccactgacataaagttgcttcgccccttgcagcttatctccaccttcatgacctgtttcctcagtggcaggcaatgtctccccttcctgttggggaggattgcccaagtcagctctgaggccatcctctcaggtcagcaatatgcagaagagtccctcagagtggtcctgcagagaacatgtcccctaagtgtctgagaactggctgaggtgatcttcaccagcacatagtccccaggctgggctctgaccctgagcccagggttattgacatcctccatctctgcatcagggaagatcaccttaaggtttccatcattcctgccacacaggtcagtggcagagcgtttactgagcccttccactagcaccaactgggtacagcccacagaggtctgattggcttttgttgcttcttctcggaagatagtgatgagttcctccaaacgccttaattttacctcttccgggacatcatccttcagcctatgatatgcccgtgtcttctgtctcatgctgtaggcaaagaggaagcccatgttgtactgaacttcccggagcaaagagactgtctggacgtgatcttcctccgtctcaccacaaaagccagcaatgaaatcgctgctgaggctcacacctggaatagattctctaatatggtgaactaactccacataagcttctcttgaatatcccctccgcatggcctccaacacacggctgcttccactctgggctggcaggtggatctgtttacagatgttatctctctcatgaatcagctgcagaacctcatcaggaaaatccttggggtggggagaggtaaaacggatcctcatttcaggatctactctggaggccctgatccagaagatgagcaaaacgaagtcctccttgcttggttttatagttggtggtaaagccacgactgagattggtaggcactgcactgttgaactggacctccgaaatttgtcccgaaaactattaacattctgaccaagaagtgtcacttctttcagcccctgctcagaaagcttcttcacttcctctagaatggaggcaataggccgactcctctccctgccccggggtgaaaggaacaatgcagtagctacacatgttgtcacagcctcgcatgattgacacaaaggcagacgtggcactggcgcttgtctggactggcatgacatcagcataggtctcgtccagagagagcagcacgttggcagcttgctggcccgactcagcaacagccagcagccggggaaggtcccggtaggcatcaggaccagccaaaatatctaccattttctctctgttgagaatctcctccttcaacctctcagccatgcagcctagaattccaatcctcagaggaacccgggagcggggccgccttgtcttcaaggctttaagctgatgtaaacggttccagatggtctgctcagccttctccctgatagagcacgtgacaaggagaatcacatctgcctcccgcagcagcaacagtgcccggggtcccgcagcgtaagttctgccggcaagtcggatcccctcacaggtccgccgctgcgttccc

SEQ ID NO: 131863 - DNA, 1095 bp, Homo Sapiens
agtttaggtaaatttaatgactgtaaaagctgttcacatagcagctttaaagagacacgttttccactgacataaagttgcttcgccccttgcagcttatcttcattttcgatgacctgtttcctcagtggcaggcaatgtctccccttcctgttggggaggattgcccaagtcagctctgaggccatcctctcaggtcagcaatatgcagaagagtccctcagagtggtcctgcagagaacatgtcccctaagtgtctgagaactgctgagtgatcttcaccagcacatagtccccagctgggctctgaccctgagcccagggttattgacatcctccatctctgcatcagggaagatcaccttaaggtttccatcattcctgccacacaggtcagtggcagagcgtttactgagcccttccactagcaccaactgggtacagcccacagaggtctgattggcttttgttgcttcttctcggaagatagtgatgagttcctccaaacgccttaattttacctcttccgggacatcatccttcagcctatgatatgcccgtgtcttctgtctcatgctgtaggcaaagaggaagcccatgttgtactgaacttcccggagcaaagagactgtctggacgtgatcttcctccgtctcaccacaaaagccagcaatgaaatcgctgctgaggctcacacctggaatagattctctaatatggtgaactaactccacataagcttctcttgaatatcccctccgcatggcctccaacacacggctgcttccactctgggctggcaggtggatctgtttacagatgttatctctctcatgaatcagctgcagaacctcatcaggaaaatccttggggtggggagaggtaaaacggatcctcatttcaggatctactctggagacctgatccagaagatgagcaaaacgaagtcctccttgcttggttttatagttggtggtaaagccacgactgagattggtaggcactgcactgttgaactggacctccgaattgtcccgaaaactattaacattccctcgtgccgaattcgccacccggcctcgtacctagccttat

SEQ ID NO: 131864 - DNA, 866 bp, Homo Sapiens
ggcatgacatcagcatagtctcgtccagagagagcagcacgttggcagcttgctggcccgactcagcaacagccagcagccgggaagggtcccggtaggcatcaggaccagccaaaatatctaccattttctctctgttgagaatctcctccttcaacctctcagccatgcagcctagaattccaatcctcagaggaacccgggagcggggccgccttgtcttcaaggctttaagctgatgtaaacggttccagatggtctgctcagccttctccctgatagagcacgtgacaaggagaatcacatctgcctcttggaggttactggtccgcaggtagccactcttctgtaagatggaccaggctatctctgtgtcattcacattcatctggcagccataggtctcgaggtagacttttctctgccttccaagaagttcatccatcatgagatagggaggtgggtcttccacttctgaagacagcttctcctgaggagctgaggcactttttaaaaaatgttgaaaagtcggtccagcagccagcctggagctgaaatccttccgagctccatcctcctgcctctctggactgggacacatggtactagagagactgctgtgtgccctgcacatcctcagcgacagccaagacacagaggccaatggtccccaccccagagacctctgcacttggaggacacactgtaaagggtgcatggcactaaacagcccacagtctcccgcagcagcaacagtgcccggggtcccgcagcgtaagttctgccggcaagtcggatcccctcacaggtccctcgtgccgaattcgccacccaggcctcgctaccttaaaccgttatagttactg

SEQ ID NO: 131865 - DNA, 879 bp, Homo Sapiens
ttgtccaccccgcagtgacccaagggcaaaggcccacggcgctgtctgacggcagacaccagcaaggtcccgcccagagagaccaccacgtggccagctgctgccccgaccagcaacaccagcaccggggaagtccccgttaggcatcaggaccagccaaaaatccaccagttctctcggtgagaatccccctccttcaacctctcaccatgcagcctagaattccaatcctcagaggaacccgggagcgggccgccttgtcttcaaggctttaagctgatgtaaacggttccagatggtctgctcagccttctccctgatagagcatgtgacaaggagaatcacatctgcctcttggaggttactggtccgcaggtagccactcttctgtaagatggaccaggctatctctgtgtcattcacattcatctggcagccataggtctcgaggtagacttttctctgccttccaagaagttcatccatcatgagatagggaggtgggtcttccacttctgaagacagcttctcctgaggagctgaggcactttttaaaaaatgttgaaaagtcggtccagcagccagcctggagctgaaatccttccgagctccatcctcctgcctctctggactgggacacatggtactagagagactgctgtgtgccctgcacatcctcagcgacagccaagacacagaggccaatggtccccaccccagagacctctgcacttggaggacacactgtaaagggtgcatggcactaaacagcccacagtctcccgcagcagcaacagtgcccggggtcccgcagcgtaagttctgccggcaagtcggatcccctcacaggtccgccgctgcgttcatacacagcgatac

SEQ ID NO: 131866 - DNA, 1326 bp, Homo Sapiens
  misc_feature (1210)..(1244): n is a, c, g, or t
  misc_feature (1248)..(1286): n is a, c, g, or t
cagagataagcaacttttttttccatttatttgaaataatatacaagaatatagtgtgcaaaatttaggggcaacatcatgaagaagtgtgatgaactgaaatcaattttacagctgtgattcctaaccagaaacaccacttggtaagtaacatgaaaagccatgattgtagctcagagcaaaagcagctgtattgccaatgtatttgctctaattttagacagttggaggaaaattaaagtgcaagtgttgcactgcagtaagtgcaaagtctgcccccaccataaagattatgatgacaaaatatatttaagatacatggctgaggagatacagaacacgaagttaaaaaatacaatggtgttgactgtttgttaatagcaccattacagtgactatatcccaatgctattaactaactttaccttggcctgggctaggtctccattggaaataataacggatggctgctgccacctggtgcatcaactcagcatgccatggtaactgcagcaggtggctcttaggctgggacaccaacaccagccacctgccccatgttctggtagcctcttggcactgaccagactaggagcgcctatgtttggcacagatgctgagccatgtggtggttactagaggaaaggccgactcccagcttctgcttcatttcatcatgtgtacaatacagattaataagcagtaaggagcccaatgtataaacagcagttacatattttttaaattcccctttcggtacaatttaaaataaaacatgtatacacttctcctctctttctactgtactttagcaccacaggatatcaattttcaagcctattattacctgatagacatatatgaagtttggaagaaaaataaggcaatttggtttaaaatgttgatagttttagcttaatgctctaatggagaaagcaaatcctcactcatattattaaatcatttcaagactcaatgctatcagtatcttatggtcacacgaattgaggacaaatggtgagaccttgatcttcttaagtctttccatcaagagtcaatgtatatgcaaatatagacttaagaacataagcatcctggtttaatgttgttgtgagcctgaattggttcttttcctcttccaacagtcaggatttaaacgcccggccgtaatggccgaattcccgggcatatgtccggtaccgtcgactgnnnnnnnnnnnnnnnnnnnnnnnnnnnnnnnnnnncggnnnnnnnnnnnnnnnnnnnnnnnnnnnnnnnnnnnnnnntatgaccgagtagcgccctatagtgagtcttatacatctt

SEQ ID NO: 131867 - DNA, 471 bp, Homo Sapiens
tttattttctaatagtaaatttataaacatcttatacatcttagctttcatatataggattactatgtattgatttgtaaacattcactgagtttaattttatttccacagggctcacaacaacattaaaccaggatgcttatgttcttaagtctatatttgcatatacattgactcttgatggaaagacttaagaagatcaaggtctcaccatttgtcctcaattcgtgtgaccataagatactgatagcattgagtcttgaaatgatttaataatatgagtgaggatttgctttctccattagagcattaagctaaaactatcaacattttaaaccaaattgccttatttttcttccaaacttcatatatgtctatcaggtaataataggcttgaaaattgatatcctgtggtgctaaagtacagtagaaagagaagagaagtgtatacatgttttattttaaattgta

SEQ ID NO: 131868 - DNA, 1140 bp, Homo Sapiens
  misc_feature (292)..(292): n is a, c, g, or t
  misc_feature (320)..(320): n is a, c, g, or t
agaattttactgagacatttcttagaaatatgcacttctatactagcaagctctgtctctaaaatgcaagttggccttttgcttgccacatttctgcattaaacttctatattagcttcaaaggcttttaaactcaatgcgaacattctacgggatgttcttagatgcctttaaaaagggggcagatctaattttatttgaaccctcactttccaacttcaccatgacccagtactagagattagggcacttcaaagcattgaaaaaaatctactgatacttactttcttangacaagtagttcttagttaaccaccaantggaactgggttcattctgaaatcctggaggagcttcctcgtgccacccagtgtttctgggccctctgtgtgagcagccagttatgagctgttttagaagcagcgtgttgccttcatctctcccgtttcccaaaagaacaaaggataaaggtgacagtcacactcctgggttaaaaaaagcattccagaaccacttctctttatgggcacaacaaagaaacgaaggctgaagttcgcctacccaaaatgaaaagtaggctttacagtcaaaagtacttctgttgattgctaaataacttcattttcttgaaatagagcaactttgagtgaaatctgcaacatggataccatgtatataagatactgctgtacagaagagttaaggcttacagtgcaaatgaggcgtcagctttgggtgctaaaattaacaagtctaatattattaccatcaatcaggaagagaataataaatgtttaaacaaacacagcagtctgtataaaaataccgtgtatcatttactctttctgcagctctatacgataggcaggagaggcttatgtggcagcacaagccaggtggggattttgtaacgaagtgataaaacatttgtaagtaatccaagtaggtgtattaaggcaccaaaagtaacatggcacccaacacccaaaaataaaaatatgaaatatgagtgtgaactctgagtagagtatgaaacaccacagaaagtcttagaaatagctctggagtggctctcccaggacagtttccagttgctgaatagtcttttggcactgatgttctacttcttcacattcatct

SEQ ID NO: 131869 - DNA, 1097 bp, Homo Sapiens
aggagcgaggcctgggtggcgttctcagcacgagggtaaagattgaaaccaagtttactgtttcttgaacagaataggaagaaaatattttaaatggctgagctggtcattagactattactcatttatcttaaaggcagaaacttgtcaacccaactacgtgaaacagagaagcatgatttgcttaagcaggcgacattagagttaggcctctccactgaagcttcccgaccgtcagcacgtggcagacaggacgcgcccatcattccgcaagggagaaccggagaggcccgggagagtccttggctgtcctctcatcgaatgatgggtgctgagcgatcattcgtcacagtcgggcggagtttcacagtggcaaaggggttttctccgctgagaaaaggcggctttgcagtcccgttggcatcgttaggagccgcggtctcgggcttggacgctggggccttaaaggtggatgtcgtcctggccgaatctgctctcctgtcggcagctgcccccatggataagcattccaagtagtcgggtggggggatgacaacactgctattctcagacaagttcacggtgctgatgcttctcactggtgtggggcttggcgtgggcacggtcactgcttctgtctcattttcttccagcaacttcgtgtacgacgacgggaaccaacccctcgccttggacacgtcgtgttctccatagagccagccatccttctcctcggggatgagcagcgtgatgacatctccctgtgcaagctgagtaaggtcttgttggagcccgcagtgtgcgggaagatggtcttcactttctgcttcttcatcatgttcagtcccgttgcaaccgaaactgatcgctgtgaactgggatcttcggaagtacttgttgatttatttaccctttgtgaattcggggcagccgttgctgggttattaaacatatcgatcaagggactggtatatgctctgcctgaaggatcggggggcatctttggtgagcatttagaaaggtggcgctatctttcttaacacccccctggtgaattttgggctccaggggcaattccctacagggatcggattaat

SEQ ID NO: 131870 - DNA, 1784 bp, Homo Sapiens
ttacactcagattgtttatttaaaaatgcccaaaacacaaaaatagacttttaaggtaataatatatattactaaatatattatagtctacttataataattatatcgtcgttttcaatattacaaaaaaaggaagaaaaatacaagggaagcagacgacccaatatatataaatactataaaatcatattagaataaataaagtcgtcataaataaagggcccattgatttatgggtggggtttggcaacggctttggctacttgcttttggagggtaatttgagcaccaggattccccctcaggagaggttccagttaccaggagacactggaacctcaggtctataaaaactggaggggcagtgaaggcctattattcacagcacataagattctaggagacagatttgggcagggaagaggtgggggagagggttcattgcctcccttaaatatgctacaattttttttcccccaagaacctcggaagacactccatcccccaccatcatgaatactgagcttgcacacttggggacctgccccagcgtgaggtcaggggagtgggttaatgcattctggaaaaggggattacttgattactgtcccccaagtccccacagccctggggtccatgcagagaccacagtgcaagagacgtggctccccgctgagatccagctgatctgaccgggcagtcactttgtcactcagaaacagagatgcgattgaagatggggagtcgccggggggctgccacgggctggggtggtgcaaaaactcccgcctcgaagacgggagagtcagagccccccagggctgctgccgctgctggcatattcatcagggtcggatcccagggactgtacagagggggtccgaaccaggccacccaagggcccccagacgctgataggagtggcctttcggcaggaggggcaacagactggggtggggtctcttcgagccaggggggtgccaggggcagcagagaaggcagagggtgacagtggaaggtccccaggtggtggtggggagctggagggcgagaaggagctggaggacagggaagggccggccaggcctggtggtggtggtgaggtccggcggccagagggcaggccggagaagctgatgctctggcgaagcacaggagggtggcccggggccgccaggtcttcgctagggttgtggatgaagtggcagcgagagccgtaggggcagcggccctggaggtagaacttgtgacagagttccgtcttgtatttggggtggcgattggcctggcgcagctcgcccaggccatgggcaaactggcacttggccccgtagcggcagcgcccactctctgagaaggtccgacatagctcagtcttgtagcgcgagggggtggtggaggttgcagtgggcgaagtgggtgagggtgacagctcagggcccaggcggggagccagcggtgcgaagccagggggtgggggcacccagccacagctgcggccctccactaggctggtggagcggccaggcaggcgggaggtgaccccagacgggctggagtcggaggggctcaggctccagggtcccgaggagccccagcctgggctggactcagtccctccatggtcggatggcacgggcacgtcagggctcagcgacaggaggctctcgtagatggcagtcagatccatggtgtaacggttggccatgaggggtgtcggccgagagtgggagcgacgcgtggtcgacgatatcccggattataccggacggtaccagcctgcc

SEQ ID NO: 131871 - DNA, 376 bp, Homo Sapiens
  misc_feature (95)..(95): n is a, c, g, or t
ccccaagtgtgcaagctcagtattcatgatgttgggggatggagtgtcttccgaggttcttgggggaaaaaaaattgtagcatatttaagggagncaatgaaccctctcccccacctcttccctgcccaaatctgtctcctagaatcttatgtgctgtgaataataggccttcactgcccctccagtttttatagacctgaggttccagtgtctcctggtaactggaacctctcctgagggggaatcctggtgctcaaattaccctccaacagcaagtagccaagccgttgcaaccctaaatcaatgggccctttatttatgacgactttattatagatatatatattgttctctcatcatctgggagcctctaga

SEQ ID NO: 131872 - DNA, 897 bp, Homo Sapiens
  misc_feature (445)..(445): n is a, c, g, or t
  misc_feature (648)..(648): n is a, c, g, or t
  misc_feature (693)..(693): n is a, c, g, or t
  misc_feature (708)..(708): n is a, c, g, or t
  misc_feature (765)..(765): n is a, c, g, or t
  misc_feature (784)..(784): n is a, c, g, or t
  misc_feature (825)..(825): n is a, c, g, or t
  misc_feature (843)..(843): n is a, c, g, or t
  misc_feature (851)..(851): n is a, c, g, or t
  misc_feature (859)..(859): n is a, c, g, or t
ttttacagactaatgagcatttattaaaataacaacaatgagagaacaaagaggagagagggtaggggggctcatctccagactcccccccggctcctcatgctactcggggcagggtgcccacttttcttccgtgcgggaggtttttcagtcttgggggctgtagcaaggcggcgagggacagcctgggagggaatctctttccgggggatctcacccaagcgggagtctgtgttccttctggggacattatcccctcggccatcagtcccgctgtgttccagcctcttcaggtagagcaggagatcctcagcaggcagagccccccagccccgagcctggtagagtcgcaacagttgagacacctccatcagctgccttgggaatgtaagcccatctccacctctctctggggaaccactgctgggaccactgccttgtgaantgggaggagggaggctcagggacccggaaaagactggatgccatggctaagggaactttggttttgtggacaggcggtggaatacgtggcacttgaggggcttcctcccaagatgggacagtcagaggaccagacttagggggcaacaggtcgacagaagggttctcattgttctggggcactgtctccagcaactggtgcanaaattcttgaggcctccagctgagcaggcggcagccttgctttangaggcctcccgtcangtcaggatcttctcaggaatggctttctgcctatgatcggatggaggcccagtgcanaaaggccccctgtggtgantgaggctggtttggctcaggggctggagatgctgctctganagagggcccacagagtanatcgagangatgcaanaagagcgtcagtactctcctgctccggtcgtgataagg

SEQ ID NO: 131873 - DNA, 1526 bp, Homo Sapiens
taactccatctggaactttataggtaaaacccaactagactccccttttcactaattcctactcccttccatatcaacagtgtgcaacccagctggtgtgggagaggatgaaactactcattgaacctacagctggtgttggagtggctgctgtgctgtctcaacattttcaaactgtttccccagaagtaaagaacatttgtattgtgctcagtggtggaaatgtagacttaacctcctccataacttgggtgaagcaggctgaaaggccagcttcttatcagtctgtttctgtttaatttacagaaaaggaaatggtgggaattcagtgtctttagatactgaagacattttgtttcctagtattgtcaactcttagttatcagattcttaatggagagtggctatttcattaagatttaatagttttttttggactaagtagtggaaaaacttttatacttaactgagacattttgtcaaggctaaaaaaaagtcttgcaaaatggggcagtggactgacaggctgacatagaaaataaactttgcccaatcacaacttgtgcctcccatccctggagtactgactggcaccggtaagacagaatctctttgaatccattactccatgcccccttgaggcactgttgaagaaatctcacttttcagccagggtactggttctggtacatatggatcataagtccatttggggaagactcgtttatacaggttcatcagtactgtgtcttgagattttagcttcccatcaaagctgcatttcatgtggccatgggtacctaaaggttccttgatatgtcctctccggccccacttcgttctcagttccactggtttaaaccacagcacatcctctctgttgaagaacatgtaacgtactactgccatcttagtaaaaattttgaaaggatgaccactcagaacaactctcttgatgaccattctgtctggatctactgacataagatggcctgtagcaatgaggctgtgcattccattgcttttttgcttgaaaagcagcacagatgcaggaggaaaagtgattggcgcatagactgtcgccaccagggccatgtcagcagtcaggaatctctgcaatttatgtttgtccgctgcagtgtgctgagagaataaaggtgaggctcggaagcgcctgaatccacagtgaaatatgagctcttccttggctttcacaggttcagtgttgccagggtcacgcctcaccaccatattcaatactgacatcttctgttcatgaggtagtaaagaaaatgcaatcaagggtgttccttgcctgaagcactcgaccactgagacggggacttcagagacatgaagtgtgacataccagccaacctcagctccttcaacctctttttcttcaacctctttaaagatgcttttcctagtgttagtaaagttctgaaactgaaatattcgagcataatcttgaggaaggttttccttaggatcccatggagatgtccggaagctcttaaggcctc

SEQ ID NO: 131874 - DNA, 807 bp, Homo Sapiens
aattttcccttcgttgcataccagatacccccggtgttgcacgactatttttattctgctaatttatgacaagtgttaaacagaacaaggaattattccaacaagttatgcaacacgttgcttattttcaaagtacagtttaatgtctaggtgccagcccttgatatagctatttttgtaagaacatcctcctggactttgggttagttaaatctaaacttatttaaggattaagtaggataacgtgcattgatttgctaaaagaatcaagtaataattacttagctgattcctgagggtggtatgacttctagctgaactcatcttgatcggtaggattttttaaatccatttttgtaaaactatttccaagaaattttaagccctttcacttcagaaagaaaaaagttgttggggctgagcacttaattttcttgagcaggaaggagtttcttccaaacttcaccatctggatactggtgtttctttacagattcctccttcatttctgttgagtagccgggatccttgggaggcatgtaggaagcccgctggatcatcacgggatacttgaaatgctcatgcaggtggtcaacatactcacacaccctattttcaaggcttgcagaaactgatatgtagtcaaatataatcaggtgctgcaccagttcacagaggccaactccaccagcatgggggcaaacaggaatttcaaactttttggccatcagcaatactgagaggttctcattgacactgcccagtctgcaactgtcaatctggaggaactgcagggccttcgcctgt

SEQ ID NO: 131875 - DNA, 847 bp, Homo Sapiens
aaatgtaaagtcgtgagtttattgcatatgtaccaaaatgaacctgacctcctgggccccagcctgctgtacaatcactgtttgttttgtgtttccagctgtttccataaccacattaaatagaactagtatttcattaaatacttttgattttgacatagaacattagtgtacaactttcacaaaataaatcagtgataaaaacagtgggaaggataacaaggatagcagcaatacttcaaaacaagacattacaaaataaattaaaaaatacgttataaagtggttgagaaacaaaaataaacacatttttaaaatccatactatgtttcgggaaggctgccgtgtggcacacacctggctgcagatggcgggtggggggacattttctctgcagaaggcctttcctgacatctcgggttgggtgaccaccttaatctgaatttggaccatacgtccgaacaagctcaggggtcgaaattcgatctggtggcagattctcttttcagaacttgagagagcccttttccggtcgccccgggcctcccaggcagcctcagctcttcctactgaaagcactggcggagtggtgttagctacatccctgagtgtcggctgacggccgctggtgagggcaagcctgaaaagccgggcccctgaagcatctgggcagaggggcagggggcatggctggatcgcctgggaccaccgagaggggcaacacagatcacacgtgagtgggcttcgcgcggacccaaagtagaacagtcgggaagcttttaccatttgctttgccatgttgagttctttggggtggttcaaaaggaccaaacaaaccatcgtagaa

SEQ ID NO: 131876 - DNA, 951 bp, Homo Sapiens
aacatagttaaccagaagcaagtttatttaagagatcagttcagcacaggctactgtagaatgtcttaccccaccatattgtaatggtatgcacaaaaggcctaaaatcagagctatatatctaggaacaagacagatatgttggatgctgttgtacatgcaccaataatattttaaaacaagacaaactattccagtgaccataattgcctaccatagactccagagaagatcagcattttagaattagaaacacacttgaatagatggaaaagaaacaagctgttctacctgtgacaagagcaccagtattgagtgatgaggacaaaaagaggaagaatatattcaaggaaatgtttagcacttttgttcaaagctagaacccactgttggaagagcagcgtatgggctggtgtcttgtcagttgttaagcagtttgtttgcattttgaaatgcttactgcagttgaggattccaagattgcttgaagattgatttgactccggtcaaatcaagacttgaccagcaacatccctaaaggtctcttttccttcactttctggggataattaattgctggtcatcctcttgagcctttcacacctcgtttagtggctatagtgcccccaagacctgaggctgtccaccaacagctataccctgaagcatggctgcagaacactgcagggaaggcagccccatgcaggccatgtgtggatgcaggtggataggaggacaagaaattaggctaaaaaatctgagtttagcaaaaaagtatgtaacattgcttcagcacttgtagatgagtaaggatggctcataaattaggtcataatagtgttccagtagcagctataagaaaggcattaaacaaccctcatttgtgacattctagggcagcccatggatgagttaaaataattcaaatcctggctgggcgcagtggctcag

SEQ ID NO: 131877 - DNA, 652 bp, Homo Sapiens
ttttttttcaatttcaaacaaaaatatttattttaattaaacaatttcttggtattgttcaaaacattaatcaagcaattatctcataagactttttttctttacaaaggaaaatttccaattttggttttaaaaaaggcaaaccagtaagctacattagagatcagatataatatacagcctatgcagccacatgagaaatagtttttgctgctttgttattacacaggtagttgcttccttcagctaaagcctggagtattgtatttcttttatgcatattgggtttggttctattacttggcaggagattgtactcccctgagtcagctgtgttcattggtcagaataaattccagcatctgacaccaattccattaatcacagacaagcttgaataagtgtaagataatagaaaaaaatatctagtgaatggcgaacattgtctatgtatgtatgctattcagtaatacagtagaagagatctgagatattgagttcaagatatatgaaactgtctatcaaaaaggataaaagtcctcctacatgaaatactttaattcaggcaaaaggtgtatgaaccaagtaaatctccaccctgaaagaacttaaatttccatgtgaagccatctttatttccttctttatttcc

SEQ ID NO: 131878 - DNA, 2043 bp, Homo Sapiens
  misc_feature (1202)..(1215): n is a, c, g, or t
tttttcaatataaatgtgtaattttaatatttaatttaaaataaaaccaaggctggattggattgggaaagaacgtttgatttgcagaagaatataggaatttttttaatcacgacattacaagtcatttgtgaaaacagccttcctcctgccaccggctccctatacaacctgcttaggaaatatggaggtgaatcatcccccttacctcttccctaccagggcttggttctccccaaaatccaaaggagaaataaatgtcttccgttgcctcttcccatttttacagtcagcttctaaccccttgcaaagccctgaatcagagccaagcacctcagaaaatgagggtcccttggttctcttattgaagttgggcacatgtggtcagagaagccccaaggaaggccacagggactgacacctttacttttggaatttgtgcagccagttgtcagggctcccaggtgcaaccaccttataaccatatccacagtcacagaggagggagaggaggaaggatgaaaaccctgagcaggaccagacccccgccactttatcatgaccctaccaaagtccctctcccaggggtcattggcagagaaaccccaacagctctctcaatcaatcactggggcagcagggaaggctgagggccctggctggggaaaagctggtctttggagaggtatgaatgtgcagatataaaaagcaagaagagcatccttatctccttgccttggctaaggcactgacaggaaaaatgcaaggtaggaatggcaaagaggggaaaggaagaagacaagaaatataggaactggaggggtaattgtgggtgaacgtaccacatgggccccatacttgtgcaaagaaatgggtagagccatgcctgcatgtctgttacccataacattcccctcaccctgctccagagtggaaggaaaatgagttgcaggaatccagggagcacaataacatagggtatttccctgagccttagggttaagggctaaagaataaagctttatacacatggcaatttcgtatcccttcctatccttctcagtccccatcagcctaatgctgaccatccttccactataagagagatgagggaggtgtcggcacttgaggaaaaggctcagttggcttgaaacgtccactcctacagtggaaagtccatctatcagcttattgctgatgannnnnnnnnnnnnnatcaccatcactctgacccctccctgtcttaggtctgaataattgggtcacccataggaatgcagaacccagggtgggcagagcagagcagcacttgctgggataggcctcgagcctggtttctgagtccttgaggaccacgagctaacaggagctggtctgtaggttgctctccgtaagcagtgatgcaatggacgagggatcgtagacactgtcgaattcctcatctgagctcagcccttcgtttttgagagctgactcagcagctgagcgggaagctttgcgccaggagtccttctccagagacttgatccgggcctggagctgttcattgacctcatgctgctcctccacctcacgctgggccttcttcctcaggccgtccagtcgctcaatttcctcttctgcttcatccacctgacgcttcaaagccttcaccctcaggcttagctggtctttctggtcattgacatgctgccgctcgtcttcaatctggatggatagttctttaactttccgctccagttttcgattggtagactgcagaactgtcttctccctaaggtgaggtagaagaatgtctatgagtgtccccatttctaagggaatcctaacttggccccctactgtccccaaggactcctctcagccatgagctccaccattagactgggcaggatccagggcagattcaaagaatgagggagagtgacgtcattcacatttcagaatttctgcaacactctttgctctctatcaggagaaagtgttccctaaagatcaggccaggctggccatatctgaggtggaagatggaggaagccacag

SEQ ID NO: 131879 - DNA, 663 bp, Homo Sapiens
  misc_feature (236)..(250): n is a, c, g, or t
  misc_feature (636)..(636): n is a, c, g, or t
  misc_feature (641)..(641): n is a, c, g, or t
ctgcgcgtgttgtttactgttggtcactctctgctcttagcttcacattaccatttcgtgttttgtcaaagtccgtctcaattcgcgtttggtaaaataaatagataatgagcctctaggccggcgctctctcgagccggttaacgtcgtgattgaattttcacatcagacctgtgaagacagcccacgtgcaggcggcacgcggtgcccatgggggtgggctccagggtggagcnnnnnnnnnnnnnnntcttgacccctctggagccacctgccttttgacaggtggtgattttgtctcaaaacaaacagaaacgcgtgttgggtaagaattgagttgaaggactggatgggaagctgcgtgtgcgggtggagctgggcttctggaagattctggtgttgccgcctggcacgccctgtgagctgagtgaggccgggactctctacaccttccggacccgggctgctttctcggcccagacgtggggatgggattcgtgccggaaccttcttctggtgggagctcgcattccaaaaaggagcagcggaggggccgcctctgtcctgccttgtcacgtcccggccagccccagctcagtctccagctcagccccctgaggggcaggtgtgtctctnggcanatgtgaccaggcagggttccat

SEQ ID NO: 131880 - DNA, 429 bp, Homo Sapiens
tgcaggaagtgggatggatgggccacctcgtttggaatcagcagggtgtccctctcatgggaccctcccctctcccccagcctgtcctgtcttgttcactctccatcagggtgagctgactgtgcctggcactgggaggtggtgagggacaccgtctcacacacacagggaggcaagagctgccccccaccccacctgacagcagagtgtgcaggacgcaggcggccccactctgttgggcagggccctgaccctttgccgctccagccccctccccagggcctcctccatgatttcaccctccctacccacttttgtccccggccccactggcagaatcagctttgggtaactgtacagtttttctcgctgttggggaagacttatttgttggagtttcacttgtttaatggtctgggctttttttgg

SEQ ID NO: 131881 - DNA, 697 bp, Homo Sapiens
gcacaagtcagtaaaaactctttattcattccttcatgtgacagttggccttgagtagttacaaagacagagcagttcctgcctctcagaattctaagcagacattccagagctcacagatcagtgtcccaccagctgctaccctggaagcttcagggagatggggagcctggagtaggggggtgctgcaggaacccccggcaggcagtggggccaggcttcacaggcacccagggctgagtgcgagatggcagggggcaagcaggcaagcagtgggatggtcttgaggtgtggggtgagggcaggaagcccacggtattcctgacttggagtcgagggagacagaacggaggggcccgagctgaagacagagtctgagggaactggagaggctagaagccagcactcagcttcccaggagaccccaactattgccgggccaagtgtccagggagaacgtcgggtatccaaatgtttcagtggaagattccttttccaaacatgagctggttctttgggtttttaattataaacataatacatggtcaaggttaaaaacattttccaagcaccacatagggatatgaaataaaaattctatccccctctagaccttccagactgggtccagaaggagctgctgtcagtgattttccttacagagagacattgcagcacctacagtgcacatggcccc

SEQ ID NO: 131882 - DNA, 711 bp, Homo Sapiens
  misc_feature (686)..(686): n is a, c, g, or t
gccggttgcttgctggtctttattggggcgatgcttggggtccgaataaatatgggaaggggcgcgagctggggcgcgtccggaccctcggggcaggagtccgcgcggcgcaggggtcaccggcagccacactcggtggccaccatgttgggcacgtggtgcgcgctgatgcgctcctccgacaggctgatgagcagcttgcccgcgtaggcggtgggcacgcagcagggtgggcgcgccagggcggccccacgggcctgcatcttcagcagcagcaccacgtggttgccgtagcgcgggttgcggtcggactgaggccagccgcacacgccctggcaattgttggcctggtaggtctcggggatgagtacggagcgctcggcgcggaggtctacgctgagctcgcgcagcgcgcacggcccgtcggcggcggtggcccccgcgctgcgctgtgcccgacccggcccgcgcggatcccgcccgcgccactccacgcgcaggccctgcagcgccttcaggagcagcagcgctcgcaggggatcgccgaggccgccggggcctcctgggcagagcgcgagcaggcgcgccagcagcggggctgtggccggaggcagacccgggaggcttcgcagctcggcagccgccgcttgcagttcagcagccacgcggcgcgccagggccgtggnccacggcgccgacgtggggtcgtgc

SEQ ID NO: 131883 - DNA, 713 bp, Homo Sapiens
  misc_feature (605)..(605): n is a, c, g, or t
actggacattcatgaatgtttttatttgaacaaggcttccacagcactttatagtctctatctgaggtctctgcagctctggcctgctgggagttgtgaacggtttaggtcctggcctgggaagagaaaccagaggacctggtaaaggaagtagggttcaccttctagccctgtggagatgccgcgagggaacaggtcaagggtcagagctgggagatcatgccatggagggaaggtgagctgcagccacctgcctctgcacctggcaaacacaaacagacctttggccacagcagcctgggaaccagaagcagcagccaccttccggggggccagaccagtgcccctttcccttttctctgcccaagcttattctcagtggacatgggttgctggccaccaaactaaggccgcgcagcctctcctgacctcacggtatggtttctgactgctcagtaagggctggttcaaggtgaaagctgagccacggtaaagctgctcagggagaggaaagcacccaattactgggcattcagagagtggggccaatccccttgaaatgacaaccctattttgtgacccttttattggccatcctggaccanagtttgcccctctgcctcagttttccttttgggaatccaggcatgagaatggtggccctctcctggtggcttcagcacgtatggctccctgaatatcatctccatgct

SEQ ID NO: 131884 - DNA, 2813 bp, Homo Sapiens
  misc_feature (169)..(170): n is a, c, g, or t
  misc_feature (173)..(173): n is a, c, g, or t
  misc_feature (203)..(203): n is a, c, g, or t
  misc_feature (208)..(208): n is a, c, g, or t
  misc_feature (325)..(333): n is a, c, g, or t
  misc_feature (335)..(335): n is a, c, g, or t
  misc_feature (397)..(397): n is a, c, g, or t
  misc_feature (451)..(462): n is a, c, g, or t
  misc_feature (739)..(747): n is a, c, g, or t
  misc_feature (768)..(768): n is a, c, g, or t
  misc_feature (1271)..(1318): n is a, c, g, or t
cccagggatgatttgcttgcgggcaaatacataggtattgaggatgatgtgcttaggcggcggcgcgtaggtaaacgaaagcgcgtcgtgcggctccattgtgattggtcccgccctgagaagcaagcaggaggtagtctgttatattgttgggcggcggaaaccaganntcngcgtgtgtgggtgggggggatgatgctcanccagncgacggcgcaggtgtatcgccgcccggagggggcgtggggggcgattgtgttgtttccagcagcgcacagcaccgggtgttgagggcacgttatcgtatacgcgccagcatgcggtnnnnnnnnncncaccgcataattataagggggggaagaagaccatggacacgtgagtgtgatgtggtgaggantatacacgagaggcggggggtgggttgggtgttggtcacatctcatcatgatannnnnnnnnnnncggaacatatcgaaccacgggtggggtcccctcgtggtgcgagaggaggagggggggagggaacatactataaacgacattggggccgaatcgtgttgatttgttccccgcgtcccccggggggtacggggcccaaataagtttttagtgagggggtggggatttatcccccgtggggctaacaaaaaacgccaagcggcccgtgtattttttcaacaggtgggtgaaaaaagtggggggcgtttttattctaaacattataatgttgtatttcccnnnnnnnnnccagaaagagaaagacagggngctcggcgtcaggaggaggtgagacaaaatgtgttatctcacgcgcggccgacgtattctcccttggtctctcagactgtgtgcgaggttatgtgccatgaagagtatcccgcgccggggccgtgtgaaataccctgacagtataaccgcggagggactctccggcggggtaagaagaattagcacctggtgtgggagtgaggaggatgggccccaggaaagattgactcccttctaagggaggggggccgcgtgtagggtgattgtcggtatgcagaggggggcgttcggggtttagacggccgcggggccggttgttgtttagttaggtggaagaaaatccccaagcgcgccttggttcagtggacgccgggggatttttcgttaggaggaagcagcgtaatgagccactgtgtcacctttacggtgcaggggcgccggggcggccaaacggaatgggtttaggaaaggttctttgagggaccgaggcggccggacaaggnnnnnnnnnnnnnnnnnnnnnnnnnnnnnnnnnnnnnnnnnnnnnnnnaccaaattgccttttatttacatacgagaaaatctcaccgtgtgtccagctggccccgtcacggccgctgaaggcagcactgctgggcaaggagaaacaaggccacacctgcaacctgggctgcagggtgaggtggctccctccgcacaggccccaggacacccaccatggcacaggccaggctgctgcccccacacggcctccacgaggtcacgggtccatctccacaaccccaaggcagtaagcagtgtgcctcgctttcgccaagctgggccaatgaagaggccccgcccccaccctcaggccccgccctctccccttggaaaacaggtggttttttcctaacacaggaaaacagaaaatgagcacgctttctatggctgccaaagtacaaggagaggctctgccctgggagccactgcatggatggtgggcaaggtccgggagccagctccaaggagcaggaagcagggggccatgacggcaggacaggcccagccatagccccgggaagagagactgccctgtacatccaggtccgggagcctcttccggctgagcagggccgcgactcggcatggccccagcacccgagcaggtctggagggccctcagagcggggcaggggcgggcacgctggggaggggcagctccagggccggcgtctccgcagcctgtgccgggctgggcttccggtgatccagctgttccagcttctcgccgagctgggagtaaagctccttcactgcctctccgctctggcctgtaggctccagggccttctgcaacgcctccagcttagatggggccaccctggggtgcaggtgaatgaggagccgcagcgcgtgccggtgcacgttctccttccttggagaggcggtgaggaagaagccatcgaagaggctgctgcagaagtcctcaagggcaaattcgtcggccagcagcgcaaggttgcccgtgagcaggtggaggaagatgtcgccaaaggccaagtcgccaaaggtctccaccagcccgggcagcaggcggaggagcgcgttcttgttcctctgcttggtgatgtgcaggacgtagtacagccccacctcgcaggccatgcgctgctcctgcagaaacttagtgaagctttcgggaagtgtgtttggatatgagactggggctttctcctcagccggaagtttctgatccacattgaaagtgtagtcatccaccaggaaggacatgagcatcgggaggaacctggtgatgagctctacctccatcttgggctccttgaagacctggctgtcgatcatgtcccaggctccctggcccagcgccagcagccggagcagcagcaggaggtcggggctgtccctgggcagtgtctcctggccgaccagctcctgcaggtgcctgactgtgctcagtgccagcgtgttgatggcgaaggggtcacacaggatcatggacaggtccctcgtgccgaattcacacccagcctcgtacctagccg

SEQ ID NO: 131885 - DNA, 2052 bp, Homo Sapiens
  misc_feature (1954)..(2006): n is a, c, g, or t
cggtcctaggtagcgaggcctgggtggctattccagcacgagggcggaagtgggcggctgtgggacgcgcgcggagtcgcgcggcgggcgggacctggccgagctggagggcgccggggagcggggctcgggcggtccccgaggcccggcggagcgggcttctggggtgtctgcggcggcgccgggggaacgggctggggatggggcgcctagccgggcggtggccggggcctcggccatgttcgcggggctgcaggacctgggcgtggccaacggcgaggacctgaaggagaccctgaccaactgcacggagccgctcaaggccatcgagcagttccagacagagaatggtgtgctgctgccatctcttcagtcagccctccccttcttggacctgcacgggacgccgcggctggagttccaccagtcggtattcgatgagctgcgggacaagctgctggagcgagtgtcagccatcgcttcggaggggaaggctgaggaaaggtacaagaagctggaagaccttctggagaagagcttttctctggtgaagatgccgtccctgcagcccgtggtgatgtgcgtcatgaagcacctgcccaaggttccggagaaaaaactgaagctggttatggctgacaaggagctgtatcgagcctgcgccgtggaggtgaagcggcagatctggcaagacaaccaggccctcttcggggacgaggtttccccactcctgaagcagtacatcctggagaaggagagcgctctcttcagtacagagctctctgtcctgcacaactttttcagtccttcccccaagaccaggcgccagggcgaggtggtgcagcggctgacgcggatggtggggaagaacgtgaagctgtacgacatggtgctgcagtttctgcgcacgctcttcctgcgcacgcggaatgtgcactactgcacgctgcgggctgagctgctcatgtccctgcacgacctggacgtgggtgaaatctgcaccgtggacccgtgccacaagttcacctggtgcctggacgcctgcatccgagagcggttcgtggacagcaagagggcgcgggagctgcaggggtttctcgatggcgtcaagaagggccaggagcaggtgctgggggacctgtccatgatcctgtgtgaccccttcgccatcaacacgctggcactgagcacagtcaggcacctgcaggagctggtcggccaggagacactgcccagggacagccccgacctcctgctgctgctccggctgctggcgctgggccagggagcctgggacatgatcgacagccaggtcttcaaggagcccaagatggaggtagagctcatcaccaggttcctcccgatgctcatgtccttcctggtggatgactacactttcaatgtggatcagaaacttccggctgaggagaaagccccagtctcatatccaaacacacttcccgaaagcttcactaagtttctgcaggagcagcgcatggcctgcgaggtggggctgtactacgtcctgcacatcaccaagcagaggaacaagaacgcgctcctccgcctgctgcccgggctggtggagacctttggcgacttggcctttggcgacatcttcctccacctgctcacgggcaaccttgcgctgctggccgacgaatttgcccttgaggacttctgcagcagcctcttcgatggcttcttcctcacggctctccaaggacgggagaacgtgcaccggcacgcgctgggggtcctcattcacctgcacccagggtgggcccatcttagctggaggcgtgcagaaggcctggagctacagcagacgaaagcggaagggcttactccagctgggaaacgggacagcgggcacggaagcagccggaagggtgggggacgcgctaaggacggaccaaagaggcagcccacatgtggagcaaacacagggggnnnnnnnnnnnnnnnnnnnnnnnnnnnnnnnnnnnnnnnnnnnnnnnnnnnnncaaggagacgcgcacagacgcgaagagtgaaaggagtatacagagg

SEQ ID NO: 131886 - DNA, 770 bp, Homo Sapiens
ctcaggttccagcggctccaatgaagagccacagctgggtgagtgcagccactgtgggcgcaaattcctctcgttcaggctggagagacactccaacatctgcagcaggatgcggggttccaagaggaaagtgttgactcctccagggcccgggctaagggcacagaactagagcagtacttgaactggaaggggccagcttcagccaaggctgaacctcctcagaagagcaactggagatagaagcatgaatcttttatccatacgttccgccaggctcgagaggtccagcaggtaactgccaaaggtggaaactgttcacacttgcctcccatcctgcctgcagaaaacccagactgcattcagtgtcctcagtgtagccaccactttgctcccaaggtggctgagcaacacattcccaagtgtaagaccatcaagaactgtcttccacctctaaggaagcattatagttgagcagacaacaatggaaacttttggatagttcagaaagctctgcttctcttcagcagtaaatgggagtagaatttgatgcaaagcagaaagaaatcaaacagctcccagatctgcctgcagagctaaaatctgtgaggagagagccactgctaagcagcaggaggcagaaggaagccccagcttcccactaaattacaaccttgggctggtatgctttatgttattgccctcagaattgatgggtgaagacactgaagagtcatgagcaggctccattaaagctcttttcttgcaaa

SEQ ID NO: 131887 - DNA, 1047 bp, Homo Sapiens
  misc_feature (708)..(708): n is a, c, g, or t
  misc_feature (908)..(908): n is a, c, g, or t
  misc_feature (925)..(926): n is a, c, g, or t
  misc_feature (973)..(973): n is a, c, g, or t
atgggctgcctgcttttactgacacgcagaggatgaccaaaagcctctgaggggagtggaagcagggcctccccagcattgtaggtatgttggggtccaggggataggggcagtcgagagggcttgggttcagaagaagcccagctgctttttctcctgccgctgcctccacgtggccatgctgtagaattcctccttggatttcccaaagatatcttggaagtcagagtctgagagatagaactccctgcgggcagggtccacgccctctggcaggtcctcaacagcctggtgcatcagttgttcccggcgcaggcccccgttgatcgtggcgctggtgctgctgacggagctgctggttctgctgccagccgacttggggcttcgcaccagatcattctctgagctgtcctgggagcccttgagggcctgcagggccacggcacctgccctgccattgcccggccatctggatagccgcaagttgttgacttctgctgttatctcagagatggttgatgctgctgccgggctgccatccaccacttccttgtgggacgggtggctagtccacttgtaggggtctcaagtgaagaaccatccaatgaaggtgggaggctcatggccctgcttgaccagcacgatgggtgtggccgggctcctccctgctgggtgagtcttcaggtactcctggtcccagggcaccgnctccttccactcacttgcagcttcctcaagccacaggaagatcttcgtgcaggtgtccagtacatgatgtcatacttgttcaggtcctcctggcttgagacctcacttctgcgaggaccagcagccatgtgggtggggcactcaacagtcgtggctggagctgggactcctcagggagcttctgttctggggtaggggcnggctcccagggctccannaatgggaggtctgacctcacacgtttctcatctcctggaatgaagtncacaacgtggcactacccggatacatacacctcccaacaaagtacaacctggtgtgcacaaaaatgctgggttg

SEQ ID NO: 131888 - DNA, 630 bp, Homo Sapiens
atcctaaacatctttattggcttgttcccctccccaaacaaatactaaaatatactggtttggggtttgctctatgcattttccaagagccaatcaaacagcgacttgcatctctcctcactggaagctttttccatcacttcatagtattgaagcacagcctgcaggaggtctcccactttccatcctttctcttgtaattgttttgaaagtagcataaactccttatttgcagagtcatgaaaataaagttctgcaacttcagcctcagaggcaatgagccactgaagaataatccttagctgggggtctaccgtgcatggctccatgtcaatattcgtaattagcagtgtctttccatcttgccccaaaccttctacttcgtcctcatgctcttcatctttatcatctggtccatcactttcacttagatgatgaaaactgctgctttcatcttggtgttcatccttcaaaacttaaattggaccagcctaccagtggtgtcatcaccaatactgaggttcatctgctgggtactgacagactcggttgactgaaagtcttctatttcttttgaactgctaacagcatgcccaacatttgtgacagctgctgtcatggtttctgtgg

SEQ ID NO: 131889 - DNA, 743 bp, Homo Sapiens
aaattttataagagttttagatttaagaaaagttgcaaaaatagtacagcattctcatgtaccccacatccaatttcctttattgttgacattttacattcctctggtacatttgtcacaactaataaaccaatattgatacattattaaccaaaatgcatactttattaatattcccttaatttttacttaaagttctttttctgttgcaggagtccatccaggatactacattacatttagatgttatgtctccttaggcccctttattccgggacaatttctcagactttctttgttgatgatcttgacagttttgaggtagtcaggtatttgtagaatattcttcaacttgggtttgtctgatgtttttctcatggttagactgcattatggtttttgagaggaatacaacagagaggtaaagtggccttctcatcacttcatctcaaaggtacatactatcagtgtgacttattactgttagtgttaatcttgataacctagccgagatagtgtttatcagatttctccactacaaagttattttccccctttccatatgtaatttttggaaggaagtcactattcagctcacactagagaagtaggaagttctgctccatatccttgagggcagagttcataaattatttggaattcttcttcatgggagattcatctattctaccccatttattaatgtattcaattttctggcactacaagaatatatatatatt

SEQ ID NO: 131890 - DNA, 1487 bp, Homo Sapiens
  misc_feature (1360)..(1360): n is a, c, g, or t
tttattttgtattggttttatttaaattttacagaaacctgatcagagttaagtatgtaattataagtccagtaacaatttctacaaaaatgcacatacaatgccagaactccttaaaagcaactaatatcatatttgtgttttgcataaaacatgcattaatatgttggccaaaatcagtctctacaagaagagacagtccaatacagtcaataagaaaactagttgtgaacaacaggtaaaaaaagaggtttccagttaatgtgaaagaaggaatagtacctttcataaaacaagcccttcagcgctgagttaactgatcggtactattgtgctgcacgtaatgtaacacatcacctccaagacttggtcctgattggtcataggaagtaagggactttctggtagttacatcagatatttgagaagattaaaagttttccggacatgatggtatactaatagtgcaaccttgcaaaaagggttcgaaacattgtcagacttggaagagttccccagcttgataaacaacctcaaagacaccccgagcctttgaacggagccctctgcacaaggccagctcagggctcaccagcatgtcctgtggccacaagaccttccagctccacataccacccttcggtgaggatctgcaattaggagcctgagtgccgaagaacatggttgtgccatttctttgaggctttgactttttataaggcctagttcatctcatccagggattgggcactcgaatgaatacacagatgctggacacataaggagtattaatatacatggtggccccacagcctgaaatgcttttattaacatacatcaaggtgtgtctccgactgtcaggaaagaccttggtcctccagaggcagagagaagctgagggttctctatgtatcacaaggcatttcctacatagactgaggggtgttaaagagatctcatatcaactgaaaggacttcccctcaaatgtggggctctgtacaaccttccatgaggatcttcaaaaaaaagatctcatagtcgttagggaagtggcggtggacattaacattatatacacaaaactcatcattcgtgcagcctcgggccttgtttgtaatctcttccacagtctgtctcttccaaaacagggctccctgccctgcttatttcaagtaagctaagtcaggatctgttttctttagcagattcaagggggaaaaataataatttattggggttctaataacattttcataacagaatatcaaaataggtccattttttgatatatgcttatgaatatccctgataatatcaagaaatccagaggacttcgtaaaccaccaagatttcacaggnggtgagacccggtctgttttctaggcagcagagaagggactagtatacgggcaaatgttctccaggaagccctgtgagcactacagtactgaaattctaatttctagtgccaatagaatcatgaacg

SEQ ID NO: 131891 - DNA, 2081 bp, Homo Sapiens
  misc_feature (60)..(85): n is a, c, g, or t
  misc_feature (526)..(568): n is a, c, g, or t
  misc_feature (1386)..(1394): n is a, c, g, or t
gtgccaatctcaaaattaaccctcaactaaagggaataagcttgcggccgccgctcaggnnnnnnnnnnnnnnnnnnnnnnnnnnattattctttattggtcctaccaatgtgactctttacccaggcccactgttcctatgcgcactggctttgtaggcattcacatcatatgtctgtgtcctgaaaatctcaattaatttctccttcctattccttttccatgctctgcctcattttctcagaaattgaaggcatttgattattatttttttgtttgggtctgtgtaaaggttccttggcaggagaacatgcatatgactttaaaataaagaccaacattctgacactaaggtaatgcacagaaaaaatacagtactcagacatcattgcaaataaataccccatacagatgaagttatctcaaatgtaacaatatttcttatgaatcaacactgtaacggaaggtaaaaataggagtccctacaactaggaataagaaatgcttattccaggaaacagaattnnnnnnnnnnnnnnnnnnnnnnnnnnnnnnnnnnnnnnnnnnnggagaaggaaggacagtttttcttcctccaagagtaccaatttgaccactcccactaacctcactcagcaaacaaaacaggatgtagacctggtttgctaaggagttttaatgagttctgtttcctgaaattaacagtgattagttacaccaagcaagagaagatataatgtctcgctttcacatttgcaaagaatactatggctaaccctcatcccctactgcgcatgccaacacagcgtcggccctcctgataccctcagctcttcacaaacgtggcgttcatacagcttgctcagcttgtcccagaaggtccatttggttcccaaagcacactcaaggttttgtgtttgctttcattttctaagcccctgaatttgcaagtaaagaatcactgactaacagaattttgcacaatgactgttttctttccctcaatgaagatgcccaggtctgggtgtgaggagcacctgcctcacctgctgtccacgctggccttcagcatgcccactagctcttccctgctcggcttttgagaatgatctgtgctgggacacctcccttaactgatgaaggcactactggcaatgattactaacaaaaaggtgttgaaagagaacaccctaaaaatcgacgactgtagaattttctaagtgtaccacaatttggcacaacaaccagagtaacaaaacaattccaatttggaattttattggtacagttgtataaaattctgttaatcagtcatgcttcacaacgtcctaaaacccagaaaattctggaatttgtaggtaatactactcattcaataatttatcnnnnnnnnncaagtgcctattactgttttaaccagagcaaaggtcaagttttcttcttgttacattgaactattcctaagaataataataatacaatatgaaaaaccccagaatctgaataccctggatttcttaatgaacatggcatttaaaatctgtaatttcaaacatgaaccacaatgccgtatgatctaaaggctgctgaaccacagcgtggatacacttagctgagctcctcgctgggtcaaagcactcatctccgagtctaaagctacacgctatggagcacacagctctgcctcgtgctgacaccagacaaacacggtgggagctgaggcggacagctacaggaccacgagcatagaccacggcacctgagaccgtctctacgcgaggaattaaggaagcaaatataatatcaaaatatcaaaagtgcacaggttgatcggataaaaaaagaacatgtgtaacaaggagcccccgtggtgggcgtttccagtgggctcctggcgagcctggcagccagggaagaagggtcttcggcccatacagaggcctttccacgcagcagctcgcagcatgctcaacattaaagctttttttcctcccattaaaaatctggggaatgctattttgaaatgaattgcagtggcatatccaaaaagtttctaagtgggcttttaggttgcccttcct

SEQ ID NO: 131892 - DNA, 752 bp, Homo Sapiens
ttcccgctttgtctttttattattctttattggtcctaccaatgtgactctttacccaggcccactgttcctatgcgcactggctttgtaggcattcacatcatatgtctgtgtcctgaaaatctcaattaatttctccttcctattccttttccatgctctgcctcattttctcagaaattgaaggcatttgattattatttttttgtttgggtctgtgtaaaggttccttggcaggagaacatgcatatgactttaaaataaagaccaacattctgacactaaggtaatgcacagaaaaaatacagtactcagacatcattgcaaataaataccccatacagatgaagttatctcaaatgtaacaatatttcttatgaatcaacactgtaacggaaggtaaaaataggagtccctacaactaggaataagaaatgcttattccaggaaacagaattcttttatttttgtcatttatattattataatttttccttttttggagaaggaaggacagtttttcttcctccaagagtaccaatttgaccactcccactaacctcactcagcaaacaaaacaggatgtagacctggtttgctaaggagttttaatgagttctgtttcctgaaattaacagtgattagttacaccaagcaagagaagatataatgtctcgctttcacatttgcaaagaatactatggctaaccctcatcccctactgcgcatgccaacacagcgtcctcgtgccg

SEQ ID NO: 131893 - DNA, 1879 bp, Homo Sapiens
  misc_feature (1863)..(1863): n is a, c, g, or t
ttttaacattgtcttatgtctctgtaatggggtggtgggacacatagtgtctaacacttcagtttctctgctgcttccctcccattgagaagccagtgccagggttgctgtgaagatgggagagcttctgattcagcacaaccaggtactgagttcccaagtctgggctttggaaatggcgacagctctgggggaagcggcttaggagaactttgatcaggctctggtaccaggagaccgtcatggataggaagcagtccagctgggggtcgatgtccccaatggatttggcatggactgcttctaggagttcctccagctctgccagggccaggcgcccccctagccgcagtcgatcaggccccggtggctccagcaagaagaggcgcttccaaagggtgtcccgacggcagtgccctccagccagccgcaccagctgagccagccgtgctcgtgccatgcccacctctgcagccagtggtgggaacagaggagccggtccaggcgctagaataagccctgaggcctccccagggctgccagctgaactcccaggagcctctggctcagggggcagtctgggtggcttccggaagcggcgcatgtcagcagtgagcctggggaagagctctcgctggctggtgagcaccacgacgaactgtagccgcagaacgtgccgctcagcctctccttgctcctcaaagggtgcagcacagtgacagacaagcagagacacatcaaagtcatcctggtgtcgaagtccctcagagtccaggtaggagccagaactgtgccatgccgacaccagggcatactcgttgtgttctgggccccctggccgggccattcgcaatggcttcatgtggtaagagctggcgtgatcagccacgtagttgtatagctggtgggcagcaatgagtggtgtggggagctccaatgtcccttggtaaatgtgattgcggccaaagtggggtccgtcagggtggtgggccaggaaagtgtcgcagaaaggtggtgaggtggtagccgtgccgcagcaccagatgggcacctagcacgtgctgatgcacgaggcgcagatggaagtcatagctgaacgagtgcacgtgcatcaggtcccgcaccttgtcacactcctctgtgaacagcatggacagctgtgagttgacagcctgccccattgggattcgggaacattccagggcaaactgtttgacacagaagtaacagccctggaatgccagttccatgaggatgatgcccccaggcagtgcccgctgcaggtggtaggtggttaccggagagctagtgctcttggggctcccatcagtcttggttttagggcaggagaaggagcctcgaccctctgttccaaggatagccatggcccgtggccggctggtgctgcgggcgggtgaggggggccgcagtggtaccagcacaaaacctatgctctgcagatactgcacatattgctgcaggaaagccaagctcagctccttcagccaaggctcctcacgggctcccgggggcgacacatccaaggattcacagcttgtgggggcctctcggctcccagaccctgactcagggcgatggcgccgctgcccgtcagggggtccagaggtctctgggggcccatgcagccaggcagctgggtcgaagagcatggctgttgcacagtaatgcaccaggcgggatgactgcttcagggtctccagctctccagcactgatgggcatggtggctggggtagaacgctgctgccaggttacaaacaggttttccatcttcatctggcgctccagctctctgcgctctgccatcttgatctctaggaaccctcgtgccgaattcgccacncaggcctcgcttcctt

SEQ ID NO: 131894 - DNA, 1071 bp, Homo Sapiens
ttgaatattgtcatatgtctctgtaatggggtggtgggacacatagtgtctaacacttcagtttctctgctgcttccctcccattgagaagccagtgccagggttgctgtgaagatgggagagcttctgaacccacctcattaaaggatgagaaacccagggtccgagagcaaagggacttgacggtggccgcaagtgcttcaaaggcagagctgggattggaacccaggtgtcatctcgatgggaatgtccagcagtgatgtccaagtgggaagtgaagacccgaaggctcaagggacacaggtggctgacagtggtcaaaggctagggggcaggattcaggcagaggagctctagggggtgtttgccaccctgtgtgaactcccgagactctaccaggggggccgaaaggagtaccccagaagggcccaaggggtcctcggggttgacctgactctctggagtcctggatgggtcagtggctgtgggtgtttggggagggcggttcctgctgccaggctggggcagcagaccctcaagacatagttacaaagcctttgggtgtcactcagtgtctggcttgccctggggcccagaagggttggtcagtcctgcctctggcaggcacatctggtaggcccatgattcaaggaacagtgacattcagtggtccagtccactccctcagaggaggcgggtccagagggtgaaacaggctgtgttgatgacagactccaggtggtggtaggtggagaccagttgggcaggggggctctcgctgtcctggggctgtactgggaagggctctcggaaaaccactgtcagagacgtctttcctaagtgggagtccagaaacactagcacaaagcagtcagtgaacttctgattcagcacaaccaggtactgagttcccaagtctgggctttggaaatggcgacagctctgggggaagcggcttaggagaactatgatcaggctctggtaccaggagaccgtcatggataggaagcagtccagctgggggtcgatgtccccgatggatttggcatggactgcttctaggagttcctc

SEQ ID NO: 131895 - DNA, 1207 bp, Homo Sapiens
  misc_feature (1022)..(1042): n is a, c, g, or t
  misc_feature (1099)..(1133): n is a, c, g, or t
  misc_feature (1155)..(1155): n is a, c, g, or t
cataagtgcaactttttaataaaaatttacatctagataaacaatcttcagatttttgaaactttaataagattttaaaaacatcatgactttgaactgaaaaacatacacgtttagcacacaaatattgtaatatgaatgaactccaactccatttgaaaacatgtgaatcaaagtacagttttagaagttagtaattcacatttaagcaagttagcgccttgctgaatacagcctttgtaaaaaagagacttagtgcatattttaatggtacactgtggttttgtaccatttggttgagtttttcgctttattaaacaagttcttgaaagttggtagataaaggctaacttcctatgacgtgaaatttccaatggtaacagttacattttgtaacagaacactttctatagatttcttttcctagcttaaaattttaaaagcaatcatttgtaaggattgcatcaacatcaatttagcagaggaagatcaaactttattgaaactgcttgcatacaaaatatattgcactataaccaaacaaatgtcaacataaaatccaatctgttgtcgctaatatgtacagagaatattgcccaagagcagttacattacaaggtcattctaccttggttaattatctacagtattttaaaaccaaacagcttacagatgatgtgtgcaaggtaccaatttctgttttcaaatactatacattcccagaataaataactagaaatcaacattaatgtttggcaatactttttaaaagactttttaatatttgtgaaatcatgtgcagtttgttgccattttatatgcttgtttgtatgcaaggaaaagtaactgtaaaatgaaaattcaaagaaacaaactcacaaaatacatcagaggcagaacttcagttttttacggctctgtacagattcagtggtacccctactaggagttactttttaagaaaaatataacatcttagagtgaaggtccttcacatatttttcctcaataaatttcacttnnnnnnnnnnnnnnnnnnnnncaaacccccggccgtaatggccgaattcccgggcatatgtccggtaccgtcgactgnnnnnnnnnnnnnnnnnnnnnnnnnnnnnnnnnnncgccgcttcctcgctcactganctcgctgcgctcgtcgttcggctgcaagagctagcgccctataggtgatcga

SEQ ID NO: 131896 - DNA, 1077 bp, Homo Sapiens
cacagttttgtttgtttaatggataattctattagtttggtcaaaagtataattttgctttctctctatgtggaaattaaatacagtcctgacaaatgtacatgatttccaagttggtagaggttgagttctgttggattatgatatgtcaagttggctaaggctgggagctgttttccagaatttccttccctacgtggttcctgggtagagttgaccatgaagaaaggtgttatactcagtcattgccatcagtcgcagtgatggacagatgcagagggacccagcctgctgcagctgatccttgatctccaccactgtgtgtccatcccatctttcttaccgcaggcctgctgacgaaggctggctccaagcccacccaccaggatcttggccacggaccagaagggtagcagataaatagaggcaacaatttcagcagcatgataatttccatagacctctccacaagctcccaatcacagtcctacttcagcttctcagattctgtgcaagttctgaattgtctacctgtaccagtgcttcttcttccaattctctacctctcccttctagagcttcactacccagctcttcccacatttgtgcccaattgcattcctataaccagtccctcattctcatcatatttttttctaactgatgcattttggttatctgctaaacattagcagagtcttccactggaagcctgtttaatagagaaaggccctgtctgaaaaagcacccatcacccttgattccctcactctgactctccttcacagctctgaacaccacctgacatagtctgtgtgtatgtatttgtctgctttgttactactaaatccctgatgaacagagagggggctagcactcaatagttgctcaataagtatttgttgaatgaatatttggggaaactgacttaaatgttgctatatcatgatcagagtaacagtaatttgtcctacaatgtatgtgaaatattgaattcataatgttctagataaagaagaggtaggatattaaaaaaagtaaagaaggaaatagaggagaaggagtgggatggggagt

SEQ ID NO: 131897 - DNA, 1068 bp, Homo Sapiens
  misc_feature (716)..(716): n is a, c, g, or t
  misc_feature (973)..(973): n is a, c, g, or t
  misc_feature (1022)..(1023): n is a, c, g, or t
  misc_feature (1027)..(1027): n is a, c, g, or t
  misc_feature (1040)..(1040): n is a, c, g, or t
tttttttattttcacttttaatgatcttttacttaataataaaatgaaaaataagaatataggaatacatacaatctatatacatatatttattgcaaatacttaaaattcttatgtaaaatgattttctatatttgtgaaaaaatatgactttttaaatggtgttgacaccaacttctctgtacataccctcaattccaatgttaacaattcctttaaaaaggcaaaagacacaaaagtttagcatttaccaaaccagtctgtacaaaccttacagccagaagggaaaaaaatagcttgtggtaaataagtcaattttcttttaaaataaaaaataaaccccaaaactattccccttattgcatttttctgaaataatctgagtgtctttagagtaacttcctttgaaataatttgtgccttaacagtgaggtcctacatcaaacataccatatatgagaaattcaaagtcttccactgtcactttttacagatattaaaatatatattacttaaaatatattactggaaagctatttttaaaattgatcttcaatagttgtatcaaaatgtaaagcattaaaaaaaataaagtaacccaagaatctacgaagctattgcttcaactttaggaaatgttttaccctactgttctctttcaataggtttgtaggtattgaaacatggtaggaaaggcccctgcctatcaccatgtntctcaaagtctctttggactattctataaattgagctgaaaactaccgttggccaagttacttacttagcacacagtttgtaaggagatggggagacttttccctccttgctatgatgtgaaacctctaggtcaaagagaaacactctggactgctcactgatagtgagttctagaataatagcagtgtatgacagagaatctcccactcctcaccccattaagcaatcacttcacagagagtattatggtctctanggtggagaaggcatataactcgtgcgattcttggcttcgaggcaatccnnaaangatctataattcnatcagtcaaacgttccgggtgaatgtaa

SEQ ID NO: 131898 - DNA, 526 bp, Homo Sapiens
tttttcacttatgaaaacatttttattattcattcattccacaaacgtaggggctttccatgtgcagggcacagtgctggacactgaggcctctgccctccagtgctcatccagggcttggtcctccaagcctacctggactctgcctttctttgggacgttgtcctggacttcagtccatccagtacttctttccagaacttcagaatggaagcacaggtgaaaatcactatatttcaccactgatcatgggaacctagagtggaatatcattactgcatcacagacaagatcacagacagggtaagaagggggagagaggaaatttacaattcctcataaatagttccttatttacagagattgtaagtgattatgtaaatcacagagcttccaattaaaaccagctcaagctacaaacatgaaagtccaggggcagtgccagagccacctcacttgcccgagtgctgctctccagggcttgctaccatctgctcgtgtgccccttaaagtgagggcaatggta

SEQ ID NO: 131899 - DNA, 1360 bp, Homo Sapiens
ggcacgaggctgaaacttaaaagctgataaaatttattggctacgactacattttttctccaatcacatcaaatattatgagacacttatcaatgcaaagcttttgatcctttatcatgtactctgaaccctatgcactactaaataggcaatatgatacaatcaaaggtttctttggcagacataattatatgtaccaaaacattaaactgcgtattttcccttaaacttacctgactaaaggcatctgatcaaaagacaaaaagtgaacaattttaataagtagttgcatttatcaataagagtctacaaggtaacaaaaagtgtaaagagacatctttttgaaaattcatataaatcaaaccttccatgttattagatcaacaaatataatcccctgggtatattttattagggaaaaatgacaatattgataataaaaagagaaaggaaaaatgaaaatgcatctcagaccagaataccataacaaaacttttgtggaagctgcattttatttgaaaatccacccattttgctaacatacattttaatattgtaaacaaaaatagaatctgcagagacaatgcaacaagaatgcttaaactcatgtacagaattgctttcctacaatgaactgtccttcttaaggcccctctccacccaaatgttaaagatgtatttacacaaagcaccgatcaacagtgcagtttaattcttcgtttactaaactcttggctagacattaactttaaagatactatttccccttatttaaaaggtatatgatcataacatggcacgagccaaagaaaatgttcaaggactttgccccccttccctcccccttgtaacaccttctagagttttagtgaaaagaaggaaagtcttgaagtgaaagcaattcctcacattcattttggaaaggccctaatgtcaaatggaaaataatgacatgccaagcacaaagcagtaaagatccttcccaatgcactaatgctgaatttaaaatgtagtgcttttcctagtcagtgaactgttccctggcaaaatcctaggcacagaattgactataaggattaatgcatttataatgcttccctaaatcccacagaggccgagaattcttaagagattcagacctatggacttgccttaaaatatttagtgctctgtatgtcagctgagaaaagcattctgaatcagattcattcttgtggataaaaatcaaacatactgtgcacatccatactcattttcataaggaggtctgatacaatattaatgttatgtaaaattgataatcataaataaatacaaatacttaaggaatgtctactgcaaactgaatataatttttttt

SEQ ID NO: 131900 - DNA, 627 bp, Homo Sapiens
  misc_feature (495)..(495): n is a, c, g, or t
ttttaaaagttcaaagttttaatccaaatttagacagtgttgagaaaaccaaactttggccatagaaaccattcccctcccgggcccgcaatggggaccagaccacgccccctgatgccctgagtggtcccagatctccggcggtacctccagaccacgtcctcgcgctccgattggctgccgcttttgggcggattagaagctggattgtagcagagtgactcgcagaggccatgccccctcgtcttgtggcaggaccggaggggcgatcccggcatcccacgcgggcccccagggggtgggacctcctccacgcccactccctcggcgagagaaccccgtggaacccgaattagccaccgggggagatctggggggagggggtctcctggcgcgtggggtccgaaggaggcagcggcacaccgggaagagggtctcccttggagtccaaatttccacctgtcatcattctgtgccactgcgacgcctcagtanccagggcttgggagaggctgagaacccgctcccggtgaccttcggaagtcggcaataagggggtggtgttccttggacctttgctccacgtcaggctggcgtctggctggggacagtgtccttcccagggtg

SEQ ID NO: 131901 - DNA, 928 bp, Homo Sapiens
ttcaagcttccctttcgggaaaactcccttcttcaggtttctttcctctgaggtccaacccacaggggaaagtctgccatggactgagtggtgcgctcggatccataagcccccacagcaccttttccctttctctgcttggcttcaattgggttaatgataccttgtgcattcttcccgaggccccgtccagggacgtagcccatcttctgaagaagcttctgtccaattccttttgtgtgtctttcccagctgccgaagtccatgaaagatttggttcctcctgcaaaacctttctggctgggcttaaaattgccacccgtttttagcttccttggtccaaaatccttaggaaagtcgtcctgcttaacaggtttctcttcgtcatcagaatcttccaactctgcctcctccgctgcccctttcttgagccctgcgctgatgaagttgactggcgcagagtagtcacgggcccgtttgcctccaaagctgggcctctcatcatccgagtctcgctctgcccacaccccgtaggtggcttcttccttggtctgccagtggcgctgtcggttggggttgaactcattctggagatcccagtcagtgatctcaaagttctcccgctcgtcatcatcatcatcaatgcggccttccccatcccggtataagtgggacaatgacatggccagtcacttagaaaatgagtaggtatcttcttagatcccagattcttttttctattactgaggaaagaattatatctggatccttggtggtccctaggttccactgctcatagggctcaaactcaggagtgctagaagtcaggcctcgggcttgtctctctcttgctgtctgtccgagggtccagcgtaccaaattcagcctcgtgccgaattcggcgcgccgtcgacttcatactctctcc

SEQ ID NO: 131902 - DNA, 935 bp, Homo Sapiens
  misc_feature (71)..(106): n is a, c, g, or t
  misc_feature (109)..(110): n is a, c, g, or t
  misc_feature (595)..(595): n is a, c, g, or t
cagctttggccaagggcccattttcaatacctttttttccgccccccgacaatagaaccctcggatttttnnnnnnnnnnnnnnnnnnnnnnnnnnnnnnnnnnnnttnntttttcagcccaagtctctttattggaaccgggcccccgctggccctggctcaggcatttccatttccattagtgggaccaacccactgggtgatttgagtgttgagccgctggttggtccagtcctgccggatgtcatcaaggtggcagtcaaagtccacaaggtgctggtgggcccgatcttccagtagagctcccaccatctgccgtgactcttcccagtccctccacatcactaagttcttatccttagggacccagcggagaccttggttctccaggacgatgaccgggggcacacgaggctgaggcaccagtttctgattatccaacataataagtactgcatcagggaagaattctgcaattcgcccagcaattttcaaggccaggggcccagggctctgatcgttcacagctgcattggcatggtagtaaccagccaccaccagaccggcctgtgctccccacacatccacctggtntgagggcgacctccaacatgacggacagggccaggtggctgtggaagaggggcacacagtcggtgaggcacaggcattctccagaccgcggcgctggcgccaaaaacagcccgttgactgcggcgtgtgggtaccgggcagcatgcaggcacatcttcacgtaggccagggccgagatctccacctcccccatggcgagcgaggcttcggttcggcgacaacgctaactcgactcgcaggtagcccgccggctcccggcgccctgggtcccggagtccgcccccggcccagtccaggaggaggtcccgattgcatccgagccccgccttcccgcgcccct

SEQ ID NO: 131903 - DNA, 1051 bp, Homo Sapiens
  misc_feature (919)..(919): n is a, c, g, or t
aagggatgtcgtttttcttgttacagttaccagtatgacaggtgggaaggggccgggtgtgggttctggccagagggacctaagaacattaggtcctggcaggtgcagccctgggagcagccacgagggggcatcaggctgcacaggcggctccaggatgtcggtccgggaccgggcataggggttagcgagtgattctcgggcaccgcaggacgagccctacacagagcaggtgggcccaggaaccccctttctcagtccaggactcccaggcctcagggcctggctttggtggcgcccgtctgttgcagtggagttcggcggtcacagcctagggaccgggtccagcccagccagctcagcagcaggtcagcgccctgccccttcccgcgtcgctgggacgccccgagccgctcaggtcaccacgcaaaagccctgggtaatccgccgccagaagttgcgaccgcggctgctgagggccacctcggcggcctcctggaagacggcgtggacgttgtcatggagccgagccgagcactcgaggtaggccaccgcgcccacggacctcgccatctcctggcccctgtggtaggtcacaggctccaatccgtttcttcggagcttgttcaccagtgatttgtccttgcgcaggtcagtcttgcagcccacgacgatgatgggtaccttcttgcagaaatgattcacttctgggtacccccggttaaagatgttgtcaaagctgttcgggctggtgacatcgaagcaaagcagcaggacgctggcgtcagggtagaacaggggccgcaggcggtcatagtcatcttgccctgctgtgtcccagatgtggaggtgcacaggtttgcctttcacttgcaggttgaccatgtaccgctcaaacaccgtgggggtgtagctctcnggggaaggccccatcggcgaagaccatcagcagcgacgtcttcccgcagccgccgtcgcccaccaggaccaccttgacggaccgcacgcctggtggcgcctcctcacccgcggcctgggccgccgtcatccc

SEQ ID NO: 131904 - DNA, 1151 bp, Homo Sapiens
cattgtaagtgttccacgattttaataaatgtatacagttatgcaactatcattgcaatctagtttcaaaatatgttcgacatccaaagttttatttttcatcacccaaaaaagttccttcgtgcctgtttgcagttgatcccactctcacccccaggcaaacatgaatttgcttcctctctagagatttacctttttaagaagtgtcacataaatggaataatggaattttcttgtctggcatctttcacctggcctagcgtttttgaggttcatccatgtaggcccatgtctcagcagtttcttttcatggccatttccctgctgctcatgcatccgcggttggtggacgttctggttggcgtggacaatgctgttaggaatgtttgcatgcaagtctctctggtcgtatttctcttgggtgggttccagggagtatggtaggggatgctgaattatagaagaagctgcaccattttacactcctaccaaggatttaggagaattccagcttctctacgtctttgctatcacttgccattgtcctttttattttatcctggcggccgtcacaggcttcctctgatggagacctgtctgccggcgatttggtagttctgaatcccaggagatctgcggggggagccttgggctaggccccgtcacgggagagcctcgtgttgtcgcagaccggacttgctcagccctgggacctggggcccgcggctgaccagaagtaattttgacccgacgtagtccttatggtgtagggtcgaagtttaaagactgtttttaaaaacctgaggtctcatcgacagcgtaccgcgccatctgaagggcgctgtcccgccagcttccgtctccctcccggcagccccggggcgcctgttcggcttctctgagtgttttgtgtgctccctgacgttttaaacccacctgttaatactttgtgaaaaacaggagccacggtagcccgtaaaaactgctcacaatcaccccgccacccagagctcactagtgcgactatttttgtgcaatttcttttggcaacacgtttctcagctctcgggtgatctttaaggcagaagctggctctccgcctgtcggcgcgccctcgtgccgattcgccacccggcctcgtacctagccta

SEQ ID NO: 131905 - DNA, 686 bp, Homo Sapiens
ctcatagtagggaagctgggatgggggaggggtcaaaattatggcatgactgaacctgcatctgtgttgggtggacatgaatacttagctacctcagcaggaatccttccaggtcccctttaaagctgaggtccttagagtaatatgtccttaataaaaaggacaaatggatacagccttgaccctcccagtgaggagaccccaattcagcaataagtctcacccttctcccctacaggtcaggccaagaagggtgaaggcctcttgcactccagacctcatacgccccaacagcttctaattggatagaacttgctttaccttacagctcacaacctcagctgggttttaggtacccaaaaagggcctgtctagattttttcagaaaaacgtggagtgctaggggcagcctggaaaagatggggaacctgctagtgaactaggagggagacttccatagcctcagacttggatagggtaggctgagggggccctaagggagggactaaggctccaaggcaggtcacttttccttaggctgttctacttctggcttgttgcaagaggagtagatgccccctcacccacacaaaccccactcagtctccacccaactcctggcactgctccccaggggatcgggtctccactccagctttctcaattaaagacgatttatacaactg

SEQ ID NO: 131906 - DNA, 1072 bp, Homo Sapiens
gagagttgtgttctttattcccttgtatctccctaccgatcatttggtagaaaacatcttccaggttttccatatccttgactttgaacacatgttgctcattgtctttcttggaagccaaagcattgatgttcacttggttcaccaaaggcccgaccccaaacacatagacatccagataatcctcccttgggtttttgcgatccttgccaatgtatagcaagtcccggatctcatcaatgacagtaattgggtccccgcccatgttgtgcaatccatcagtcatgaggatgatgacatggcgggtgcggttccagccttcaggagggacgtcatctggccagctcatcatgctgtacactgcctggagggccttcttggtgttagtccctgacttcaacttgtggtcttcataattgatttcattgagctgcttcgtgacccagtctgcattactgctgtctgcttcagacactttgacccaaattttggggtatgtgggcatatgtccctagaccatatcttggcttcacaccataacttgccaccttctcaattaagttgactagacactttttggctcctgtgaagttgctggccccaatgctgtctgatccatctagcaccaggtagatgttcatggagcctgaagggtccaggacgatcttccgcttctgttgttcccctgggccgtgcccatcctcagcatcgactccttctatggtctctgtcagggaagacaggaaagcttcggccacctcttgaggggtgtcgtacatgaaggagtcttggcaggaaggctccgtcccgctccaagagccaccttcctgacacgttcgccgctgggagccacgcagggtaagcccccggctgcagtggtaggtgacgctgtctatcaaggcggtactggctgcccaccttccttgtgccaatggggatgcccgggttggagcagtaccccgctccgttgtcacagatcgctgtctgcccactccaccggccattcacttggcaggtgcgattggcagagccccggagagtgtaaccgtcataccagtggaaagagatctca

SEQ ID NO: 131907 - DNA, 685 bp, Homo Sapiens
  misc_feature (128)..(147): n is a, c, g, or t
cgcttcattggctttattaccatgtaacacaagctcacagcctctaatgttaccaaccttatacacaaatggccaaacaagaaattgtcctttccaaaagataatttattctggtttcccctcttcannnnnnnnnnnnnnnnnnnncaaacaagtaaggataggccccaaatgtggacagatcctcttagtcacatgagcctcttggggtctattttctctaggtgaaccagaggttttagctgttctgcgaagttcttcatgtcatcagagaccatgtcctgcccagcgggtgctaccacacttaattccacgagataggagagtgacaaggcctcagtgctgtctgtgttccctggcaccaggatgcggaaaatcttgtacaccataatcttcatgatgcccttacggaacaaatgtcccttagcaacaaactcatggtccatgcggaagcccatttccatcaagaagtcggtgaggttctcagatgtggcaatgtccacgcagtttcgcaccagggcatggcggttcttgtctcccatttctggctgtcccaggtagcgcagatgccagggtgcccctgccctgtccatagagcgtcgggccctgagaacaaatgggctggcttgctggcccttaaggaggaatacatctcatggtcaaggaaagtctcaggttccatgtt

SEQ ID NO: 131908 - DNA, 1739 bp, Homo Sapiens
tttttgcaggtgcatttgtttctttatttaaaaaaatcatctgggggcatggtctgaggaggacacccctcccatggctttggggaggacgcaggttccaggagtcacagggcaaaaacacccggggtgggtgggggcgtggccggagtggggagggattgtctccacagggcctggccactggcctggccacctccccggctgccctgatccagcagccacactcgtggtgaacacagggcaaccccgtcctgatgctgagaaaggtggcatggagtggacagacggcctgggggacactgggcctggcaccgcgtggtgggggggccccagcagcagatgatggcctggggctgcggctatccccacggagggagggcggtgtcggtgtcgggcagcctaggtgtagaagatgacctcggggatctggccgtcctccacggatgtgccattgttgttcccggccgcgtagcaaaaggtgaagcaggtcttggcgcccgtggtgggcgactcgtgtgtcaccttgcgcaggcctttggtgccgtagtgggagtctgggcccttgagcgtggcacaggccgtgtagttgacgttgggcagcacctccaccggctccttgaacatgacgcggaaggtgctggctgagccgtcgcagctgaagcccgtgtcgttctggcccaagacggtgttgctatcggtgtgaataatctggatgttcacttggtagtcggtgggcccgtggatggatccatacagcccaaatcccaccacgaagatgcgcttgttgactgagaacctgatgcggtcactggtcccgctgtagccccagcgactctccacctgctggaagcggttgatgctgcactccttcccacgcaggcagcagcggggccggtcaatgaactccactcgtggcttggggttgacggtgaagtgcaggaagaggctgaccacctcgcggtccaccaggatgcccgactgtgcgggacctgcagcgaactcctcgatggtcatgagcgggaagcgaatgaggcccagggccttgcccagaaccttccgcctgttctctggcgtcacctgcagctgctgccgctgacactcggcctcggaccagcggacaacggcattgaacagccgcacctcacggatgcccagtgtgtcgcgctccaggacagccaccagcgtgtccaggtcaatgtcggtgaagccctccgcggtgatggcgtctgcagtgtttttgtcgatgttctccaggcacaggctggccagctgcggttcatcgaagagtcgcgcctgcgtgagcagcatgaaggcgttgtcggctcgcaggttcttcttcaggaactccacgcaatgggcctcgagcgctggcaccgcgtacttcttggcggtgtatagcgtggtcatcaccgtctccgggccaatctgcacctcgtccgagtagagaaacttgagcagtgcgaggaaggcggcgggttccacgtcgggcagctcaatctccgtggatgttgtggccattcccccgttgaacatggcatcaaagacggcgctgcccacggccagcacgaacctgtgcgcggggatgcgctgcgagctgagccccttgcccaccaggaagtgcacgtcgcacagcacctcgttgttgaagaggaaggcgaagcgctcctgcacggtgggcttgctggcctgccagttggtacggcctcgctgcagcgccgccgccccggcaacgcggccgc

SEQ ID NO: 131909 - DNA, 1622 bp, Homo Sapiens
gcgctcaaggcaggtgcatttgtttctttatttaaaaaaatcatctgggggcatggtctgaggaggacacccctcccatggctttggggaggacgcaggttccaggagtcacagggcagaaacacgcggggtgggtgggggcgtggccggagtggggaggggctgtgcccccagcacctgggggtggctcccacggcaccaggtgggctagggcaacagtatgtacaggcgagcagtgctcctggacccggtcggggccggctggggccccattctgcggcaggggagctctggggcacagggtctgagtcccatcttgggctgcagggaccgcgagggccgtccagggaggctggacagcgggggcctttatctgggcccatcaggtggatgagaacggacactgcaaaccgctcaccacctgggccagggctaggcctatccggcaggggccgtccccacactgaatcctgcgtgcgcagaactcaagccggcatccaggcagtgggaacgccccgcaggctgggcttgggtggcctcgggcacgtgacaggtggggcccgtgtcctgataaacggacaggaacaaaaggaacgcaaggtctgggacccacggctctgggagcagcgccacccaggctggctcctagcagagaaatgggaatcgcaaatgcattgcaatgtgcagtgaagagacgcgagggagggcggtgtcggtgtcgggcagcctaggtgtagaagatgacctcggggatctggccgtcctccacggatgtgccattgttgttcccggccgcgtagcaaaaggtgaagcaggtcttggcgcccgtggtgggcgactcgtgtgtcaccttgcgcaggcctttggtgccgtagtgggagtctgggcccttgagcgtggcacaggccgtgtagttgacgttgggcagcacctccaccggctccttgaacatgacgcggaaggtgctggctgagccgtcgcagctgaagcccgtgtcgttctggctcaagacggtgttgctatcggtgtgcaatcatctggatgttcacttggtagtcggtgggcccgtggatggatccattacagccctaaatcccaccacgaagatgcgcttgttgactgagcacctgatgcggtcacctggtcccgctgtagcctccagcgactctccacctgctggaagccggtttgatgcctgcactccttcccacgcagccatggcagcgggcgccggtcaatgaactccatgtcgatggtcattggaggtctgacggtgaacgtgcagcgatagagcgcgtgaccaccctcgcggtccctacccagggtatgctccgtactctgttagctgggacactgcagcgaactccctcgatggtcatgaccgggaagcgaatgaggcccagggccttgccctagaaccttccgcctgttctctggcgtcacctgcagctgctaccgctacactcggcctcggatccacgctggacaacggcattgtacagccgcacctcacgatgacccagtgtgtcgcgctctcaggacagccatccagcgtgtccaggtcaatctcgctgaaccctccgcggtgcctcgggccgattaaccccagcctctactagcta

SEQ ID NO: 131910 - DNA, 1258 bp, Homo Sapiens
ttaaaaaaagatagttcaaaagccttaaaaagtattctctccagattataaaaggttagttaaaactgtttaataggaacaatcttgcacaagcagaaagagctttgatttggaggattatagcaacatacaactgagagagtccacagggacagtcagacgggatgtctgcacctcttctagagactctgtgttaaaaacacgaccgactgaacattctgccccctttcaaggcacatgccacttcttaaaacggtcagctttccacacaggctaccagatattttatttacatttaaaaataggttttcttcttcaacgtagtggaaaggcccggagcccagtcacagcggtgcctgcctagcacaagtgtaggacagctttattgatctctgggtttgtccagtcattccgaatgtcatccaggtggttatcgaaatccacgagcgtctcgtaggaccggctgtccaggagcgaggctgagatcctctgtgcctctggccagtcttcacagtagtcatggtgtgggtctctgcaccgccatctgttctcatggtgctcgtacacgtggatcgtaggcgctacgcagtccatcgtaaacttggtgttgtctaccatgatgagcgcagtgtcgctgaagccctcggcgattctggaggccaccttctctgcaacctggtttggactggcatcctttactcgctcattagcttgataataaccagcaatcacgtagctatgatctttgcaccatgaatcaatcagggtgagagccacctccagcatgggggcgagggccagggtgccgtggaagagggggatgcagtccacgaagagggtgtggtgggcgccggggccgcccagggggaggtgctccttacgcggcttctgcttctcggccaccaggagcccgttgacggcgcagtgcgggtacttggcgccgtgcagcaccatcttgcagtaggcctgggtggtcagtttcaccccgggcatgctgacccgggagggccccggaggcccctgggcgcgcggctgaggcctggacccgctgcctggccgcgcggcgcctcagccgagaagcgggacgaggcggcggcgattgatggcgcggccgcgggctggcgggggacccttcaggcccggccccgtttgggcctcggctcctggaaaagcgactcgcgcctctgggaagccgcagccctcgtgccgaattcgccacccaggcctcgctaccttaggaccgtagtagttactgccg

SEQ ID NO: 131911 - DNA, 928 bp, Homo Sapiens
  misc_feature (116)..(128): n is a, c, g, or t
  misc_feature (178)..(230): n is a, c, g, or t
gcactatatacattctgtccactgacgatactgtcagctggccatgcattttattgcacatataaacagtgtacaaggatcttgaagacgtcttagccatagaaggactgcatttnnnnnnnnnnnnngcaattttacagaagactgaagccatttacattacacaaccaacttcaannnnnnnnnnnnnnnnnnnnnnnnnnnnnnnnnnnnnnnnnnnnnnnnnnnnnctctcaaaacaatgattacaaagcttcatgctaccatatatacacgtaagaaaatatttcaggaccccgcattctgaatgcccgtgaaggtgcagcaggctaaactcctacttatatagtcaacctttgaatgttgcttaaattgtatacactctttgtccaaaatgtttctttacatcattatgctatttgacaaaaacagggtatttgtgcagtacagacaaaatattaaaatacattttaagttaggttaaagtgcacagtacatctgataggaaataactgctagctgccaatccaaatttccgttttcagaaacctccccccccatcttcccaagagtggagggcagccattgccttggttgatgttggtctgtgctgactgcacactgaatcctcctcctggtggtgtcttttctttttgcgtccccctctacatttgtcttacaaactgtggctgctgctgctctaaaaacttccaatggcttttcgaggaggtgaaagtgcagtcagcattcacaagacttagaaaggttaattactgggacatctgtgattgcagcgtgagtgcacatgcatggaactgcctgcagaaggctgccgtgttccgtgaatctctgagagcagcatgggttccactccttggctggttcttctctagccctattttgttgcacttgctccctcctcagcccc

SEQ ID NO: 131912 - DNA, 706 bp, Homo Sapiens
  misc_feature (633)..(633): n is a, c, g, or t
tttcattctattatctctttaattataccttattatgccatgtcttatttttaggcacatcatttagatttttgaagaaaggatatgaaaatggggaagggttctccaatatataaaggcataagaaatgtcttcagactctctggatccctgtaaacatagtctatgtagctagtgtctgatgattcaacttcccacatacacgtattccagaacaaacagatcagtaaatccaggcaaactccatcctggcctccagctgctgaaccaattgtttgtccacgtggtgacagaacaggggaagtaggttgctggggaaagctaggggttctgccagagaggctgtaggcatttgggctatctcccaggcaatcagaaccaccatgtctgtcctagagagcataaatataaatataagcaaatagatttgcttaagaaacagactcagggccaaggtttcttattatctttccgttactactaccattgtcccccacccccaggtagcaattcagaggtaacatttgcatgtttggtacgtgccaagcaatgcttagtgctttacacatttcccttcctatttaatcttaagaactatgaggggttaataccatcatccctagtttgtagatnaagaaacaactaagagaagtgagaagtgaaagaattgccctaaagttatattgctagtaagtgatacagccag

SEQ ID NO: 131913 - DNA, 157 bp, Homo Sapiens
  misc_feature (86)..(86): n is a, c, g, or t
gttagcgtctctctgtttattcgctcacaataatacacagcccctcggatggggacgggggtaggaggggctacaaccagggtggnggtgggaggggaggagacatccacttccctggcccctctcccctctgtgcttgggggggaaaggaggggag

SEQ ID NO: 131914 - DNA, 1905 bp, Homo Sapiens
  misc_feature (1804)..(1804): n is a, c, g, or t
  misc_feature (1882)..(1882): n is a, c, g, or t
taaaccggtggccggggttgaccacccaccccaggcacttcggtccgggaacaaaccggacctccggaagcctgacactcccacccccaggactgctacccaagtaagtagccaagttcctcggttcctatacagggtaccaaggggctccaacaacagtggcaacattgtgatgatggacagaggctgaagtcacacagctgcccctccctctgagggctaaaagcagcggagtgggcctaatgagctctggtcaatttgttcattttccacctagtgagcttttctatgggagcaggggttagcaggagatagggagagttcgagggacggaattcagaagctagtatggaaaggtgatttgtgtgacaaatcaagttcaaattctgattctgccacttcctgcctgtcaaaccttgggaagttgttcaacctaccaaaacctcagtttcttcaactataaaaaggcaataataatacatcacctcctagggttgttgaaaggagtaagaggataatgtaggtaaagtcctcatacctggcacagagtaaggactcaaaaaggttaaacactattactgaaaacacttctggagaactcttgagggtgtgggaagtgaggtgcagcattgtagataagacagaagggtggacttcgtgagaacctggcttgctttccaattccaaaccagaagtgacttggaggggagcaaggggagatgccaatgacatggtaggagcaaagaggaaaaaggtcagcctctagctaggatcccccaaaaactgaagaacacggagagctgcaacctttaggaggtatcaaagtgccagaaagtcaaagtgggacatcgaccaatgtctagagccaactgatggatgttgggcagctaaagagggaaggggcatgggataagacctgcccttcttgcttcttgccattgggcaggcattggagaccctactgctgaatggagtgctaaccctggtgctagaggaggatggaactgcagtggacagtgaggacttcttccagctgctggaggatgacacgtgcctgatggtgttgcagtctggtcagagctggagccctacaagggtaagaggcctatactggggctgcttccaatgcctgtcctttagagctttcccgggcttcctctctagcttaaccctgatcctggggaccaggctgcaggaggagttgtggtattcgtcaaggatgtcacacagtggacagaaagtccaagcgagggagggtctgacccagtgctgatggagattagtggtgggtagtctggtatgaggatctactgcactgacaagggtgtcctacagagtggagtgctgtcatatggcctgggacgggagaggcccaagcacagcaaggacatcgcccgattcacctttgacgtgtacaagcaaaaccctcgagacctctttggcagcctgaatgtcaaagccacattctacgggctctactctatgagttgtgactttcaaggacttggcccaaagaaagtactcaggtcagaaatcaacatgtcatactgccccatcccctacagttggatagtccccataattcgtcctcttgcacccacctacccctagttagctcttgcttgtggaaagtcctcatctcccagcttgatggcttcctcccaagttttccaaatcatctgatttcctcttgtctctgccattcagggagctccttcgttggacctccacactgctgcaagcctgggccatatgttgctgggaatttcctccacccttcgtcatgcagtggagggggctgagnagtggcagcagaagggccgcctccattcctactaaggggctctgagcttctgcccccagaatcattccaaccgacccnctgcaaagactatgacagcatca

SEQ ID NO: 131915 - DNA, 828 bp, Homo Sapiens
cacattttattcttttacatggttcccatctaccctcacaacacatgtcatcacctaagacacacatacaagctccaatggcttttgccaggcaattcttcctccaggaccccatctggcccctccctcatccctccccttggactttgcccttcttactggccaggcaggggggccagagtccaggcttgactcattcccaccttgtcctgggctgagatcccaggtttgtaacagaaaacaccactaaagccccagcacaggagagaaccacccagcccagaagttccagggaaggaactctccggtccaccatggagtacctctcagctctgaaccccagtgacttactcaggtgactgctaaccctccgctctaccctccacctttaggggatataggcagggcaacaatactccactcagcccctaggagactaaccagtaccccttcctctcctgctccccactccacagtgggcttgtcaagctcctgagccacccgcccccacctgcactccatggtctctccctcatccctaatcgataaacctagatctctccctccctagccctctagccactctaccctcatcatgccctttacactcaccaagcccctcctcgccccttcttgacttttcttctcaactaccaggtcagtatctaatataagctcggagtttggacggagggtctggacctcagctccaccaccccagcgacctttccgtgtctgtgatcacaagcggaccatccggaaaggcctgacagctgcccccggccgtaatggccgaattcccgggcatatgtccggtaccgtcgactg

SEQ ID NO: 131916 - DNA, 1073 bp, Homo Sapiens
tttggtaaatatttgatatttttattggaaatgtttttgttagtttgaggggaagggtatgaagacagatctcaaggtaaagtcagagagggctgtcatcagtatgctggggagtttagggacaggaggcattggtaggggattagatgtagcagcagtcaggctgggatcaagatgcctgggggacatcttgatcttggcctttcagggcaagtgggaggctagaaaggtggctaggaaagaacagcattcttcaggtaagggtatagacttgggatgtgaggcgttatgctgaaaggttctgtcacgaggggatcagaggacagtggggaaattgggtgggttatctagcctgtactgtctgcaggtcctgaaatttgatgctgtcatagtctttgcagtgggtcggttggaatgattctgggggcagaagctcagagccccttagtaggaatggaggcggcccttctgctgccactgctcagccccctccactgcatgacgaagggtggaggaaattcccagcaacatatggcccaggccttgcagcagtgtggaggtccaacgaaggagctccctgagtactttcttttgggccaagtccttgaaagtcacaactcatagagtagagcccgtagaatgtggctttgacattcaggctgccaaagaggtctcgagggttttgcttgtacacgtcaaaggtgaatcgggcgatgtccttgctgtgcttgggcctctcccgtcccaggccatatgacagcactccactccttgtagggctccagctctgaccagactgcaacaccatcaggcacgtgtcatcctccagcagctggaagaagtcctcactgtccactgcagttccatcctcctctagcaccagggttagcactccattcagcagtagggtctccaatgctttggctagcagctcctggcgggtggcagctgtcaggcctttccggatggtccgcttgtgatcacagacacggaaaggtcgctggggtggtggagctgaggtccagaccctccgtccaaactccgagcttatattagatactgacctgagtacc

SEQ ID NO: 131917 - DNA, 834 bp, Homo Sapiens
  misc_feature (326)..(348): n is a, c, g, or t
ttttttttaccagtaaaatagttttatttgattttaaaatagtcatcaatgtgaaaatttctcaaagcttaagagtaacagtctagagccaaggttgggagtgggggccaggcctcacacagagcccagcttgaggcccctgagccccaccctcctttccagagggagggaggagacagctgagggggccctgaatcagtcctctccctcgtccccaaggccagctgtgccaggcccctggagggcaacagctcatgcggaggactggggggggaagcaaacaggtaggaaacggaaatgaggttaacaattacaccatcaccccnnnnnnnnnnnnnnnnnnnnnnncttgtgactatgaaaggatggaagatgaatactgataaactcctcagctccccagaaaagcccagtcggggctgggttgggctgattggaggaaaggtcttgagacccaactgcatgttacctctgaagaataaatattctaagaaaaagggaaaaccatgaggcaagctgctgcagtcagtcaacgcagctgacaggcctggcatggcccacaacctgaccccatccacacaggaaacagctgtgcgggtctggatagaggagaggtcaagggcttggactggggaccctgagctgccaaggtgtggggactccttgcagtcctggtgcagcaatggcaggaaggccagcaggggccctagttgagcaggttgccctgctcctgggcctgggtcaggctgtccttgcggtgcacggtggtgaacccccatcctcttggggctgcgcctcgtgccgaattcggcgcgccgtcgacttcatactcta

SEQ ID NO: 131918 - DNA, 1195 bp, Homo Sapiens
  misc_feature (643)..(652): n is a, c, g, or t
  misc_feature (760)..(803): n is a, c, g, or t
ctcctgtcaaaaccatgcctgagaggtcccggctgggagtgacagggtcttcttagattctattggtccttctctcattctccgaacttactcctttttatgggtaagtcaactaggtttacagtcccttatttttaatgcctaagttttgacagcaggaagaaaacaattttttaaaaattctcattacatagacgcacaagaatatgtcacataaagaaaatgtgtttagaatactggttttctatttacgcatgatattttcctaagtaaaattgccaagtggacttggaagtccagaaaggaaaataatttaaattaatgctggtgatcttaacaatattttgtaaaatgatgcttcccccttctccatggtctagtcaattttgtacaattaggtatctgactttacaagtttgttatcctttctaatttttactgaactgaaagcacaaagaagactacacagaaaatctggaaacagttgcaggtgttgggaggaagatgaaatcgagctgtcttttaacttttgtatgtgttttatcagaatttgctggactatgctggcaaggactttgtttacgatcaaattgtactagtgtctgcagggtttgtcagtactcgtcaaagccaagtccaattnnnnnnnnnngtctttgccctccaaaaaaaataacacccttcacctactcctaacccccggggcccaacctccaaacgcacgctcggcccgccgccggggagccatatataccagcannnnnnnnnnnnnnnnnnnnnnnnnnnnnnnnnnnnnnnnnnnnaccgccactcatgtcgactttcccccgccgccgcgccacacgcaacgacctacccccccgcccaccagagccgttccccgcccttgtggggggtggcggtcacctattctcgtgggccccccactcacaagaaaaaccgccttcttcttatatataacgacactattctccccccctgttgggggggtatacgcatgcgcaacctcccacacctctttgatacacatgacatagatagagagcccaaaaaccagtcggggggctcatcaacacagagcggcgccgttcaaactctcgagaagcagagaagaacacgtgcggggcgcgtcaccactcttatccgccaccagccgcgtgcttgtgtggcactatcctctcatcgcaccccacac

SEQ ID NO: 131919 - DNA, 1036 bp, Homo Sapiens
ggctcgcgggggtcccgcgagggtctcggtagccgcgcgcccagagacccccgccgcggcccgattctctgagcgccagacatgaaccgcaagaaactgcagaagctgacggacaccttaaccaaaaattgcaagcattttaataaatttgaagtgaactgtcttataaagcttttttatgacttggtgggaggagtagagaggcaaggtctggttgttggactggatcgtaatgcatttcgaaacatcctgcatgtgacatttggaatgacagatgacatgattatggacagagtattccgaggttttgataaagataatgatggctgtgtaaatgtattggagtggattcatggattatcactgtttcttcgaggatctttggaagaaaaaatgaaatattgctttgaagtgtttgatttgaatggtgacggattcatttcaaaggaggaaatgtttcacatgttgaagaacagccttctcaaacagccatctgaggaagaccctgatgaaggaattaaagatttggttgaaataacactgaagaaaatggatcatgaccatgatgggaagctgtcttttgcagactatgaactggctgtgagagaagagactcttctactggaggcctttgggccatgtcttcctgatccaaagagccagatggaatttgaagctcaagtattcaaagatccaaatgaattcaatgatatgtgaataactaaatgtctatattgtctcaagtgagtaaaaaaggaggcacaagtattcatagttgcttattttttctacttatttgtgaataactagatgtttaattgtgtgtttcagggtgaagatgaggttcacttacatatatcatttaacatcagtgtaagatgcaattaaaatagatggaagacaagaagtcccttattagatgatgggtttggcatgacagttaacttttctacagatgttttatcacatagactatctgtcgaagcacataactggcataaaacctttgggttcattaaatgaatagagagattac

SEQ ID NO: 131920 - DNA, 994 bp, Homo Sapiens
  misc_feature (684)..(684): n is a, c, g, or t
  misc_feature (746)..(746): n is a, c, g, or t
  misc_feature (952)..(952): n is a, c, g, or t
  misc_feature (958)..(958): n is a, c, g, or t
tttttttaataaagttgttgtttatttccacctgccagctccttcatggggcgaggggtcggaggctggagacccgggaggaaagcaagtcaagacaaatgcttgacccacggggactccaggcctggcctgcagccactctggtggacttggctttgggtctggggtcttagtgtcttaggcttgagggagaggggcagtgaagaggtgccctcagcctccccattaccccgcctctcctccacagaacccacatcctaggctggcctagccacaagcaagggggctcaggaggggcccacgcggatgtgagggttcatgagtgggtccaggttgggatcgctgtcagctgcggcccggcctaggcgagacatgagggcaaggagggccaggaagcccagcagtcccaagagtagcagcagccccgcccgctggagcagggtcagcggccgcttccgagacccagcccggctccttagcagccgggccagccaacccaaggccggccgacgtcggtacttgtcatcgtcacagtctccatggaggcctggtgtccggtcatcatcccgcgtatcatacaccttcctaggggcgtgagtcaagggctcaggattgcccatgtggatcactgtgtgctgctcgggccggcctggggaagctgggggccggggggcctggctgtanaaggctggggcagcagaggcgctgtctacctccctctggtccaggggtactgctggcattanactagacagtcagagaatcagacgtgttgagggctcgggtctgggctcacactcatcgatagagggaggccagtctgccgggccagttgatgtggcagctcttctcatgcggaggcacgggcagcaggtgttgggggaaatgggcatgcactgggcatgaaccggagtgctgttcgggtactggcaccgtcatgagcagccatganaatatncacaagcgtctccccgtgcaggtagtgcagcgattg

SEQ ID NO: 131921 - DNA, 772 bp, Homo Sapiens
ttttctgctgacttcttttagctaactttaatgtgggaaactcacttcctctctgtttagccttggaatcagtggtggatcctgaatatctgaaagcaacatgccggtctggctagctaatagtcacggccaccagcatacccgtaagcttgactggttctcgctgaaacctccagattggcagggcttaatttttaggaaagaggaactaggagctttaatttttaggaaagacagtgaggcctagaaaggaagaataacttgcctgaacttacacatgcaggtaaggaactttaacaggactagaatctgggctcctgagactcgggggactcactgtcctgctgcttgaggagggcctggaaaccagtcaccaagctggcccctgaggcaggcctgatccccccgaggtgccaaggcctcaccatagcagacaaggcggatacgtctctcggctggccaggggtatgttgcacaggcggcaattggggttgtagtcgctatcttggagccattgcaggtaggactggacgatgcacttggcgtgattggcataccaggcagtgctcgcagacgttgacccgatgttcgaagcagaacaggttggtcacctttctcttggggcacttacaaagccccatgatcgatccccagtctctgtgtttactgatcggccgctgcactggttccgaaggacggtagcgatggctcgaggcgcggaagggcagggaccactctccccagggctccagcgcctctcccgtcagccccg

SEQ ID NO: 131922 - DNA, 954 bp, Homo Sapiens
  misc_feature (904)..(904): n is a, c, g, or t
gggcggccggggctgaagggagaggcgcaggagccctggggagagtggtccctgcccttccgcgcctcgagccatcgctaccgcccttcggaaccagtgcagcggccgatcagtaaacacagagactggggatcgatcatggggctttgtaagtgccccaagagaaaggtgaccaacctgttctgcttcgaacatcgggtcaacgtctgcgagcactgcctggtagccaatcacgccaagtgcatcgtccagtcctacctgcaatggctccaagatagcgactacaaccccaattgccgcctgtgcaacatacccctggccagccgagagacgacccgccttgtctgctatgatctctttcactgggcctgcctcaatgaacgtgctgcccagctaccccgaaacacggcacctgccggctatcagtgccccagctgcaatggccccatcttccccccaaccaacctggctggccccgtggcctccgcactgagagagaagctggccacagtcaactgggcccgggcaggactgggcctccctctgatcgatgaggtggtgagcccagagcccgagcccctcaacacgtctgacttctctgactggtctagttttaatgccagcagtacccctggaccagaggaggtagacagcgcctctgctgccccagccttctacagccaggccccccggcccccagcttccccaggccggcccgagcagcacacagtgatccacatgggcaatcctgagcccttgactcacgcccctaggaaggtgtatgatacgcgggatgatgaccggacaccaggcctccatggagactgtgacgatgacaagtaccgacgtcggccggccttgggttggctggcccggctgctaaggagccgggctgggtctcggnagcgggcgctgaccctgctccagcgggcggggctgctgctactcttggga

SEQ ID NO: 131923 - DNA, 439 bp, Homo Sapiens
tttttcttttgtttaatcaataaatatttattgagcacatactgtgcaccagactctctcttggggacgggggatatatcagtgaacaaaataaatcaagtccttgcccttgtggggcttacattctagcgcggggcccctcatggatttggaggaagccaataccgccttgcccacccagtgccctgctcagtcgctcccctgaaggccccaccttggcgtgattggctaccaggcagtgctcgcagacgttgacccgatgttcgaagcagaacaggttggtcacctttctcttggggcacttacaaagccccatgatcgatccccagtctctgtgtttactgatcggccgctgcactggttccgaagggcggtagcgatggctcgaggcgcggaagggcagggaccactctccccagggctcctgcgcctctccctt

SEQ ID NO: 131924 - DNA, 686 bp, Homo Sapiens
  misc_feature (555)..(555): n is a, c, g, or t
ttttttcaaagctaaaaacaagatttttactatgaatcagtgcttctattatccttctgaaagaagttatattttaatgtgatgtaaaggcaacattgaaatttcttctttaaattaaccacctaatttatccctaaaattacaaagaatcagtcttttacaggtcaagtgcagtaaactaaaatgttctctcagcacaaagcagcactagaaaaagtaacagttatagatgggagttgactagttttgcagtggctgcgccatcaataacaaacagacatcagacggtatccatcccagagcacagacactactacagactagatgcgaagaatgcgtcacactcttggctgataaatgtcctttgtctttgactctttctagtttgaatgaagtggattttttaaaagtttaaatcaggtcacataagttggctgcttaaataacatcatgatgaggtatgaaaagctctgaatatcccttacattcagcaggatttaccagagatgtataatagcttgtcaggggcaacttccaaatagtttttacactttnggggttataatgaattctagaagaggacaagtctaaaaaggtttacaagggtatgctctgaaacagaggtgagcaaccttttccttcagaattcactttgaacagcacatcaacacaaaaatcttctctgg

SEQ ID NO: 131925 - DNA, 1832 bp, Homo Sapiens
  misc_feature (697)..(697): n is a, c, g, or t
  misc_feature (1718)..(1752): n is a, c, g, or t
  misc_feature (1777)..(1777): n is a, c, g, or t
ttgttttttgccaagtttatagtctaaattttattatctccaagtcacaatgctgatcacaaatgggcaccctttaaaacagtaacaaaaaacaccaccacacatggaaaaatccttgcaactaaacacagtggaccaacagagacaactctcacagtgtcttaaggtctgggaatctgggcatgctgcccacaggcttgaggagacatcttcaggtttaaggcaaagggaacagcctacaaaaggcacaaccaccagctacccctagaagaatctcttagttatttcctccttgggggttacagattaagtgcctctccccactctccatcccacacctgtgactcagagtgattaggccagctgctagatggaaggaataaaaacagtgacattaccggggagagacacagccaccatctttgccctcaggttctgtagaaggacagggacagtggccaggttacccctggcagacgtatgtactgcagtaataggaatctcttccacagaggcagcagagaagtggtttagtgccatggatagggaggaaagataggagcccttgcccagaaggtgactggcttccttaggccttaagcccaggagtttttatattctgtctgcaaggacaaaaatagaattcggggaaaataaggtagtaacatctaaaacactttgtagcaggaaagacgtnggagaagagcaattgcaaaggacagggtagactgcttgctggataatatttgcctttaaagagatgcattggtccacagcaactggaaaaggggtgtagcaagaagaatggaaagaagagaagcaaggccctctaattccacttacctcaaaagactgagccctgaggactatgtgaatacacacccctaaaggcaaaggctctcactccaccatccctttctcacaaaagcatctggtgtgccatctctccccacagtagggtattggccctcagcagagaacagaagcccatcatagtacaggtattgatggatgctcagactcctaaaaacctaagtcaaagagaagggctcctacccacctactctgagcttttctgcacaatgggaccctctgtgcagacagccatgcttccacagggttagagttaagggaatacaagtatacaagaggataacaaatgccaactaaaagtgaaaggccaggtctttttagacttggtggggaaggctggctgatacattctccattatctgggatgcacggaagagtcaaaagggaatccagaggggctagaaaaccagaagactagacttgtttcatttaaaggcagggagagagagcaagaaacagaaacaaagagaaaaaattaaaataatattaaggataagaagccaggctttaaaaatgaacatcttagaaaaccaaacaaacaggaaggagcttccttgggaacagaagacacttcaatttcccagaagtgaagaacagcagaagacatgggcttctgtatctagactcagaagcttggggctgtctggctctctctgctcccccgaacacagccaactcaagtgaagagtgaagatgggacgaggtccacttgtttctccctctctctagagcctgtcctcagaggaaggcaggggtcctcctctttcagctgtttgctggtaggagccacaccccccggccgtaatggccgaattcccgggcatatgtccggtaccgtcgactgnnnnnnnnnnnnnnnnnnnnnnnnnnnnnnnnnnncggccgcttcctcgctcactactcngctgcgctcgtcgttcggctgcgaccgacgctagcgccctatagtgatctataca

SEQ ID NO: 131926 - DNA, 1632 bp, Homo Sapiens
accatcttagaaaaccaaaacaacccaggaagggggcttccctgggaacagaagacacttcattttcccagaagtgaagaacagcagaagacatgggcttctgtatctagactcagaagctgggggctgtctggctctctctgctcccccgaacacagccaactcaagtgaagagtgaagatgggacgaggtccacttgtttctccctctctctagagcctgtcctcagaggaaggcaggggtcctcctctttcagctgtttgctggtaggagccacaccctatatctttgaagcccttctggtagtagatagccagctgtatttctcttctgagttctcacctctgctgctttttatatgatgttaagatttaaaatattcagaaacttgtattaactggaacccctgcttacaacctcaggtggagggggcttgatggtgactggctggggagtcctccggggtggggagggctttggctgcacctgctgctgggcggggtttaatagtaggtcacctcctgccatatacctgtgattggggcctgtgtaattaggatacagatgaggcggtggtgggggaggcagtgcccctggagcataagggtaactgggattaccaaagttcatgacgcctggagcagaaaagtaagtaggagcaagcaactgctgaggtggtggctgtcctggagacatggacactggtgggggatagaggcctggattgggcagaggagctggtgtctggtggggatgtaaacctgggtggggaaggttcattcctggctgcacaagcatgccctcgtggaggcagcggggcagggctgtcaccatgggtatagattggtccctggaactgcagtggatcatagtaatgtccctccatgatactgatatgcactggaaggggcgggggggctctggcacaggtctttgccgctgggatgaatagcgtttggctcgaccacctggacacccatttcttccatccggttaaactgaggtggagtcctgctcccatgtgtatatggttgggcatacctcgaagttcccgtggttgcaggaaagaaggctgccccggactccaattctgttctgctatatttagttgtgccacatcttgctcaagtccacttgtactagaatccaccggagcttcccaggtcccagtcttagtagtggagttggggtgtttctgggactggaggtgctggaatcagtccttcaggaggagggggcacctcctctgcaagcttgactgcatctccaactttggttcgagttcttcttgcccgggaataggatttcttctcaatgggcctatcagggggtggtggtgcagcatcaggagcagcagctggtggctctgaggctgcctcttccttctcaggactgccaagcactggagcatctgcttctggagatggatccctcacagaagtctgctctaggcgccgtgaccggtaactaatctcatgcttaacagtctcaccagaccggccaccatgctgcccaccagctctccacaggcctaaaaccagcaccgacgcgtgggcgacgcgtgggtcgacgatatcccgggaatccgaccgtaccagccgcttttttaagccggttatattcacattgcac

SEQ ID NO: 131927 - DNA, 1024 bp, Homo Sapiens
  misc_feature (854)..(888): n is a, c, g, or t
  misc_feature (988)..(988): n is a, c, g, or t
caagctacggaatgtttaaagtattacataaatttagaaaatattatctaaaggtatttcccattaaataaatctagaatatacttagttcaaatatttagaaggatttaattactgttactcaaaactactctgctgtgaatttgagtatcacaatataactttgctcagttattaagtggttgatagctgtccaccctctgcagaagtgtatctgaatatccaggggaataatacctcactatttcctcggggtaacaactgttaatactgttgatgtattcttgaaggagagaaccaggttctgcttttatctcttgaacttttttaaggccaccacttgttacaaaaagtcgtcgagctttgctatcatgcggcagcaccttactgaactgtccaaccacatgtttcagaatattgggaggagcatcatatagaaatggttcaagggctggtaagtaggtacatttttgcaggatattctttatggcttttttactttttacttggagatcctcagaactttctgttgacatgtacaaagaaagcagaactggcaaagtatttgtgactgcaacagcccgtgcgtgttcaggagtgtgtcttccaatctgtcctaaggcccaagcagctgcagccttaatatgatcttccggttcttctgacaagcagactgacaactggggtacacccttagaaatgatgactgccattgctaggttctcagaatgagctgctacataaccaagcatcatgatgccaggcagccgtgtgttccctttgcaggacccatgcagtcaatccccggccgtaatggccgaattcccgggcatatgtccggtaccgtcgactgnnnnnnnnnnnnnnnnnnnnnnnnnnnnnnnnnnncggccgcttcctcgctcactactcgctgcgctcgtcgtttcctcgggacaattatcaaaacaccccggcggggccaatttgccggcccccgccaagttangttggaatgctgcctaggttattcaagatttctcgt

SEQ ID NO: 131928 - DNA, 2225 bp, Homo Sapiens
  misc_feature (188)..(188): n is a, c, g, or t
  misc_feature (201)..(202): n is a, c, g, or t
  misc_feature (229)..(229): n is a, c, g, or t
  misc_feature (249)..(249): n is a, c, g, or t
  misc_feature (254)..(254): n is a, c, g, or t
  misc_feature (398)..(398): n is a, c, g, or t
  misc_feature (476)..(476): n is a, c, g, or t
  misc_feature (580)..(580): n is a, c, g, or t
  misc_feature (685)..(685): n is a, c, g, or t
  misc_feature (711)..(711): n is a, c, g, or t
ggccttccaacgacagagggacgaaggagggtgggaacgcaagattgttactcgtggcgggcgagcgaaatgaatcatacgagaggccccagactatgtatcctatctgatatgacagacgagcgcgtggtactcgtattatggggagacgagagactaacgagggatagtgtgctaaatgcgtagtnaggcggaacgagnncacacatatatagtcacaggtagagtnagtcgaaagaagagtgtctnctcgnccccgcgacacgcaccacatttcagtagagatatctgacgagacgcgtcgggtgaagacagccgcgcaacaacaagaagtgatgtaacacgagcgcgctctacggtcgacgtggacacccacacaacgctcgcgtgtgattcantggcgacacgcccgcgggcgcacgcgacaaatgtggatattgatgagtatagcgcggacagacaagcaacgccgcgcntatacacggggatggttgccacacgagatggagcgcgcggcgcgagcgcgagaatattatttaaaggaggtgtgtgtatagtggcagataacgacagcgtgttngtgtgtagagtgtagcacgcgtgtctcccaccagatgtgtggcgcgcggaacaaatgtgggtcttatatatacgtaggaaggctggccgagacacagcaacatcncgggtgctcgcgggtgagacatatgntggacaagacgacgcgcgcggaggggagcgcgtcatatacaatataagagatgataaacgtgagaagcgcgacgccgggcgctgtggagagaatgcctccgcgtggtgtaagatagaaagacacacgccgcagacagataaccaccctcctcgaagaggagcctccacccatttctgtgaggaagtgtgtggtgcgaagaaagcgcgcgttgtgagtttctcgcctcccgcggcggcccagtgtctgttgtatttggtgtggagagaaataccacagcccgggctttgttctgatgtgcgcgcgaggagtatcttcatggaggggaaacagaggatagtgggggcacagggttcgggtggacctcagggtgaggggcgccccgggcccccaaaacaagaaggtgttttagagaaaagcttttttagaagggccggggggcggcccgaaccctagagtaagcaatggggcggcggaggagcgggggataccgaggtaaaaggaaggaggagggtggtaatgcggagtaggagagacaccggcacgggggggagtaagcgcgggctgcagcgtggttcggtttaagttaagaaaaaagcctttaaaatgtttttaatacaaaaatactcatacacaattttccaaacacagctttccattttaaatgctattttcccccaactggcaagtctcaactctctatttcagtatatccctccccccaaaaagtgaatttcaagtttttaagtctaactatcaaacctggtgacagcacccagtattcctaaaaggaatctgaccttacattgtatgaagtttagacaccaataggcacatttaagtttgtatttaatttctgacggggcatttcacacctcaacagggtatggtgaggctgtgacaccccgtggacacagcattttactctactgactaacaaacagtcatcaactacactcataggatcaagatatttggcaactgacagtcatttgcattaacttgaattataaaacaggtttaattctggaaaataaggtagtcctggaagatgggcactgcacacgccggggtttagatgtcaagacagacaaacactgcgaaggggacccagccagccatggacgggtgtcgccggaagaaaggccggcctgaggacggacagctgggttctcacttcaggtgcctgaagagtttcccccacaggtgaccacattttaagctgcccattcggacacatccccctgtgggcgcacacgggtgggtatgggtttaggtgcagatgctggtttcggatgccatggacctcctgagggattggggcggtttttgtgttttgcttcacattagtgattggaggattgacgctgatgttcggagtcaccccgtgctctgaacgaaggcggggccggcggagccggcaaaccacgtcacgcctgggggcgtggtcagccccctgggaaaacttgagtcgggcggttcccaagccggcccactgatttccccggttgtcaca

SEQ ID NO: 131929 - DNA, 1255 bp, Homo Sapiens
tcatggtgaccctggtgccctactggatggtctacttccagatgcagtccacctatgtcctgcagggtcttcacctccacatcccaaacattttcccagccaacccggccaacatctctgtggccctgagagcccaggcagcagctacacgatcccggaagcctggctcctcctggccaatgttgtggtggtgctgattctggtccctctgaaggaccgcttgatcgaccctttactgctgcggtgcaagctgcttccctctgctctgcagaagatggcgctggggatgttctttggttttacctccgtcattgtggcaggagtcctggagatggagcgcttacactacatccaccacaacgagaccgtgtcccagcagattggggaggtcctgtacaacgcggcaccactgtccatctggtggcagatccctcagtacctgctcattgggatcagtgagatctttgccagcatcccaggcctggagtttgcctactcagaggccccgcgctccatgcagggcgccatcatgggcatcttcttctgcctgtcgggggtgggctcactgttgggctccagcctagtggcactgctgtccttgcccgggggctggctgcactgccccaaggactttgggaacatcaacaattgccggatggacctctacttcttcctgctggctggcattcaggccgtcacggctctcctatttgtctggatcgctggacgctatgagagggcgtcccagggcccagcctcccacagccgtttcagcagggacaggggctgaacaggccctattccagcccccttgcttcactctaccggacagacggcagcagtcccagctctggtttccttctcggtttattctgttagaatgaaatggttcccataaataaggggcatgagcccttcctcacgaccatggtccatgacaaggggcagggcagagggggcctggatgggagtccttgtgggggaccaggcaggggacttggatcaacaagcaccagacgagtggcgggggcaggcgagaggctcagtgggacctccaccctcgttgccccagctggtggctgaccaggtggctgtggagggtcaggagctgccccggatcctctccatgtagttgcgactacatcagggtccttcagccccatgtcctcacacacccagcggatgtcctcctcgcctgccacaaggatggactgcacagcaggggcccctacaggctcctcaggtgactgggctg

SEQ ID NO: 131930 - DNA, 772 bp, Homo Sapiens
caaggacagcagtgccactatgctggagcccaacagtgagcccaccccggacaggcagaagaagatgcccatgatggcgccctgcatggagcgcggggcctctgagtaggcaaactccaggcctgggatgctggcaaagatctcactgatcccaatgagcaggtactgagggatctgccaccagatggacagtggtgccgcgttgtacaggacctccccaatctgctgggacacggtctcgttgtggtggatgtagtgtaagcgctccatctccaggactccgtgtagctgctgccctgggctctcagggccacagagatgttggccgggttggctgggaaaatgtttgggatgtggaggtgaagaccctgcaggacataggtggactgcatctggaagtagaccatccagtagggcaccagggtcaccatgacgggcaagatcttcaccagcacctggaagttggcgatgtcctcttgcggggaagcccctggctggggagacctctcgtcggccagcacgcgggcacattgacggtctctggccgagtgtcgttgccacagctgggggcagcagttttggagagcgagcttaagcatagaggacacttggctgcccatcgggggcttggtgatgaagacgggggtggcaaagaggaagatgaaaaatgccaggcccacacagcccacagggatgctgtagcccagcaggaagctgatgttctgctgaataaacgccaccaccagcagcgacagcacagcacccaggttga

SEQ ID NO: 131931 - DNA, 1118 bp, Homo Sapiens
  misc_feature (1040)..(1074): n is a, c, g, or t
acacaaaatactttatcagcagctgttttcatcaaaaaatcaagtcagtttcacagttgaaaaagttacacattaaaatattttacaattcattatatattcaccaggttcccattttctaatgggcttttaatataaagcagaatagaagggaaaatctcaaagttgattactttgacactaagttttacataggacactaagaaccacaaaaagcttaggttctattgtaaaatagcaaccaaattccattcttcttttaaaaatccaattagaaacatcttttttaaaaaaacaaattccacaataagagtaacagatttcaaattaacagtagtctaaaaatcttcaaaataaatggttttgtatagctgagaatatggtagaaagtgaaagcataattttccaacagtcatttcttactacagtgtgtttaaaattatttttattacttttagactttttctcaaaataattattcaaggaaatatttcttaagtggcccaataaaactgtagagccaatagtcagttacaccatattcaaggacaaggatagtcagctatagataggaactgtctaaaccacgagaactgatctctgatactgaagtacccagaagtggctatattatcactgacttgaaacagatcttagtcacccatgtagcatttaattcaatgtttggttctttgcctcatttctttcttaggtcacaatctatagtctttatagaatttgtctacatttcttctaatagaattaatttggttgtagtaacttttgaaaataaatgtaaatggtgaaatcggccatgtggtttgtgcattttaatggtggagaggtcctgggagaaggaggggagacaactatctggactgatagataaaaatgcgaaagtggtataaattttgtgcaaggaggctcacagcatttttggcactcgggtaaaacacagttctctgttaaatcttcagtttctaccatgccccggccgtaatggccgaattcccgggcatatgtccggtaccgtcgactgnnnnnnnnnnnnnnnnnnnnnnnnnnnnnnnnnnncggccgcttcctcgctcaatgacctcgctgcgctcgtccgtttt

SEQ ID NO: 131932 - DNA, 999 bp, Homo Sapiens
ttttttgttagttgtttttgtttttaatttgtctccaataagcaatgtcttctgcccatccagcatgggaagtgggtcccacgtgaagggggcccaccacccactttgggagctgaaggcagagactcgggagccctcccggctcagactccccctacgctgggtgtgggttatattcagaggcccacacccacactggggtaggttaggtatggtttacttagccacaggcccccgggggcaggagacagagtgggggcccgaagctccctgtcctggaagagttaaaagttctggggtagccctggccccgtgggggcagttagagatgagggaggttactccttagcccaggagtggttagagacagtggggctggtagagatgcctgtttaagccttggcctctaggaggtgttagagatttgctggggttgggggccagggttgctgggaccccagttttggggagggagctgtaagagattgggggatgttctgagctccccagacaagaactgctggttaagagggggccaggcccggttggggctcagctgtccctgaggagctcggcatcccgcctgggagatgcagctgtcactggggtttctccctctctgttgtcctggcctcgtccttggcaggtggcggggacttcttgggggaagctgaagtgctggggttggggacccccgcccccgactgggcatctatgctggcgtgctccctccggacaaggtcctccagctccttcttccatccaaggagctcagcaagggccaggcagccctggtcgcattcacccagccaggccacgtccctgtaggccttcttggagtccaaagtccatgcctcctccgaggcccataatcatccccaggaaagggtccgactggccagctttctccttgttgatgagcaggcgaggggtggagaggggtgccttgctgatgagggaggcaaagggctgcacctgcaaggaggtacccatgaccag

SEQ ID NO: 131933 - DNA, 1101 bp, Homo Sapiens
  misc_feature (70)..(70): n is a, c, g, or t
acggaggccccatatcattccccaggaaaagggtccggactgcccagctttctccttgttgatgaccagncgaggggtgaagaggggtgccttgctgatgagggaggccaaagggcctgcacctgcaaggaggtacccatgaccaggaggaggtccaccttcaggaagtctgactgcatacaggagaagaaacgcgctgggaggctctcaccaataagacgatatcaggcttcaccaggctctgacagtcttcacacttgggcgtcacctcagagaagatcttctctttcatccagcttagcgggtattcgtgccggcagctggcgctgacgcagtgtgatgtgtagaaggtgccgtgcgcctccaccaagtcctcctgttccagcccggctattcgctccagggtatctatgttctgcgtgtagcagcgcaggagtagccccttgtccttcagcaggcgcatgaagtagtgacagatggttggcttgaactgcccaggatagagttccttggcgagggcgaagaagggttccggatgtttcttgaaatagctgatctcaaagatggcctctgggtagggaagatggtacttctctaggttgtcatagaggccggtggatggagagcgaaagtcggggatgcctgcggatgtggagattccagctcccaccaaacagatgactctgcgacagcgttcgctctgcatgtaccgggccaccccttccaaggtcagctcgtccagcagacgctccttctggctgcccaggctgagcgtctgggagaataagttccgcaggaagtccatgtctgcttctccaccagcggctcctccctcagagtctgaatctgagtcggtctggctctgccatgggcgcggtgctgaagcccttgaggctgtcaccgaccgctctgtcccgtcaccaaccactgtgtcccgtcaccgactgctctgtcctgtcaccgactgctctgtcccgtgacggcaccagaaatgggagtggccgtgatagggcacagaactacaactctcagcagacattgcggccgcagacgcgctttcgcctcgtgccgaattcaacacccagcctcgtacctagccta

SEQ ID NO: 131934 - DNA, 793 bp, Homo Sapiens
accgattcagctcaccagctcgacagtctcacactggcgtcacctcagagaagatcttctctttcatccagcttagcgggtattcgtgccggcagctggcgctgacgcagtgtgatgtgtagaaggtgccgtgcgcctccaccaagtcctcctgttccagcccggctattcgctccagggtatctatgttctgcgtgtagcagcgcaggagtagccccttgtccttcagcaggcgcatgaagtagtgacagatggttggcttgaactgcccaggatagagttccttggcgagggcgaagaagggttccggatgtttcttgaaatagctgatctcaaagatggcctctgggtagggaagatggtacttctctaggttgtcatagaggccggtggatggagagcgaaagtcggggatgcctgcggatgtggagattccagctcccaccaaacagatgactctgcgacagcgttcgctctgcatgtaccgggccaccccttccaaggtcagctcgtccagcagacgctccttctggctgcccaggctgagcgtctgggagaataagttccgcaggaagtccatgtctgcttctccaccagcggctcctccctcagagtctgaatctgagtcctgagcctcctgcaccttccctgcctgggtctccagagggtgagaggggtctggctctgccatgggcgcggtgctgaagcccttgaggctgtcaccgaccgctctgtcccgtcaccaaccactgtgtcccgtcaccgactgctctgtcctgtcacccctcgtgcc

SEQ ID NO: 131935 - DNA, 661 bp, Homo Sapiens
gatgataaacgactttactctaaaagcggctggaactcagtgacatgagcgtgcgctgaccccacatggggccccctgtgcaagcagagctggccggcccctccttgctggcagaggcacgggaggcctgctggggatgaggccactggccagggctatgctgcaccagaccaatggcaccgcccccacccctcccagcgcaggggcagcttggagcagaggcagcactggccaccgctgcgggggcaagtcagcgtcaagagagtccctgagtgagcaggcccagataagcccaggccccccaggccagcggacaggcacaggcagggcctacagaggtgccaaggccccaggccagttgtgctaggagcctggacctgctcttccacacccccatcccgcccctactgcacaggcttgtgccttggtgccccctggaggcagcagggaggaggcttctcaggcagaagtcttaagttgcatcccattccccagaatccccaggagggagaagagggatgggctgcccctccttcctgccagagccacagctcaagggcagtgggatggccctgcacccagcccaggtaccccttcctctgtgccgaccatgctgtcctttggctccgaggaggccctgagcactgcccacccccacacc

SEQ ID NO: 131936 - DNA, 690 bp, Homo Sapiens
  misc_feature (673)..(673): n is a, c, g, or t
gagcacagatggaacaggtaagttttatttggactttcaacttgttcagagagcacaggggcccctgcctcccctctccaggcccccttccccatttccactccctggggacgctcagggtacaatgacgtgtccttggccccttccccgcctgacataccccttcactcccctgctctatagaggggaggggtgcagggaggtggggcctggaagagttggataagagcgggacatgcgctgtcggtagcggccactgctccccacccagagctgagacctgggagaggcgcgcagtggagcagggtggattcattgtggggtggcaggctttcgccgtagaaggctccccacctcagccctggggaccccctggcctcctgcttacccgtccttctgagggtacaactctgaggtagatttcacagaggaaatgtaggtgggtgggtggagtgtgggaaggggttagctcttttgaagttgatctccacagcaccctgggcccgttctcaggttctggcctgggaggcaggggctgatgacacccacccagctaacagaggctgagtcacacaagggctccagggcacctgtggtgtcaggggctccagtggaagaagggttgagggggtacctgccttgacgatctgtgcctcagtgccaggggcaccangagggcatgggcctggg

SEQ ID NO: 131937 - DNA, 1140 bp, Homo Sapiens
  misc_feature (64)..(64): n is a, c, g, or t
  misc_feature (154)..(154): n is a, c, g, or t
attggtgttatcataaggggtattttaataactggcattctctaagtttctacacgtgttgggngatgcagtgccgtgccacatttcccgtctccagcaagcgcagtcagattggcgacatcgcaggcaagaggcagggctggggctcccaccncgagaagtaattgtctccaaagttggacttttgccactggttctgcgacttcatgcaatgccagggagagccccttgatttcccccaaatcctcatcagcctctttccacccaagcccagatgaacagtgtgagtaaaaaagagtgtggttgctgcgtgaacccagatctcagactagtcatccagccccattatgtaggactcagacacccctgtccacatctaacctccagccctaacgccacattagaaatgggggtcttactgctgctgtcactcctagtcaccctgttaaattctataccggtttacccaagtcgcccagagactgggccccacttacataagctgaagagaccagctgctttaatagcctcattacctaggatataggatcactgtccaacctcactccacagtgggcaagtttttacttcagaataacttttgaaataaatttccccggaacagctcgcccctctcaacaggactctgaggctccactacgttgctgttattcctgacagagtgatgaaaggaaatttaaacaagtggcattttgtaaaaccaccccagcctgtgtgactttcaatgcctgtccgatttggctgggaaaatattttagatccccagggctacatactgttttttataccctcctctttgtgtcagtgatggaaaaggtgtcaatctgctctgaatctctctgaacacctcaggaaataggcttttggctcgcagagaggggatgagaaatagttttgaaccaccaagtctcttggagggtgtcagcagccccttgaagtaaaagtgtggctgcaaacccagctctctgcattagccaggtgaacctgagcatgctgcatacaccctcagtcttggtttcttaatatgtaaaatgggaatgaatatgcgcacctcgtggggtggttgtgattaaaggcattcattataaagagcttagtttcatacaaagtgaaaaaaaa

SEQ ID NO: 131938 - DNA, 1750 bp, Homo Sapiens
  misc_feature (663)..(677): n is a, c, g, or t
  misc_feature (709)..(709): n is a, c, g, or t
  misc_feature (894)..(894): n is a, c, g, or t
tagtggcaatcaaatttattaactgtaaaggacatcaataagaacagacaggaccagaaattgtatcttggtgatccacatgccaggagtagcgcggcagaggatggagagtggaacttagcgattgaggcgcagcctgcagaaagctgcacttctgcactagagattaaataagagggtcaaaatcaacataaactaaaccctttttcaaagtcatgtaaacacaaatgattgctgcaactggaaaacaacattgaaaataaatgattcgtgtgatgcatatcgatttcaacaaacctttccttaaacctttaacgttactcttacaagcaaataccgttaatagcttacttctgtcttaatttttctaaccacaggaaaattgaaacataagtaatctgataaacatcaagttttacgttgatgcttttgaccacagggtatatacagtgttaagaatttaaattctatccatcagatatactttaggactccattttgaagatagcctcttctacagaaaagaaatttttaaaagtcaattctccagtttctcatcacatcttaatttttttaaaaaggcttttaaacactagtatcactccaagtctttagcctttgatacttgctctgaaaacacactatcgtatgtttgtgtatgtnnnnnnnnnnnnnnnacagtgacttacaagtggcaacgcctcttganaagtaaaatatgtcatcctccattctgcccttaaatgagaaataaagacaatagatttgcccactgcagactgggataccagaaaagacgttctaagtctcgccctgagacaatattaacctgctatcttaagtcccaactttggatgacttaaatttcagtgtacgtgcctccgttcccactcnttgccccatcagctccatcagcatcgtcatccccggctcggatcccggccgcgacccgccaggggcgccggagtccgcgaataccgcccgctcccagcaacgaagctccccggctcccggccgaccgcgagttcctggagcagcagcctccaaggttcccaaagcccacgattcaggcgagcggtgccgaccgggccgtggactgtggcattttaaaactacagaagtctcactgcacgactggcgcggccgaggtggcccaggagaccctccaagagattctggtcagctgccgggagcgtggaagagcaaccaaagccaccaaggcgccgcgccaagtccccggagcagtcacctcagctttccgttctccctctagttacaattactccacaggcttctggcgcttccttcgagaaaatgaaaaactaaaaacgcgtagaggtggtagaagtcgttggcattttccgtttaatgtgatcccccaggctccatcccttaagtggggtttccaaactcggatgcatcctcagcagaggttttccatgttgacagatctctcgcctcccacaaaatggggccggggaggcggccgcggtctcctctatgggcgccgccattttgtgaggcggcggcggcgcggcggcaggagcccggggtgtgtataatggttgaatagaatgaccccctccagggaatccccggcactgacggttacgtaaggggctgtgcgcaagtgcggcgtttagggaatccgcacagcccgggccacgcagctccgaggcccacatctccacttcccctaagaggaccgatgggggaagggacagctgaccgggtcttcctcgcagcagcc

SEQ ID NO: 131939 - DNA, 891 bp, Homo Sapiens
  misc_feature (199)..(213): n is a, c, g, or t
  misc_feature (540)..(554): n is a, c, g, or t
  misc_feature (840)..(840): n is a, c, g, or t
  misc_feature (878)..(878): n is a, c, g, or t
tcttcacttactccctctgttgttcttggctggatcctaacgctgatttccactctcgctgtcacaaacatttttccccccgtaaaatgtcttaatgctgtcctaccattattttaccaactgtgaaagctggctttaatttttaggaggaaaagaaaagcctgcatgtgttctttattggtatcatttaaaatatacnnnnnnnnnnnnnnnggtaaaggtaggcgtattttaagatattttcttaacttgagcagtagccaacaggaaggataccagtgtctctctctcttagcgacacactccttggtcttgcttaccaactggaggacactaggtagaataaccgagtatgacaattcttaattgtttacattttataacttcctgtccttcaaaagagtttgaaatgtcattttgggaaaagagagccagtcaagctagtaggctgattgtgaagaaaatctaataccttatctttatctcaaacctctgtacaactttattttcattgatgggatactttaacaaaaatgaaannnnnnnnnnnnnnnaaaatatgagtgattatgacctctttggggatcatgcttcaaaaagtcagaaacctagagacaaaactgtcattgatttttaagaagaaacacactaggtcaaaagaagatgtcctggaaatacgaagtactctttaaaaaccatgcatttggagaaagtaattgtttccttgaaaaacatgattaaaaactaaaactgggatgttcctgtgtgtacacagtgccaaatggttttccctttttatgttgtgttttagaaacagcacgaaagttttttccattttanagtgagaaaacattatatttagacttccataattccanaatcacctcgtgc

SEQ ID NO: 131940 - DNA, 791 bp, Homo Sapiens
  misc_feature (286)..(299): n is a, c, g, or t
tttttaggttagtccctttaataaatggaattataaacttgtcccataaatacctccacctcaaaataattgctgcacaagcagcgtgttacctcagtggttagtaaagtcctgtggtcctaataaaactatccttggggaacctcggagtaaactgatttgcagataagatacaatgctaatggttgcaatctgattgccttaggagaaaactgaagtcattctccagcaaacatctcccaaggccagctgaaccctcttgatctttagggaattcagatctttnnnnnnnnnnnnnncagtagcatcaggctgtgggcctctgcttggccaacttccgaccacacaaaaagtttttctatggaccttgtaaatcatcaacccctccttggtcttttccagttctcagactcactagaatcagaaacacctctatccaaaaatctacaaccctggacacaaagaagccgagctggaggggttgggggacgacgagagaaccctgtgttaggtaaaagctggaactcatctcttttccgagccacctggtcctcagtttcccgtattatgaatgttacaaagatgagctggctcttagtcctggccgaggacaccacctgtcctggcaactacgggtgccatttccttgccgcttccgaaagcccaagttatctttaagggatgtcagctttgcaaaacccgcttcagtagaaacaagagttagcacaaccattaactgcttgaacaccctcgttggacttgttcctcgtgccgaattcgccacccaggcc

SEQ ID NO: 131941 - DNA, 722 bp, Homo Sapiens
  misc_feature (547)..(547): n is a, c, g, or t
  misc_feature (631)..(631): n is a, c, g, or t
  misc_feature (693)..(693): n is a, c, g, or t
tttcctgctgtactaatgtattccatctttcaaaaagaaagacatgattttaatattacttaacaatatgttaaaaaagtagccaggcaggcctccgtgttaatacagtcgtacactctataacagacttgatggtgtgagtactgggtgggcttgtttttaactttctcgttctgcaagggatcttacacaagctggctacaagtcagggggatcaaacacaaacagcgcaacgtgtacactcggagacagtagattgtggagaacaaaggaggcctgccccgcccagcccgcctagggtgagacgcaggggcacaggagagctgagtgacggccgataccccggtgaggacacatgacaggacagggcgcaatgcagaggcaacggagccacgtggatgatgcaaactcctatctggccacggcccaggcctccgaggccgcggtggtgggaggacttggcgggaactactgttccaatccgacagcacagagctacaatcgaaggagtctcacgcacagactacacgcacacgagctaacggcngtgggccgagcatcaactttctcggtctggggtttcaaggcagcaccagctccgcacaagcccttggcaagcaccacggctctnggggcgccagcgaggggcgtggctcttggggtggtgcagcctggcctgcctctcgcgtgtcnctctccagggagtcctcattcagtgggca

SEQ ID NO: 131942 - DNA, 1254 bp, Homo Sapiens
tttgtttcctcttttggagtctttatttgttttttgtgggaaacctctgggacctgccctggagagcctggcaactgcagggcactgtggggcgggaggtgcctcagcacgtggggccaggggctggctgcaccgcgctgcacagatgaggtcggcggtgaccaggcagaggtgacaccagggacggtctccttgagctgcaacaactggcccgaggctggggaccccacatggtgatttcatcccaaacagttcttgattctacgtgacctgatttggggggttcaggtttaagggaggccaggtcttggacgggcccccgtggttctcggtgtgaaggggacgtctgctgctccccaccagacccgcagtcccagtctgccgggtcatgaggggtggaagtgcctgatgagcgccttcttgtcaatcttgcccatctggttccgcgggatctcctccaccagcaccagctccgagggcaccgcgtacggggccaggacatttctggcccactctttgagctccctgtggggacagtgagtgtccttctcggagggtcaccacagcagtgacccgctggccccatgtcatatccggaactccaatcacagccacatctgtgatgctgggggtgggccagcaggtgccactccacctccagggcgctgacctttgtagcctccagtcttgatgatgtccactgaggtccggcctcggatccagtactggccatccttaaacaccacggtgtcccctgtcttaaaccagccatctagggtgaatgcactcttagtttcttctggtttattccagtattctcgaaacacggagggtcccctcaccagcagctccccctccttttcttcaaaccctggggtcaccttggtccccctctcgtctccctctgcgtggatggtgtaggagcaggcttccctctgtgggttttctgagacaatgcgcacctgtactccaggcagtggggtccccacggaacctggcaggcgcatggcagtggtcaggggcccggacagagccatgccgatctcggtcatgccataccgctccagcagggtgtggcccgtgatgttcttccacttctccagtactgggaggggcagggcagctgagcctgagaccatcagcctaatttttttcttcataaactgcacgcaagaaatcctgggcgtgcggctgggtaaaatgcctgtcgtagtactccatcagcttggtgtatattgtaggcactgccataaa

SEQ ID NO: 131943 - DNA, 745 bp, Homo Sapiens
  misc_feature (731)..(731): n is a, c, g, or t
tggggaagaatgtgtcattttctgaatcccttctccactgacccactttccatccctccacacaacttcagtaggttgatggcttctactggtccaggccccttgaccccagctagggcctcagggactttcgggccttttccaaaatttcctccctgatcttggggtagtcggggtgctccctgaggacatcgttgcagatttcgatggcctccacaaatttcttgtccttcaggtagttgaaagcaagtttgaagccaatggcagggttggcgtgatgactgtacttccaggccagtttgtagttggtgactgcatccttgtaggactgctccttctccatgatgaagcccatgtactcataggccttgtagcaggacttgttgtattgcacacagcgccgcagcagttctaaggcgaggtcgaacttgctgccctggcagtaaatgtcagccagcaggagccagctcttctccaggtcctcagcctcactcagcacccagggggtcttggccaggcgcttcaactgcatacgcgccttggggatctgcttcaggaacacgtaggcttgtgccaaggccagcagggcagggacgctgtccttctcagcctgcgctatctggatgaagctgtccagcgcagcctccatgttagccttctccctggtggccagccggcagaggccctgcagcagccgcagctgggtctggctggagtctgaatgtgggtanactcacgcagcatt

SEQ ID NO: 131944 - DNA, 1153 bp, Homo Sapiens
aagaattttagaagtttaatgagaaattaaaataaaaaaagtccattttctttaatgttgtacaaaaaagtatgagcagaaccgaaagtaaataaacattatcacatttgtttacaccactatctagttcttcatattaattttactattcaaacaattgaaaggtggcaatttagggatcgcaaaagagataaaaccaaaaaaacttttctaccacatttattctacactgtatatagctgtgctcacagagacaagcggcttcttttacttctccactgcgcaggaattcagttgtaaataaaattgaacctgctcaacagctgagggagactagaaatgatgggtccatatcctggtgcattgtcatacaattcaaacaatggtgcagctaccagcttgtaatttttagggactgcaaacaaggctttttcttgaagctgaaccagaaacaacttcttatgttccttaggctttgtaatatgtgcaggaatatatggatactgaggaggttcaaaatttggtctccaccagttaccaatgcaatcgtcaatgacccagtcttgcaaaactccatcctgacgacccagtatctctgtcattaagcgttttagtccttcaacttcatcttctcctgggttaagttcaccaccaggtagtttgaagaaagttgttcccagctgcagcagtaacacatggggtagccggtgctcatgtacaatcagaaccccttctacagtcctcctcattccaattttatcaaattcttccctcatgcgctgaaatctggctgcaacagagctgtccttctcgtagaggggctcttttgtaccaaaagtataattggtaagagggtacaggttgatggtgcgctccagggtgaggggcttcgtctgctggatgtacttgttgccgaactgagtgaccccccggggccagccggtctgcgagcgattgggcggtaccacagacatgctggcgagctccggcgctgacggcgagcagaaagtggcaggcagggtagactttccccgtgcgggaagcggttatctgcaatcccctcagcggctactgcccgccattaacaggacagcgcaagaggccccggccgtaatggccgaattcccgggcatatgtccggtaccgtcgactg

SEQ ID NO: 131945 - DNA, 678 bp, Homo Sapiens
aaaataaaaattcacattttttgataaataaactacagttttcccagaaattactatctaaatgtgtattagcagtattttttaaggtgaaattgccttggtatctaatgaatgtgtagacagggagataaaatgaaggattgccagactagttagaatagaatttaggattaggttagttttgaaaaatgatgttgtaatatatgggttctaacacatcctaccataaaaactggaggagatatgtgtaacctggttaatttgggatggtggacattttgggctaatactgacaaaatacatcttaggactagtatacatgtgacacggattgctaggaggaatgaaaaactaaactgtatagtttatattccgtaaaccattttataatgttcaaagattaggttttgttattgatagtattaaatacacagtttctcttaacagtgatgggtgaaaacattttaccggattatggaatgtttaccagaacatgttttgattcttgaatgtacataataatgccatctaacttatttacgttcttgtttacatgtgggagcttttgttttcaaaaattattttgttaaaaaatctcaataaagatttattattgttgttcttttcttaccttttttgctctttttggttcctgctaaaattaaaaattttatgcat

SEQ ID NO: 131946 - DNA, 771 bp, Homo Sapiens
  misc_feature (632)..(632): n is a, c, g, or t
caatcagaataacaaggtgattctttccaaaggtatctattaacatttacaaattagacatttcctacaacccgtgcaagcaagctaaaccaaacgatggaatccaactgaatgttcttggcagatggaggctctgaggactcacactgaggatgatggagaggacattacaatccagtccctttttggtaggttttgattgttttgtttggctgaagtcagaacccatgatcttaaggaattttgaatggctctaattgagcgtggatttggtcatgagacaattatcctgataaaacaattttttaaggcactctgtttgagggtttgggaaaaaagaaatggaattatccagattgtttatctgcatcacccaaactcactattgatcattctcttggcattgcttatggagccaatgtcttcccaaggtcatacctatgctcaggtgcctatgcaatacttgctttttttctttatcttctggtagaatttattcttttttgtactgttcatattcatcccaggaaaatttggaggaacagctgctctccactggcctgctcctgcaagaatgccctggagcttctgaagaaggatctatatttaccttatagggccttaagtcctgngatggaactatatactttgggaaccaactttcttcacaagaagaactgggcatgttgcaagcttcctcatttctcttgctctctggctttttgtccaagctcagaaacatacctcagactggctgcattcaaaggagtt

SEQ ID NO: 131947 - DNA, 715 bp, Homo Sapiens
  misc_feature (643)..(643): n is a, c, g, or t
ttttatagcagacaaaagggatttccctcctttattaagttcttattttaggacataccaattcgtattcctcgtaagaggcatagcattaaaaaaacaaagatgagtttccaggctcccatttccaaaattcttatcagtctccctagatgattatagcaaaggaaaaagtaacatgtacaatacgtcatcacatttcccaattgagttcttttccaaatggtaattttataaattaaagtaactaagtaaatccatgatcagcaaacagttgctaggtgatgaagaatttaaacaaagcatgtaaataatttggcaactcaaccatgtaactcaaacctagtaacaggtaaaaaactaaatattctaagttataatgtgggagtatatgtatacttatgtatatgtgtatacacacattatacatgcatgggttgttttggggttttttttgtcatctctgccaagatcagccaagaggaagaacggtaattcgtttaaaagttaggaactgggcatacctttaaaatttcaacagcatatttcctttatattgtattacagtaactgctctataaaactgttggctgaagcctaggtaagaataaagtctatttcgagaacagcatttatcactgcccanaaacagtaaggaaaatgttgcagattacaaaagatatttagcttggactacagctgataaactttgaaaatg

SEQ ID NO: 131948 - DNA, 851 bp, Homo Sapiens
  misc_feature (798)..(798): n is a, c, g, or t
gtgggaggcgcggcgtggggtggggtggggccaggtccgcgatgtgctcaccctggtctctcaggaccgttgcctttgcggctattttttgtgcaatccccgaagcctgcgtttcctgctgcctgggttcggggcgggggcatcgcgcaggccagaacggcccctgcgtccgtaggccagagcccctgccatcagcccctttagggtgctcgccggctgtcgggtgtgggggtatgccaggccccggaggactcggcttccccgctaacccgacccgccgcaccccacccaggccaggtcagagcagcccaccatgggatggggagggggtggaggctgcaccccgcgcccacccatccaccagcagccgccggagcgccgcgtggtcaccgttgtctttctcggcctcctgctggacctcctggccttcacgctgctgctgcccctgctgcccgggctgttggagagccacggccgtgcccacgaccccctctatggctcctggcagggcggggtggactggtttgccaccgccatcgggatgccagtggagaagaggtacaacagtgtcctgttcggaggtctcattggctcggcattctctgtcctgcagtttctgtgtgcgccactcactggggccacctctgactgcttggggaggcgcccggtgatgctgctgtgcctgatgggtgtggccacctcatatgcagtctgggccacctctcggagctttgcggccttcctggcctccaggctgattgggggcatcagcaaagggaacgtcagcctctccacggncatcgttgctgacctgggctcgcctctggcccgcagtcaaggcatggcggtca

SEQ ID NO: 131949 - DNA, 1019 bp, Homo Sapiens
  misc_feature (623)..(623): n is a, c, g, or t
  misc_feature (688)..(688): n is a, c, g, or t
  misc_feature (744)..(744): n is a, c, g, or t
  misc_feature (758)..(758): n is a, c, g, or t
  misc_feature (796)..(796): n is a, c, g, or t
  misc_feature (799)..(799): n is a, c, g, or t
  misc_feature (805)..(805): n is a, c, g, or t
  misc_feature (809)..(809): n is a, c, g, or t
  misc_feature (811)..(811): n is a, c, g, or t
  misc_feature (817)..(817): n is a, c, g, or t
  misc_feature (879)..(879): n is a, c, g, or t
  misc_feature (887)..(887): n is a, c, g, or t
  misc_feature (901)..(901): n is a, c, g, or t
  misc_feature (905)..(905): n is a, c, g, or t
  misc_feature (911)..(911): n is a, c, g, or t
aaaacaaacaggtgctttatttcatcatcagaaacctggtgcatagtttaaaaaacaaacagaagccctgacagccttggagtgctgcagctcggagtcactgaaggagtaagtaagtctggaggagctgcctgagcttcctgcttaggggccggcccccacccacagggtctccctggactggcggggggtgggggtcaggcagtgggcaggggcctgacctaggctcccactctgcctggtgcccacagcctgggcacagtggctcagctactcagccttgagcgtctgtgccgggtaactcagcttctgcaggaggaagaaggggagcaaaaagagcccggaccacgtggtgaagcaggcctgggccccggccagccagtacactgcggagagacggtggcgtcacccagtccccgagggggctggcacttgggaggcgagggcaggtgcttggcccccagcctgccccagcaccatcccgcgccctcacctgaagcggccaccaggggccccgcgggcctggccagagcacctaggctgcgcagtgtacccatgaccgtgcccttctgccctggtgagcctgtgggaagaggcacagtcaggcaccactgcccttctcncgctcaggtggcttcggccgagggaagggggctcaccatagccagcgaccacggaggacaggcanggcacacaacggcggcggctggtgggagacatcgaggaggtgcccgtcagcccagnggagggtgcatcanccagcccctgctgcccatcggatccccctgcaaggcanggncactcnacanangagtanagcaacagccccaggccagcacgggcagagaacgtccccagccgatgaggaggaaggcgggncacagcancaagagggctgcangtgngcacgnagctcagacagccgtgcctgcagactcaggggactgctgcaccgcttggaggaagccctacggctcacggagaactcccgcagggtgatcgcgggcaagcactggatg

SEQ ID NO: 131950 - DNA, 1739 bp, Homo Sapiens
ttttttaaaacaaacaggtgctttatttcatcatcagaaacctggtgcatagtttaaaaaacaaacagaagccctgacagccttggagtgctgcagctcggagtcactgaaggagtaagtaagtctggaggagctgcctgagcttcctgcttaggggccggccccacccacagggtctccctggactggcggggggtgggggtcaggcagtgggcaggggcctgacctaggctcccactctgcctggtgcccacagcctgggcacagtggctcagctactcagccttgagcgtctgtgccgggtaactcagcttctgcaggaggaagaaggggagcaaaaagagcccggaccacgtggtgaagcaggcctgggccccggccagccagtacactgaagcggccaccaggggccccgcggccctggccagagcacctaggctgcgcagtgtacccatgaccgtgcccttctgccctggtgagccatagccagcgaccacggaggacaggcagggcaccacaacggcggcggcaaaggagtagagcagcagccccaggcccagcacgggcagagaacgtccccagccgatgaggaggaaggcgggcaccagcagcaggagggcccgcttcacggcagcaacttccccgccagggtggatccgccgggcataggcaccctggatggtggccatggtgaggccgatgaggaaaaacatcttcccctgctgtaggctactgaactggaagcgctggtgtgtgaggaagctcagcgtgtactccaggcccgagaacaggaagaggtagaggaagtagactaggcccaggcggcgcaggctgctgagcctgtctccagagggtgggtcctggccacgagcgacagccgagaagcgcagcagggccagggggctgagcagatcagccgcatcacggaaccccagggcgatagagggcgcccgttttctccaggggcagcgtctctggcaggaagcagaagatgaacagcaggtcggaggctgcgaagagcagggcaaaccagggtgccatttccaggggcagggaggctccgagcatagggcccagggtgaagcccagtgagaaggccaccccaatgaccgccatgccttgactgcgggccagaggcgagcccaggtcagcaacgatggccgtggagaggctgacgttccctttgctgatgcccccaatcagcctggaggccaggaaggccgcaaagctccgagaggtggcccagactgcatatgaggtggccacacccatcaggcacagcagcatcaccgggcgcctccccaagcagtcagaggtggccccagtgagtggcgcacacagaaactgcaggacagagaatgccgagccaatgagacctccgaacaggacactgttgtacctcttctccactggcatcccgatggcggtggcaaaccagtccaccccgccctgccaggagccatagagggggtcgtgggcacggccgtggctctccaacagcccgggcagcaggggcagcagcagcgtgaaggccaggaggtccagcaggaggccgagaaagacaacggtgaccacgcggcgctccggcggctgctggtggatgggtgggcgcggggtgcagcctccaccccctccccatcccatggtgggctgctctgacctggcctgccgcggctgcgcgctcgggacggacggtcgcacagacgcggaacagggcaccaggcacgccgccaggggcg

SEQ ID NO: 131951 - DNA, 1043 bp, Homo Sapiens
tttgtatggatgtctggatcagtacaaggagtcctatctgatttgtaacgctggtttttgactgtatcttcaggttttagttcatgtcctcgattacaggtaagtggttagaggtaattagatttaggcccagtgcgtgagtaagttgtctgagccctgtcttccagatgggtgtgtccttgcccaaggagcgtccagctcgagtagcgccagcaggcacaggggccttgaaccagactcagccggaatcacggaaccccagggccgatagagggcgcccgtttctccaggggcagcgtctctggcaggaagcagaagatgaacagcaggtcggaggctgcgaagagcagggcttaccagggtgccatttcacaggggcagggaggctccgagcatagggcccagggtgaaagcccagtgagaaggccaccccaatgaccgccatgccttgactgcgggccagaggcgagcccaggtcagcaacgatggccgtggagaggctgacgtgtccctttgctgatgcccccaatcagcctggaggccacggaaggccagcaaatgctccgaagaaggtggccccagacctgcaataattgaggttggccacaacccaatcttgcccaaggggcaaggggccaaagaggcaggggcggtcgcaggcacagcagcatcaccgggcgcctccccaagcagtcagaggtggcccacagtgagtggcgcacacagaaactgcaggacagagaatgccgagccaatgagaccatccgaacaggacactgttgtacctcttctccactggcatcccagatggcggtggcaaaccaagtccaccccagccctgccaggagccatagagggggtcgtgggcacaggccgtggcatctcacaacagcaccgggcagcaggggcagcagcagcgtgaaggccaggaggtccagcaggaggcacgagaaagacaacggtgaccacgcggcgctccggcggctgctggtggatgggtgggcgcggggtgcagcctccaccccctccccatcccatggtgg

SEQ ID NO: 131952 - DNA, 882 bp, Homo Sapiens
caggggtatgttgcattcttcagcagcagagatatcattgtgagcaggatcgtgctcgtcagtgcatgcatgtgtgtgcacagctccattttcatcaatgcgatgtggcacatctctgtgtgacacagcaatgcagtgcatctttcgccagccatcttctcctgcagacggctgcctgggtactgcatcaaagcccccctcaggggcatctcggttccgggacaccctctgtttccgaacttcctcattgaagctgtccactctgtctgtgagaggcagcagatggcggaacccaaaggaggggacgcaatttggaaacaacttgtaaccaatgcacggattggtctggtacctcggtgccgtgtaggagaaaggagagatgtccttatcaacaaaagacccaaatcccaaccggaagttgctggtgagcttcctcatctcctccgcgagtttggtgcccaggctccggatattgtccaagtcatccttcatggacagggagaggtccatcaggtagtacaggtccacaggatagtcctccacctggcgaacctgtagctggaaggtggtcttgtcaccgggccggaggttcacggcaatctcctgtggtgtcatctgaatgacgtcccagcctgcagagcccgaacccttgctgctgaggggcaggctcctcaggacatggaagctgctggctgggctctctatctcacctccacagccatttttgacaaggtttgccctcagatcacaccgagaggtgatggaccgtgggcttccgaagtcctctttggagcaccaggcacattttgggtggattagcagacattcttcacatgagcctcgtgccgaattcggcgcgccgtcgacttcatactctctccc

SEQ ID NO: 131953 - DNA, 1103 bp, Homo Sapiens
  misc_feature (35)..(35): n is a, c, g, or t
  misc_feature (40)..(40): n is a, c, g, or t
ctaggtcgatcccgcgagcaaatgtcgtttgtganagtancctcaagaatcaaaatcggtcccatttcgactcacattctctgacagatagatacccatctggcagtagcagtaagaagagattagatcctcaggtgatcccgactgacactccacttagaccggatactatttatgcattaataatcagttgaataatatttttggagtctccatctaaaatctccaccgttgttccaggtatcagggctgtaaaattcttgtacagcatataatggttttttgtcactgcaaagatgaggttgatgttgttctctgccaatttctctccaagcaaggcaagggatggatagtccatctggttggatgcagtgtactcgttggcctcgttcaggtggcactggccatcgtgtggctgcaccaggcctcccaattttccatccaatgcgatgtggggcacatcatctgttgtgaacaccagcaaatgcagtgcatcctttcgccagccaatcttctccttgcagacggctgcctggagtactgcatcaaagcccccctcaggggcatctcggttccgggacaccctctgtttccgaacttcctcattgaagctgtccactctgtctgtgagaggcagcagatggcggaacccaaaggaggggacgcaatttggaaacaacttgtaaccaatgcacggattggtctggtacctcggtgccgtgtaggagaaaggagagatgtccttatcaacaaaagacccaaatcccaaccggaagttgctggtgagcttcctcatctcctccgcgagtttggtgcccaggctccggatattgtccaagtcatccttcatggacagggagaggtccatcaggtagtacaggtccacaggatagtcctccacctggcgaacctgtagctggaaggtggtcttgtcaccgggccggaggttcacggcaatctcctgtggtgtcatctgaatgacgtcccagcctgcagagcccgaacccttgctgctgaggggcaggctcctcaggacatggaagctgctggctgggctctctatccctcgtgccgaattcggcgcgccgtcgacttcatactct

SEQ ID NO: 131954 - DNA, 846 bp, Homo Sapiens
  misc_feature (189)..(189): n is a, c, g, or t
ccgattggctaacggaaattggtcataatccctgtcagtcagcgaaatcttcgcttatgtttgcatgcagagagtgagtgttctgcatctctcagcagcaggatgatatcatctgtgatgcaggtactcgtgctcgtcaggtgcactggcatcggtgctgcacagcctccaatttccatccaatgcgangtgggcacatcatctgttggaacaccagcaaatgcagtgcatcctttcgccagccaatcttctccttgcagacggctgcctggagtactgcatcaaagcccccctcaggggcatctcggttccgggacaccctctgtttccgaacttcctcattgaagctgtccactctgtctgtgagaggcagcagatggcggaacccaaaggaggggacgcaatttggaaacaacttgtaaccaatgcacggattggtctggtacctcggtgccgtgtaggagaaaggagagatgtccttatcaacaaaagacccaaatcccaaccggaagttgctggtgagcttcctcatctcctccgcgagtttggtgcccaggctccggatattgtccaagtcatccttcatggacagggagaggtccatcaggtagtacaggtccacaggatagtcctccacctggcgaacctgtagctggaaggtggtcttgtcaccgggccggaggttcacggcaatctcctgtggtgtcatctgaatgacgtcccagcctgcagagcccgaacccttgctgctgaggggcaggctcctcaggacatggaagctgctggctgggctctctatctcctcgtgccgaattcggcgcgccgtcgacttcatactctctccca

SEQ ID NO: 131955 - DNA, 346 bp, Homo Sapiens
  misc_feature (210)..(210): n is a, c, g, or t
gacaaccaccaaattcttttggttttaatctttacttccaatcccaaacaatcttgtttcttttcattataaaagtactaaacaaacacggacaggagaggaaactgacatttgcaaacgatgtaccttcaacaggcatctcaacagccccatcaccaacacctgtgtgcaaggcatagccatcacgcacgcaaagtctcagggactcangaactacaccataaatgcaggatctttttatttcatataaaaatgatcaatgtgaaaaaagccaaactgtatgctggttttacagactccgacccttctgtcgtcttctcgcagccgtatagtagtaggcggccgc

SEQ ID NO: 131956 - DNA, 2705 bp, Homo Sapiens
ttttttatcagacaaacacaaattcttttggttttaatctttacttccaatcccaaacaatcttgtttcttttcattataaaagtactaaacaaacacggacaggagaggaaactgacatttgcaaacgatgtaccttcaacaggcatctcaacagccccatcaccaacacctgtgtgcaaggcatagccatcacgcagaaaagtctcaggactcagaactacaccataaatgcaggatctttttatttcatataaaaatgatcaatgtgaaaaaagccaaactgtatgctggttttacagactccgacccttcctgacagtcttcttgtctggccaggctgggggcccagcattcctggaagggagagacagcccagcatctcagtatttcattgggacaacaagctggatgtggcagggaaagctgagagcgccaaggtccccttgctttatcccaagctcggagggacgcagcctggcatggctctggcctagcagccaggtgacatggccaggcaccttcctgtacaggcactgtgggctcctggcccaggctcactagaaggtcttctctgtggtgcctacctagggagctgtgatcaagccgagcagccgtgcaaggcgtttcagtctgaccttttcatcagatccccgctccagcccctcggagaaggaaacatcagtccacagtgccattgtaggatttgttgaacttgttgaaggtgaagtccacagtgtgcgtggagataggctttctgtataatggatttgaagccatttcatagcgggccctggatcgctcgctctgaaactttgcaaactccctccggtcgtggatggtgacaagcagcttccagatagccaggagtgcaagcccaacaaggaggatgctaccgaccacagccaggaggatggtcatggcgttgggggtgtttccacactctggctccctgaggacggtcaggttggacttcccactggggagctccacataggtgaacatcatgacgcagtccttggcggttttgtagaaacatagcacagcctcctggtcatctttcacgatggtgtccacccatgtgatcacctcatccctgcataggctgtggcaggtctggttgtcaggtttcccagagtggagcagcaggcactcgacgcaatctctcttggtgctgcatgcatccgggcaggtggggcacttctcacacatctccccaaaggcccccggctccgtgcattggcactgcccacagagacagtgcccacgctcgctgcagatctggccatctctgccccggcatgtgctgatgtctgtcgagcagttacagttgtccccgatgtaacctgcatggcacttgcattccccgcagtgacactcgccatggcctgagcagaggactcccttgttcctggcacaggagaagttgtcgcactcacagaaaggcccatagatcttgccaaactcgctctcgaagcaggagcactggttgcagctgcagtccccacgcccgctgcacagtggcttgccctctgcctcccggcacaggttctggtacacgctctggttctccccatcctggcactcgcacctggtgcccaggtagccggggctgcactcacacaggccgcagacataggtcccgctcccgttgcacctggcgctgttgggttccagccccacgctgcagccgcacgtgcagttgtaggtgacccccacctccaggctgtcccggaatcccaccggccgcagggcaaacacatgctccgtgtgtctgctgggacagcttcgggcctccaatgatacttcaaaagatgccgtgtccccaatcttcagaccctcacacttcctctgaccaggataggataccccatcttggcaggtagcagtaaagaagagattaagatcctcaggctgatcccagactgacaactccactttagaccggatactattgtatgcattaataatcagttgaataatatttttggagtctccatctaaaatctccaccgttgttccaggtatcagggctgtaaaattcttgtacagcatataatggttttttgtcactgcaaagatgaggttgatgttgttctctgccaatttctctccaagcaaggcaagggatggatagtccatctggttggatgcagtgtactcgttggcctcgttcaggtggcactggccatcgtgtggctgcaccaggcctcccaattttccatccaatgcgatgtggggcacatcatctgttgtgaacaccagcaaatgcagtgcatcctttcgccagccaatcttctccttgcagacggctgcctggagtactgcatcaaagcccccctcaggggcatctcggttccgggacaccctctgtttccgaacttcctcattgaagctgtccactctgtctgtgagaggcagcagatggcggaacccaaaggaggggacgcaatttggaaacaacttgtaaccaatgcacggattggtctggtacctcgggctgtactaaaatggttggtgtttctgaaattggctgattgagttgcctgtctatagttatttttgttggaagatgcctctgaagacatgggaattaggtgacgcttatcacagtcatggaagttggttttgcctgattatggcacttctagtcgcagttatgttgttgatggattttggtagtgcaaatgttgtgtggatgatttt

SEQ ID NO: 131957 - DNA, 654 bp, Homo Sapiens
  misc_feature (630)..(630): n is a, c, g, or t
acagtttgaacatttattcgcctcctgagcttgtacaacagtcgtgggagttgctgcagaagcaagcgaaaagccagatgagcgcttctaaacttagagagaggtgagtaaggcttgtgggcgatcacttgtcggctggggcctctttggcctcttcccagaggatgtcctgaagaaacttccccagggcctggctgtgctgctggtactgaacccctgacagcttgattccaacatcaaagggggcgttgaaccggacttccagttcatcctctgccccttctgcttgacctccatcttccgggcggagccagcctgctagagctcggggctgcagcttggctggtggcttcttcgactcctttctctgctggactctctggtgttcagggctcaggaagctggagcctgccatggccaagtccagccagagcatgccgaggagcaggaggctgcagacggtccctggggagggcatggcctcagctgggttgcagacaggtgggcctgggggagagagggtctccaggcagctgcctccccttctcatgtgcctctgagcttgctcaggtaggagcccagcagatggcgtgaagggctttaccatctggggtcctgactgctgtgtanagaggaccccgcttccacctccca

SEQ ID NO: 131958 - DNA, 979 bp, Homo Sapiens
  misc_feature (604)..(604): n is a, c, g, or t
  misc_feature (759)..(759): n is a, c, g, or t
  misc_feature (772)..(772): n is a, c, g, or t
  misc_feature (777)..(777): n is a, c, g, or t
tttttttgaagagacaggtctttaatgtacggagtctcacaaggcacaaacaccctcaccaggaccaaataaataactccacggttgcaggaaggcgcggtctggggaggatgcggcatctgagctctcccagggctggtgggcgagccgggggtctgcagtctgtgaggggcctcctgggtgtgtccgggcctctagagcgggtccagtctccaggatggggatcgctcactcactctccgagtcggagtagtccgccacgagggaggagccgagactgcaggggtgccgcgtgtcgggggtgtcagctgcctcctgggaggagcctgctggcgacaggggcttgtcctgacggctcccttcctgccccctcgggctgctgcacttgggggtctcagttgtttccggaggacagtctccgggggacatgggccggtcctgggcagcctcctctggtacccgcggttccccagacttgggggtgtcggccgcatgctgggggctctccgggacgtcccgagacctccgccgcacgatgcccaggtccccgacggtgactgggggaggttggcaagcgcggttctgcggctctgtggcagcttcnttcaggacgccgctgaccttgctgctggaggcggatccgggggcagaggggaaccaggagcggctgatgatctcggtccgcttgattttctgctgtcctcgtaggagtcaagggtgtggacttcacagagccgcagctgcggtcactccctctcngggcacacggatngtcangtcgcttggctgcaagctggcctcctctcctctgggaggttttctttcccggactccccccatctgttaggaaatctcttcaaggtcggctctggatgtcattggcagctcttattgtgggcgctccaggcaccgaatggcttcacttgtcttcacctggggacgcattgcatcaagccttgtgggcacaaaaccatggggg

SEQ ID NO: 131959 - DNA, 830 bp, Homo Sapiens
tttttttggtttttaaaactttatttcaacataactatgcttacagaaatacactcatattggttaatagaatgcaatttaagtttaacttatcctacataatttggaccaaaaacttggtacatggtttaggattttaaaaaaggatttgcaatctggtttatttttatctattacaaatgtataaaagatcttccatcaaatgctgctaaagaaggcagcaagaaccttgagaaatttacctttggtttgcctcagaaaagtaacacgtattgcactgcttaagtttataaaattggtgcaacaaaacattgttgtaatgtttcaatgccagtttagaaagttcaataactaatggatatggaagggaccgggagggaacctatgtacacatgtgaaactgtaaaagctatctgatttagttaatattgcatgtagattgtaaatctacacaaaccaagattcagataatttcttcaatctgaattaacactatctgttcacttcatctgctgaggtcaaccaggaaactaggaacaccagctgtaagtttttctgacttatgtaaaaaagaaacttaactttcttcctcagcttatcaatccagaagtgacagtatactacaggcaaggtattccttccattgtcaacattcatagggtgacatgcaatgaggtctacttgggttttaatttgtatcagcactcatacgcaaaacagtctccaaagttaattaccacatgactttagaagtgactctaaaaaataaaatggcccttcttagaagactagagcaaaagatccagccatagttataaagccttattaaa

SEQ ID NO: 131960 - DNA, 554 bp, Homo Sapiens
  misc_feature (259)..(280): n is a, c, g, or t
  misc_feature (379)..(402): n is a, c, g, or t
agtttcgattttgccttgatgggttcctttagcttttcctgctttggggttcgatttagttcggctttgagggtgtgtcaaaacttgctacagtcgtagacgaaagctccggacgtgcggtacagagactggctggaagggaaggccatttgacagctactattcccgttcactggagagttgttcaagccgatcctctgtgactcgaacatctcccgcaccgagtggaagttctgctgctggcccgggtagcctgcgnnnnnnnnnnnnnnnnnnnnnntcgccaagtggcccaggtctccgcccgcctggttcaggtaccacgaggtgaggcggccttggtgggccgcagggtggtggccggcctcctggcctcccnnnnnnnnnnnnnnnnnnnnnnnntgactcagggacgacgacctgctgctggtgaccggaggcagagagtactcgggcagggggtcgtccacggccgagccgcccgcgcccccgggcgcgccctgcaagtggcccccgcgctcgccgggcgcgtacaggctcatggcttgcaggtt

SEQ ID NO: 131961 - DNA, 1224 bp, Homo Sapiens
  misc_feature (213)..(224): n is a, c, g, or t
  misc_feature (241)..(250): n is a, c, g, or t
  misc_feature (419)..(456): n is a, c, g, or t
  misc_feature (465)..(484): n is a, c, g, or t
  misc_feature (1173)..(1173): n is a, c, g, or t
aattgtggcaagattttggtgaggaagaccgggggcgcctttttgggggagaaaaagcggaatgggaaaacggggggattccggggcaaagccagggcgctccggtggtggtaagcgggggggtttattttatggtggccaaagccgtccaggtttgtttgcccgggagaaaaatagggttcttcaagggaagggcccgttgggggtcccccnnnnnnnnnnnngcccgcgcttcctttannnnnnnnnnttaaaatttccccggggttgggggcaccccgaattccgtttaattgcagggtgtaaaccctggggcttatcggaaattagatgcggcctccccaataggggaggacccggcagatttaccccctttgtacaggaaagctgggggtcagggagcagcttaggaccatggnnnnnnnnnnnnnnnnnnnnnnnnnnnnnnnnnnnnnngcctcgagnnnnnnnnnnnnnnnnnnnnaagagtccaagcatttattttattaccaaaaacaatttgttaataaacacgctcaatgcctccaatcctgtccctgaggataatcatgaaagtccttggggttgtagaggaaaccttaagaggaaaatggctacttggttatcaatgccttggctggtgacaaagaaaggacccttgcagggaccagtcacatgccatccttgggcctaaggagcccgaaagatgggaatggatgtgagctaaggatttaatcactgtcaagcagatcttgagggttatggttaagcctgataacagcctctttaacaagaacacacacatccaggatcccctcaaagaatccagagtcctcaggctccccacaaaatgtagtctggcagaaaagggaagtctttagagtctgcagaatgatgcaaacccaggccagagtggaccacactgctctcggcaccactcctaaaggcatccattggcaacggctgcccactaggggcactgccacttgcctggctcaaacttcaggacctggggaagaaatggtctggctctgcggccttcaaaccatctggatctctggctcctcagctattccttgaagcttttccatgatgccccctgaaggtggctcaggggctgggggaggctcccctggggcttcagacagcacatagtagacaatctcttgctgngcttgggcattggtctgattcacacgtggatgacaaactggggttgtcctg

SEQ ID NO: 131962 - DNA, 317 bp, Homo Sapiens
  misc_feature (271)..(271): n is a, c, g, or t
tatagatgaaggggagtttattacggagtattgactcacatgatcacaaggtgaggtcctacaataggccatctgcaagctgaggtgcaagaaagccagtccgaatcccaaaaccccaaaagtagggaagccaacagtgcagccttcagtctgtggtcgaaggtctaagagtcccaaagctgaagaacttggagtctgatgttcgcgggcaggaagcatccagtacgggagaaaagatgtaggctggaagactaaaccagtctagaatttnccacgttcttctacctgcttttattctggccactctggcagctgat

SEQ ID NO: 131963 - DNA, 478 bp, Homo Sapiens
cagaagtgggcagggaccctgggagcctccattctcaatgccccaccctttacctctctgccagtgtcagcgctttcaaaccagaaggtatggggatggcctggtggggtgggccacacatggggctccccaggcaaggccacttgctgacagaggtgaaggcgagggcagggaagccagggcccagcaaagctcttctggcgcaggcagcatacggagaagggcgacgggtgggttgttctccttggttactggtcctgggctttcagtgccctgcggcagcctcacgggggcccctgctggctccgcctctcctccagcgcccggcacacccacatggacaccacggcggcatttccatcattgaactgcacgatgaacgggtggccctccccagctcctctccgatgtcataaaagtcctccaccttctgctgcttgaatggctccatgtttggactcctcattgaggcctggaa

SEQ ID NO: 131964 - DNA, 939 bp, Homo Sapiens
  misc_feature (79)..(113): n is a, c, g, or t
  misc_feature (905)..(905): n is a, c, g, or t
agctatatgaactacatgggcgctgccgctacaggcgaacgacgagcgcagcgagtccagtgagcgaggaagcggccgnnnnnnnnnnnnnnnnnnnnnnnnnnnnnnnnnnncagtcgacggtaccggacatatgcccgggaattcggccattacggccgggataatatacccttaaaatgtcatctattctatcctacttgtattattcagggttccctagaggaacagaactaataggatagatagatgtatatatgaaagggagtttattaaggagtattgactcacacgatcacaaggtgaagtcccacaataggctgtctgcaagctgaggagcaaggaagccagtccgagtcccaaaacctcaaaagtagggaagccgacagtgcagccttcagtctgtggctgaaggcccgagagcccctggcaaatcactggtgtaagtccaagagtccaaaagctgaagaacttggagtctgatgttcgagggcaggaagcatccagcacaggagaaagatgaaggccagaagactcagcaagtctagtccttccaccttcttctgcctgctttattctagccatgctggcagctgattagatggtgcccacccagattgagggtgggtctgcctctcccagtccactgactcaaatgttaatcttctttggcaacaccctcacagacacacccaggaacaatactttgcatccttcaatccaatcaggttgaccctcaatattaaccatcacactactcaacacaggaattcaatttacaacatgatgggatggaaaataccagtgaacctgggttggggaggccagatttggtttcactttttaaaatttactatggttgttgaccttgaagcatgtcaggctcctttgtcctctgttgcttnatcaatgtacacaaagattgtacggggaatccag

SEQ ID NO: 131965 - DNA, 1689 bp, Homo Sapiens
  misc_feature (54)..(54): n is a, c, g, or t
  misc_feature (103)..(103): n is a, c, g, or t
  misc_feature (126)..(131): n is a, c, g, or t
  misc_feature (133)..(135): n is a, c, g, or t
  misc_feature (139)..(159): n is a, c, g, or t
aggcttattaattccgactctccactattagggggggccccactttgtacaaangaaaaagctgggttacggcgtaagcttgggccccctgcgagggaataantcttagagcgggcgccctttttnnnnnntnnntttnnnnnnnnnnnnnnnnnnnnncacaaagcccattaatacttttattcccatcagtgatgctgacgggcctgaccctttatagagaaaaacattaggaaaacagaagtgggcagggaccctgggagcctccattctcaatgccccaccctttacctctctgccagtgtcagcgccttcaaaccagaaggtatggggatggcctggtggggtgggccacacatggggctccccaggcaaggccacctgctgacagaggtgaaggcgagggcagggaagccagggcccagcaaagctcttctggcgcaggcagcatacggagaagggcgacgggtgggttgttctccttggttactggtcctgggctttcagtgccctgcggcagcctcacgggggcccctgctggctccgcctctcctccagcgcccggcacacccacatggacaccacggcggcatttccatcattgaactgcacgatgaacgggtggcccatcaattcttcaggtgctggcctttcttttggctgttttcgcatacactgagtgatgaaatgtacaaatggctccgagaactctgcaactgtaatgactggcgaatcctcattaacaatgctctgcaggagctggagaggcattataagatccctgttttttctgaatctgaggatatggaaacctcccaagagcaagctccataaaagagattcctaagctccagacatcagaatgaattccatactgctcccctgaaatcctttcaggcgccatataagcatttgttccaacatacgtcttggctatagaattcaccagctgagtgctaactccaaaatcacacagcttaacctgtcctcttgtgtttactagcatattggagggcttcacgtctctatgtaaaatctttaaactccacaaataagtaaggcctttaacaactgctactgcaattcttccaaggacatgttctggcattttcctatatacatccaaagatcccccatccatgaattctgtacatattgaaatcctgttttctacaaaaaatgctccataaaatccaatgatatatgatgaatcgcacttataaagaatttccaattcagacataatttgcttctgaagttccagtgtaatatctagtagtatgacctttacagctaatattttcccactcgggacatgatatgctttgtagactgtgcctccgttgccatgaccaagagtgtcccgatatcgtatgtcttgttcattcatctggccattggctagtatttttttcagttcagcagaagacttctttaagctattgcttggaagtgaatctgagactgctgggctgctgtgttgagagggtccggcccgagtattcaccttcaggccatgtatgttccgttccccaggaggcttgcaggctcttggaaatatctgcagaggctctattaactgtccatttacttgctgttccattactgtggaataataatatgacagcattgccttcatttcctcatcacttcctcgtgccgaattcgccacccaggcctcgctacctt

SEQ ID NO: 131966 - DNA, 1602 bp, Homo Sapiens
  misc_feature (174)..(174): n is a, c, g, or t
  misc_feature (186)..(186): n is a, c, g, or t
  misc_feature (245)..(245): n is a, c, g, or t
  misc_feature (291)..(291): n is a, c, g, or t
  misc_feature (366)..(366): n is a, c, g, or t
  misc_feature (422)..(422): n is a, c, g, or t
  misc_feature (460)..(460): n is a, c, g, or t
  misc_feature (522)..(522): n is a, c, g, or t
  misc_feature (527)..(527): n is a, c, g, or t
  misc_feature (838)..(867): n is a, c, g, or t
  misc_feature (1218)..(1231): n is a, c, g, or t
  misc_feature (1251)..(1312): n is a, c, g, or t
catgcgcgcgtgtgtagatgtatatagtattatgaacttctcgcttgggtcatgtttatatatacgaggagtgggcgttaataaacgtgaggagcgtaaataggtgtggcgcgggggggtgtcgctccatagtcagataggtggtggctgtgataccacgcgtactctgtagangaggtgtgcttnaatagagatgtgtaaacgcgggatctggtggtaatgatggcgaacagtttaatgtggtngtgctatggtcatcatcgagctagatctatcatacttcctctggcnctttattggagttgagttcactatctcgctctcgcgcggggtggagttcgtacgcgagagtgcaggggctgcgtnatattaaagacctctctttgccgtcggaccgcgatcgtggctcggcagcggagtgntgttgatattaagatgtcctggagcggaagtgcgagcnaccggcgtggtgctcagctctgttcgtctcagagatatattattatattctccgcccagcgngtatngagaaggcgtgcatcagccattgatgatgaaaaacgttgtgatcatgtttgttggggaaaaattggtcggttatttaggatggcggccttgcgggggttttgcacgggtaggggaaaaattaagatggtatagagattcaaggatgtccccaaagcggactaggttcctgtggcgcctgggtgttctgcgactgggggtgggtaggcctagtgtgccatttttgggtggtgacgcaaggggggcgcaacagtgttcgaattaaaggtgtttggatgagtgttttggaggagcgaagtgctttggtcagggnnnnnnnnnnnnnnnnnnnnnnnnnnnnnnactaattaagtagacttttattgctcaatcaacttcagtaacatctccaaaaaaatagttttcatctaacaattatgaaacaaatttgaaaggcaggatgattcacaatatagacccagtagaggcttatacttcatataaatgaaaaatatcagttctacaatttaaatgtttactttggattttattatagaagaaaatatcattgtaattataaaagccataaaaattggaactgtattgtgaaattacatcaaggtatcagattttatataaatgaacaataaaattcaatttttatttatttaaacgtagttaaacattggaagacaatctcccccatggggaagnnnnnnnnnnnnnnccttgaataataaagcaacnnnnnnnnnnnnnnnnnnnnnnnnnnnnnnnnnnnnnnnnnnnnnnnnnnnnnnnnnnnnnntggggtttaacaattaagtcaaatgttcaatatgtgctaattaaatttcattttaaaaatgatctttggatgattacatttccaactatgttttcctataattgacatttaatgttagtttttgaaaagttagaaaagaaaccaatttatatgaagattgccaaattttgcaatttgaacactattttaaactttgaatgtccttaaagtctttaaacttactttctaaaataaataattgttggaataaaccaaaagacatttcacatatttgcactgcatacgatacc

SEQ ID NO: 131967 - DNA, 712 bp, Homo Sapiens
  misc_feature (54)..(63): n is a, c, g, or t
gcacgaggttttttaaactactgtttaatcagttgtaaagacacacaaattagnnnnnnnnnncatgtcctaaacatgttacatgtaagttaaaaacacctttaaaaaccagcaataagccaccagtgcagctctgacagactagaaatgagtggttatgaaatgagcacatctcagtttgactgacacagtgggagttttaatttaccgtacatcaggaactaatttatgaatctgttgaaaaataacacttctttaaaaaaatattttggaataataaaaacagaaagcacagaacaccacattctattctcaacttgggaaggcaaatgtaaatactaaattctggctgctggagttgggtctctcctcatgtttgggcgactgagggctcaactactactaggcagagatcaagacaacgtttaaaggaaggcaggaatgaaatcacacattttcactctgtatatggaagaatttctcacttcacctgaatgatttactttcattcctatggccttctatcgtgccccttctggttcagaggagcagtcacataaaagtgacaagatggacaagactggtttggaacacatttgtgttcaatgtttgattcctttttccttgtgataaagccagaggcaaatgtacttcattgataaatctgtgtgcgcagatccaaaaatacataaaattgggaaagaggcatatt

SEQ ID NO: 131968 - DNA, 897 bp, Homo Sapiens
  misc_feature (220)..(255): n is a, c, g, or t
  misc_feature (446)..(491): n is a, c, g, or t
  misc_feature (852)..(852): n is a, c, g, or t
ttttttttgctggaaaccaacattttattgagcactcctgctcctcggaatctattccagtagattctttgccgagggcatcacatatcacacaggggtgtgaccagcactccccctgctacctgccgtgtgggcaggggcaggagtgaatggctcttcctgggcacaggccacagttaaccggtgacaattgcagagccataggaattcatcttttagnnnnnnnnnnnnnnnnnnnnnnnnnnnnnnnnnnnncctgagtataaaacctcagcagtgttccagcactatctcggggtttaaatataaaaaggcatcatgagaaaacagttaaaaagataacagcagcaggccgccacctccagggcagtggtcatgggggtggggccagccccgccctgagccgccggggcctcacttgagcagcaggtgcaggcccccgctgnnnnnnnnnnnnnnnnnnnnnnnnnnnnnnnnnnnnnnnnnnnnnncctgttcgcaggacacccaggacccggggttcggggatctccagaacctcattatgttctccttaagtgtggtgaaaccgtccatgaaacttctaagaacatccctgatgtcctcagtctggtcgtagatgaaagccagacccaggctgtgcatggccacctcggagagctgggccaggcgcggggccctgaggctcacgtccatctcgtccccgatgcaggccagccgcagggccaatgcgtcactgccctccatgcattccaaagaatcgaagtcctccatagggtccaggtcctcttcagagtcagtcatgccaagaacctccatggtcgggggttccaggagctgctcatacagganggtctccatcaagatgtctctggagaggggtcttacttcagacat

SEQ ID NO: 131969 - DNA, 656 bp, Homo Sapiens
  misc_feature (194)..(203): n is a, c, g, or t
ttttttagtgttcttttttctttatttaagtttacgaaatacatgcttatagaaaattaaaacattatagaaatatgtaaagccacccatgaaagttcttccataattctgcttcctaacaaagccactgttagtaatgtggtgttacttatattttagagcatcaagttgtccacaaaaatgcttgcacaacnnnnnnnnnnacccaagtttagaaatcttgccctaataatccagacattcctcactctcttaacgaatacttagaaacaaattgcataaaggtaccatctattaaaccagtcccttactgacagggcatttgggctagttttaagtattaaagaacaaaggtgcaatgactttgcttgtgtacacttgtcagatcattcccattaggcagtttcctaggaatgaacttagtaggccaaaaggttcaaagtttcaataaatcccagaaaactacattcctaaaggctgtgacaattatactcccacctatggcatacaagatgggtaatgtaattggaagtgcttgttcaaaatcatggtgcaattttttaatttggaaaatttaaaaaattgactgttcttataactgtgttttctaattatagaaggtgaagtctgacaaatcttgattaatggggaatcag

SEQ ID NO: 131970 - DNA, 851 bp, Homo Sapiens
aacccattaaatcctttttaattttaagccagtttgaattaggtttctgtgatttaaaacccaaaagatccctaacctatacattcatcatacttagcccattcctaccttcccacaggatagcacagggaatacaggtaaggtcactacagatttattggttacactaaagcccagggtatcaagctgaaaaggtcagaggcagcaaccaggtactaagtagactgggtgactcagctgtctgtacagaggagaatggacttccttaggaaaagaatagccaaatgagaagcaagtgcaaagaagggcctctactaggcaaagttaacgtagggatataaacactcttccccacagacctgtatcatgggggtgttgcttttgggtctttatgctcctgggataaggaactttgaagcacatgctcctttaagtctttattaccctgtggtgcagtgtctacctctccctttgccaaaggaaaagcctccttttggcttctgctgcccttgatgacactcacttttgaggggaccaagggaattttatcttctgcttctttggtatgctgggaaccggggccccttcctcctttggaaacagtaccatctccctgaccctgggcaagtactgcccccttttcagcctctcccattggccctggcctctctgcccctccagctgagttgccttcccctcctgatgcccatgtctcccatggtaaccttgaggactgggcagattccatggcagctgctgacttgagaggggtagaattcctttccccacttccacctgacttttttcgagggcgccccgtttccttttggatcacttgctgtatcctctat

SEQ ID NO: 131971 - DNA, 963 bp, Homo Sapiens
ccacgcgtccggccaggaccttggggctgggctggagtgaaggtggctacgagttttccagatttaggagacttcagaaaggtggggcagatagaatggagatggcaaagatctctttgggcatatatgggcctggcgaagtaatggaataatttctaattttcggagaagccctcatgccgggatggcagaagatgagcctgatgctaagagccccaagactgggggaagggcccccccaggtggtgctgaggctggggaacctaccacccttcttcagaggctccgaggtaccatttccaaggccgtgcagaacaaagtagaggggatcctgcaagatgtacagaaattttctgacaatgacaagctgtatctctaccttcagctcccctcaggacccaccactggagacaaaagctcagagccaagtacactgagcaatgaggagtacatgtatgcctataggtggatccgcaaccacctggaagagcacactgacacctgtctgccaaagcaaagtgtttatgatgcctatcggaagtactgtgagagtcttgcctgttgccgcccactcagcacagccaactttggcaagatcatcagagagatcttccctgacatcaaagctcgaaggcttggtggccggggccagtccaaatattgctacagtggcataaggaggaagaccttggtgtctatgccaccccctgcctggacttgacctaaagggttctgagagtccagaaatgggcccaggaagtaaccccagcaccctcgagatgaactggtgggaggcagcgtggtgccctgacctggtgactgggcaagagcggatcctggaaacggtcccttcagttccatcgtttgaggtcgcccgctttcctgctacagcaaaatcttcatctcttgcccgatctggcacatggcccatgtggctttaagggcatgggggccttggctgaa

SEQ ID NO: 131972 - DNA, 966 bp, Homo Sapiens
  misc_feature (329)..(473): n is a, c, g, or t
  misc_feature (490)..(782): n is a, c, g, or t
cagattttaaagctgtctttacttataagaccagacaaatgttgagttataagaatttccttcaggaccacaaatggaaacatagtgcagatgagaaatattttgacagtaaacagaaatccctgtaaatcaccccattctattggctggcttgcttctctccagtttgaaatggtctcaagctgagaccattcagggcaaagactgagtaaatatataacaggcaccttgtctgtccccagaagtccccacgcttttttgtttgttttgagacagagtctggctctttcatccaggatggagtgaaaggtgaacgatctcagctcacnnnnnnnnnnnnnnnnnnnnnnnnnnnnnnnnnnnnnnnnnnnnnnnnnnnnnnnnnnnnnnnnnnnnnnnnnnnnnnnnnnnnnnnnnnnnnnnnnnnnnnnnnnnnnnnnnnnnnnnnnnnnnnnnnnnnnnnnnnnnnnnnnctcgtgccgaattcttnnnnnnnnnnnnnnnnnnnnnnnnnnnnnnnnnnnnnnnnnnnnnnnnnnnnnnnnnnnnnnnnnnnnnnnnnnnnnnnnnnnnnnnnnnnnnnnnnnnnnnnnnnnnnnnnnnnnnnnnnnnnnnnnnnnnnnnnnnnnnnnnnnnnnnnnnnnnnnnnnnnnnnnnnnnnnnnnnnnnnnnnnnnnnnnnnnnnnnnnnnnnnnnnnnnnnnnnnnnnnnnnnnnnnnnnnnnnnnnnnnnnnnnnnnnnnnnnnnnnnnnnnnnnnnnnnnnnnnnnnnnnnnnnnnnnngctcggtcgtcggtgcggcagcggatagctcatcaaggcgtatacggtatcacagacagggatacgcagaagaatgtgacaaggcagaaaggcaagacgtaaaggcgcgtgctgggtttcatagtcgccctgagacacaaaatcacccaatcaaggggaaccaagactaaaacagggtccctga

SEQ ID NO: 131973 - DNA, 2611 bp, Homo Sapiens
  misc_feature (74)..(88): n is a, c, g, or t
agggctccagggatcctcccatctcagtctccttgggagctgggagtaggcatgtgccaccatgcctggctaannnnnnnnnnnnnnngtagagatggggtcttgtcatgttgcccatgtcggtctcaaactcctgggctcaagcgatactcccaccttggcttcccagtattgggattacaggtgtgagccaccatgtctggcttgcttctctttttgtattctaaaattcaaaggcctaagtatcaaatccctaaatctccaaatactgtcacagataaagactcaataataaactccctccgaaagtttagacaggctcaggtgagagacttgtttcaaggggttataaaaagaaacaccagtgctctgcagaagaatcagtttttaatttttttaatgtatctatttaatggaataagttgatcatagatttgtaaaccaaaaggtaatttctcaagtatttggaaataagaaaaagcctccctaccaccaaccttttggtcatctttctcattctcttacaatcatcctaatcccctagtacacccttaccatatatcaataagggcaccataatattatgcaaagaacagatatatatgcctgatctcttattagacttgcaccagagactgttgaaccactccaggcatgaactccaaagctgaggcacactgaccaagcccctgggcatctacagaagcaaaggcgttctctctccagctggctgctccttctggaagagccctttaatctgggttaatcggccatagagcctctctctcaatggaggaatgtggtagctagggtccagaatgtttgtcactcggcgctctctctcttgcttccataacttgtatgggtggggagggaagaacggtcgtcctctctctcttcgaatctgtaacgtaattccacttacagccagcatgccccatactgccaggataatgaagtcattagtttgaaaaggcacatttgtgaaagctctgtggaaatccttgttgagcgctctcttgagtacgttcaaagtgatgtaggaaaggcttgtggaccagtaactgtcaatggctaaaaccaccgaataggagccaatgactccacaagtcagtatgttcagtattcttaggcagcccatgaaaactactggaatgaggatagctatgcaagagaaagtgacccagaatacaccatcatcatgaaaaatctttaggtttcccagtggagtaaagaaagtcactgacgagatgaggaaccccagcactagtccaacacagagcatgcagatcgagaggattccaaatcgccaccacacagctaccaagaacattccaccgacgcttccagtgacagctgtcagaatcagattcacatcatacttgataggtgtcagtcttgtaatcagtatataaaagaagaatcccatgatgataaagcctatgaagaataattctgttttccagaatctgtgtccaaagaaacaaatgaagaaaccaagcagggcaaaaagagtgaagaacactttggaagacactcttcctagggaagcacaactaccctctcctgcctcaaagctgcaagcgtatgtgtgagcaggaatgtaggcagcagatgtatttagaaacgggtcccaaacaatgacattgtatatgacaccttgtcccgggagggaggagaaggaaacacttgtcttatcattagctgttagggtaaccaccttgagagcactggccttcacctggggcacactgaccatcctctgcagatgcttcagcaacatctcctcagtgaggtcattctcaggcagaaaatactgatagacatcatactgcaacctccacctggagtcctggtctgtcccagcgtcacatggtgggggatctacgcctctcgcatagcctaggtttgctggggcaaacttgatagtcgtttcaaagaaattatactccaagtaaatgttgggatcaatatctaaatcgaactccaaattacagcctccagggacaggatctctttctgagtaggagagtaggatagccatattctggacaggctgtatgcctgaagtccccaagtaccaagtgcatgtactctgctctggtctaaggatgaaaaccagtccactggcagtgcctgtttccgaggaattggaaaggagagtcggagaaaaggaaacagttgtattctgatactgtgagtgtatttggaaaataagaaaagtcacattgcttgaaatatcatgcaaaatagcttcctctggaaagggcctattgagctcgaagtatctaaatttccccacagaaaattcaataagaccctcgctggaattcccgaagacctcggctgcaccagccacccggtgttcggatgccagcaccgctacgaccagcagctgcaggaaccccattgctgcctgggccgggctgggcccacgccggggctggggagaggtgcgggcgtgcgcgccggggccccgcagcctcgcccacgctatcccggggcgcccgcatcgggcgccatcgcccgccaggtgcagacgcttcgcacctgccagctccgcagccgccggcgcgcgccccgccgaactcctagccccagcgagaggttt

SEQ ID NO: 131974 - DNA, 712 bp, Homo Sapiens
  misc_feature (611)..(621): n is a, c, g, or t
  misc_feature (655)..(655): n is a, c, g, or t
gaaacaagtcactttaccctccttaggacccattttggggggggaaaaaccaacacattccagagctttccaagtcctttgaacttcaggttcacattcagggatcacacagttctgcctgttctcagggcacagcaactgccaatcccgctgaagaggcctccctgggcacagcacaggctgcacggtgcacgcatttccctgaaggcagccccttcttcggaagcagctgttccaggcctcggaacagggcctgggtatccgcgtggtgggctggcagctgacggcctgctcagtggagccaggagctaactcagaccccaaagcaagcagggggccagtggcggggcccagcgcccagcaggacacccatgcaagaggctgagccccccaacatccaaggacaggagagacatggagtggcgctggacagtcacgacaaggacttgcctccagcactggacacacctgtgttaagaccagccctctgcttcccagtcccgccagcctggggcatcctccatgggctcagcactgagaggtcttgggtctgccacgttctctagctctccagtcacccactcatccagggtaggaggggttctccctgnnnnnnnnnnngtggccttgggatctcaccctctccatgtcctgnggacagcctcgccctcagccggactgcatccctcctgggcctgagcctcgggactca

SEQ ID NO: 131975 - DNA, 271 bp, Homo Sapiens
actccaacaacttgaaacaagtcactttaccctccttaggacccattttgggggggaaaaaccaacacattccagagctttccaagtcctttgaacttcaggttcacattcagggatcacacagttctgcctgttctcagggcacagcaactgccaatcccgctgaagaggcctccctgggcacagcacaggctgcacggtgcacgcatttccctgaaggcagccccttctgtcgtcttctcgcagccgtatagtagtagtaggcggccgc

SEQ ID NO: 131976 - DNA, 1257 bp, Homo Sapiens
  misc_feature (48)..(73): n is a, c, g, or t
  misc_feature (529)..(529): n is a, c, g, or t
attaaccctcaactaaagggaataagcttgcggccgcctgctcaggtnnnnnnnnnnnnnnnnnnnnnnnnnnagcattcaataaatatttattataattaaaagaccgtagcaatacccccaccaccaagacccttcacccagaaatagagagattggaattgtaaacaccgtatccagttctgaccaccctgaaagccagggcatcatcgcgcccgttttgtcctaaatgaagggctcccggacaatgtcctgaaagtggcagatgacctcatcttccactgtccaccgggcacagggcagaccggggtgctctatggggtcctggccgatgcctgggtccaggggtgttccccaggtggtcaggcaaggacacgcggtcattctgcctcctgcgtcttgtcctcgggcgcctgggaccctctctggttccacatgtggttgttcagccccagctgtaccatctgtgcgtggtggataatgaggggttgcagccctgggctctgagggggtgcgggtgaggccgtanggaaggctggggggggtggcggctgcgggcaccccggccaagtgggaaaggggtgcggggctcccaggggcacctggcccccaaagggcattcgagccccatagggcgccccagtcccaaatgacatgtggctcccaaaagccacctggagctgctccatctgtgcctggtaggacaaagtagctctggaggtaggctgagtaggctgcgttcagtgccgccgcctgcatccgctcaccatccaggtgttggctctgttcccgcagggctcgggtgtcctgttccttcctccacatggcctttcgggcctgaagcctgtggggcttgaaggtgttggccaccttcctggcgaagatctgggagtgttcgtccagccgcaccagcccggagagcaggctggccgtgtcggagctgagctgggccggggagctctccaggggcaggaaggggatgacacagtctggcgacccctgtcgcgtgaggttgctcatcatggcttggttcacctggtgcaggctcaggcgacagtcgaagttggaggtgagaagtaggatgatgaaagctgagtggtctatggcgtcctgcaggcagctcagctccccgcgccccggcacctggaaatcctcgcagaaggtggccccgtcgggcacgccaagggcctccagcttctcccgaacccgcagggcgatgtgttcgtctgccctggcgtggaggatcacaaagttata

SEQ ID NO: 131977 - DNA, 1137 bp, Homo Sapiens
  misc_feature (1120)..(1120): n is a, c, g, or t
aaaaggccaaaggaagcaagctttattgaatttacaacgtagaaaatatttgtagttccttagacatttgcattgctataaaaattacactttatggtataattattaaggtttgaagagaaataaacagtataaacgaaatatggcccacacaatgaaaatgtaaaccatataaatcaaaatcataaaacaattattcaatactcagaggcctacttaatatatacatatgaaatttcttacacacacacaataaatgcccacaaaaaccatcactgaagccgatcactgtacaaatatgaaaataaatctttatctttaacctcaattttatcttcagcaggagggttgtgcaacttgggtttatgcagatcacatcaagtgttaaataatcaaatgtcacatatgtcatataaagcagcaagtgaaaaaaataaattatgaaaatgcatgggctaaaagttaacagtgaaaaatatctccttatccaacattattttccacaatgaaattaaaatattttacaatgtatcaggatacatttaaaaaaggactgtagtataactatgattttaaaatatcttaaagaaaaacagggacaaggtgaataacttccatagtaatatgcaaatgtatcaagttaagtctaagataaaaacattaaatatttttgttcttactgaaaatgtgctttaaatttgagaacaccttcatgaaatcaaaacgttggtaataatcatgaatctcccagcatacagagctttaagaagcttctctttaaacatgattgctaaccagagctctaagtctctaatttggattatgttaccaaaatatttatcagggctcaaatacttaaagatgatcaaaggcactggtgtaatctcatcaacgtggctatactgacaggacaatccagaggtaaagactatgaaaatacttctgtattatggtatactctttcacagattgtaaaacaaatataaagagacactttggagagaataaataaaggcaacacagtaacatataaactaacacagttttgtgcaactgcaccaaaacctaaacatgtgtcccatatatcagcatctacatatatctgatccaatttcatcanaagatgccactaagaca

SEQ ID NO: 131978 - DNA, 1108 bp, Homo Sapiens
  misc_feature (764)..(823): n is a, c, g, or t
ggggtgcgctcaaaaccccgttgtgggatgggtttctccactttggggcgaaaaaggtttaaaggaatttccacccagttttttccaataaatgtccacgggccggggggttaattttgatattggaggttgcgttgggacctccctgtggagagaatcccaataaagggccttcagaaactcccatttgggatttttttcaagaaccgttcgggtttcccgccccggggggttttttattgggggggaatcccaagcccctaatttcatggccccggaattttccttggggaaccaggctaagggcccatgtttcactttcctttttggggcccggggggcccaaagaaatggttctagaaagcttcttgaagggccgaggcgggccgacaagggtttttggcttgtgggttgggttttgggggtctcatccttttaatatgtttattggatatgaatattttatgatgcaaatgacattagtacaagcagtctacgaatagagttcaatagtcacacacatatattggggtaagcacaaaatatttcgactagaggggtgcaagcaagcaggtttggagagcactgacatgaaagggtgatgcaggtcaggttcacaattaatgaaaaaacggagaaaaagagggagtatggcaaaccataggctgggtcatgccccaactcgcagtgggaagatgcttatttagcttgctgccatgcgaggatgggggcctaggactattgggtgttctgagttctaaagnnnnnnnnnnnnnnnnnnnnnnnnnnnnnnnnnnnnnnnnnnnnnnnnnnnnnnnnnnnnagatgtgttaatggcatcacaagacaaaactggcggaggggtcagcaagagagaggaaaacatctacatccaggtcagctcacccacacataacagtaccagaatttcctggatatttaactatgtgctggaaattgttctaagtctgtaactagaatcatctcacttaatgttcaccttaggactggtgcctttcatatatccccattatacagatgaggaaactgaggcacgttaacatgccaaaggacacgaagctagtgggagtcttaaagctcaggtttt

SEQ ID NO: 131979 - DNA, 706 bp, Homo Sapiens
  misc_feature (135)..(156): n is a, c, g, or t
  misc_feature (225)..(246): n is a, c, g, or t
tttcagttattacccaacagtaacaggaacagacctgatccacgtggcaggaaaaagaggaacctgaacccctctgcaagtattctctttcctgaccagctgggcttgccgcactttgtgagatttgcaaaaaannnnnnnnnnnnnnnnnnnnnnttccataggaaaacaacatcagatgtcttcccctagatgaacgatgaagagtcaaactgcaggttcttnnnnnnnnnnnnnnnnnnnnnncaccatgatactaacaacggtggaagggtgagggtgaggaattacagatggagagattccaaatcagaaggaaacgtgacatggagtcccaggctcatgccctccgccagaattccagccccgcctgtgctgggtagtttgtctaaggtgctccagggtccctcttggtctgcaagagaagtgtccctgccatttctgggtcgcttccttttccactctcctcagcccgcctgctccgtcacacttccagcaatcctggtgggcaggggttccctgggctgctggcccgctgaggtggactgttggttccttcagcattcatcttcttggtatatttgttcatccagctcctgggactctaggtgctccagacggtctgttcggccactcatgatttcatctggggttttcataaacctgaacaaagcctttgtcctggctccttcctgataatgtttag

SEQ ID NO: 131980 - DNA, 2087 bp, Homo Sapiens
  misc_feature (482)..(482): n is a, c, g, or t
  misc_feature (1230)..(1238): n is a, c, g, or t
  misc_feature (1404)..(1414): n is a, c, g, or t
tgctctagaaatattttaatattttatttgaaaaaaccaggtaaaaagcacaataaattttccctataaaacaaaggaattcactcatagcaaggtatcaatcttctttctctgtagaaataaattatatacaatttaagctcttgatttatactttattttctgtctttatatgtaacacatactaatcaaagggaaaaaactaaaaatacagatttatacccaaatggataacgattatataatcattcttactccaaaaagaactgtattaggtataaacaattataaacttcagataaataggtcatattctataaatactaatttgttatatacaacacataatcttctacaaatactagttttatgttattacttttcaaaatatttcaaactagttatttttttccttgtgcttcaattttctcatttgtaatttagggacttacccatttttatagatttactagaaattaagnttttttttgccgacaagaatgtcaaatcaggcacactgggatttattcctttaaaaatacagtcatttttaatcttcctaataggtaatggtctaaagtcagagtccagttacaacatggagataagacacactgccaattggcaactcctcctctggcagtttttttctccaatgtttgagtagatcattgtttctttggtttgaacaccagataaaatgtgtagttggttggatttaggacccatattgtatgacaaatacccatctttaaacaccaggcttagacacagctcaggctatctacatgcttagagctcattggaaaggctgagctccaccttgagttccatcgaaggctcccacagagtggaatccaccctgtttaaatcacttttctctctcctttttttctaattattgctgagtgtatacttaaaattgcataagaatgtacacagtcaaatatatatagtatgctaaagtagaacagaaaggagattcactgccatatacaccaggagcacattcactgttatttttctctctgctaacaactctttaagggcagctattttggggacagagacataggctaggttcagaaaagctactaagtatgcctactcatattaaaagaaagcaaatgaatctttaggtaaggagacatttattaggtcatatccttatactaattattaaatttagacaaattttttataagctgttaatttagaactagtcttgtnnnnnnnnnttcttccaaccctttcattactactttatgcttcctgaataccagtgaaaactgcagagctggagagatggctagccaaaaaatagatcatctcatttagagtagatacaccagccatactagctcaggtccaacatgttacttacttccctgttactgagacccnnnnnnnnnnnttatcgggacttacaatcttatgatacaaagaaaactgtaactatcaaattataaagtaaaaattcaaagaataaaaaataaccttcagtgttttagggaggtcatattttgctaacacaatgaaataagataatcaggaaagaagcgtctgcacttgctgcggcgatcggtgaagaatgttctctggatctttgtattcattgattggattcatcacggctgcatacacttcaccataggctctgcagactaattctgtagattgttttacgatctgctctttcactgtggcacttagaagaaagttcagctgtggtatcaataggttgtctggggctgacagataacgatcaaactgaaccattgcagccttcagtgtcacagaatctaggttgggcatattagctaaagagccctgttcaggtttatgttgctgtacagtgttatagatgtaactcaagcctaccctagttaaaacataagaggcttgctcatttataagtgtgtccaaatgtgcttcgatctgaaactgtagcatttccagacgtctgtcagtgaattcaaatagagctaatgttgtcttcatcatatatagtgaattgaccatgaaagtggccatgtcagctgtgcctaaattgctggctgatacagtacacatccgaagcagtgccg

SEQ ID NO: 131981 - DNA, 690 bp, Homo Sapiens
gtcggtccaaagggtctgctggcttttattgtgtctctgcagaggggctgggacctgtgccaggcagctctgtgacacagtggggccagcagcagggtggcaccctgacccgtggctcagaacctagttctgctgcttccccaccaagggcggaagccagctggccagaggtcttcagccaccaacagggtccaggcaggcatcctcctgcctcccccagcagtctgcacagggtcatatttccagcataaaatcctctgaaggccccttcagcaggaggcccctgagagaaaatccagccatctgaggctcagtcccttcagctggggctcagacccagctccagggggccgggcaaatgtggcctccccttctggaaggggctagctggtgctctccaccacaaccacacctccacctcttcttcctcccgacctgcctccttgtggccccctgagccctgagctgctccagggctataactcagactgggatctggagatccttgggccttttcggatctccttccgcttctcctctttctttcggcgtttctcttcttctctcagggccttctggaaagggtcagtgctgggaatgaactctgtgcggtcgattttacatgggttctggaagttggagtctttctcactgatccccagctcctgggccatcaggctgaggatgggc

SEQ ID NO: 131982 - DNA, 1952 bp, Homo Sapiens
  misc_feature (124)..(124): n is a, c, g, or t
  misc_feature (150)..(150): n is a, c, g, or t
  misc_feature (192)..(192): n is a, c, g, or t
  misc_feature (249)..(250): n is a, c, g, or t
  misc_feature (282)..(282): n is a, c, g, or t
  misc_feature (288)..(288): n is a, c, g, or t
  misc_feature (307)..(307): n is a, c, g, or t
  misc_feature (318)..(318): n is a, c, g, or t
  misc_feature (338)..(339): n is a, c, g, or t
  misc_feature (342)..(342): n is a, c, g, or t
  misc_feature (449)..(449): n is a, c, g, or t
cgacttgctgttaaattgtggtctttacccggtgggagtcttcctccttggcccggcgccggccctataccgcgggcgttaataaagaataagtaggcgtgtttagtgtgcgttgtcaccccgnaatgttactacacataatggtggcancaagcggagtgaagtgtcgaacctggatgcgttgggttggcnctcacaccaaaaatttatcttagaattcggatcttttgtgtgtggataaattggatnngccgcttttctccaggggcaacgggttatgancgatgngtatatgccccccctacancaatcctagtnttgttttactgctgtagcgnnaancccggataagttttgcttgcgcgggcctctgcctattcattggttaggtgttaatgttttccacgcccgcaccccctcgaggtattgtgaggtgaaggaggcggttntcgtgttacaaggaaagataatgggggctcgccgggggagaaatggaggagtgttgtcgcggtcgtgctagtcacgcgcacacaaggttactgggggtttccccacacacgccccccacttaagaaagtgtatagaggaggtttcctccttctccccccagaaggatattcccccaaagtgtttttgcccaggtttttttcccccaggtttcgagggggcgttttgtataaaaagggaccgtgcccgaagggcgctaggccttaatgcatttgggacctgagctattgtgggggcgcaactttgtgttcacagaaaagacgggggttaggccgtaaaacttggagcccctcgaagggaatactttagagcgggcccgccctttcttcttttatttgattggtttctctggtttgttttgggcaaacacaccaaagctttattcaacaggcgtggcttcctgaagcgtaaagccacttcacagacggtggccacagcggcacctcggccagagccatgcggccatcagagaccctgggcggccgggcagagggcttggttgaggcaggcgtggcagcgagggtgcacaggcagacaggtctgctggccgaagcccaccaagagtccattgatctcgtgccacagctccctaggcagccactcctccagggcggcgcgggtctcctctggggacttggttgccttcttggtccacctcagcctgttggcgattctgtgcacatgcgtgtccactgcaatgcctgacacagtgccccaggccacagccatagccaggtgtgccatcttgggcccaacacccggcagcgccaccagctcggccacagaggctgggatgtccccaccgtagtgctgctgcaggatggcgctggtctgcttgatgtatttcaccttgctcctccagaaaccgacggggtagatgagcttgcccagcgtggcatcatctgtctgcaggatgctgtccaccgtcaggccccgcgcccgcagtcgctgcatggcgcccgccgtcacctggtctttggtttggctggagagcatcagtgacagcagcacctggtacctgcgtacctttgggggggcactggagtcatagcagtgctcagtccccagatggtccacaggtgcatcctttttgttcctcatggcacggatgttgaccagctgttgctgccagtcctggggctcccagactggcaccttgaggggctcagccccctcacctttctcactgtccgagccctcataggccacacgcagtctctgtgctttccgcggacgcttcacggggctgtggcttttcctcgcttctgctgcagcctctcttctccggagaggcccgggctcctccctacacccccgcggcccagccccgggtcccaggctccggctccgggtcagcatcctcgcgctcaaggcggtcatgccggactcccctcgtgccgaattcgccacccaggcctcgctaccttaaaccgctatagttactg

SEQ ID NO: 131983 - DNA, 682 bp, Homo Sapiens
aagctcattagctgttgttagtgtactttttgtgtggcccaattcttcttccagtgtggcccagggacgccaaaagattggacacctctggcgtagagcctctctatacccctggcccatgtctgtcttctacatgtagccaatgaaaggaatctaaagctggaagggcaggggacctttctgatgctcttgtgaggcaaagggattgagatcactgcagagaagctggcaacaggaggcccatcattttttcagtgggcaggacatctccattctgggtggaggaagacgcaaggctttggcaaatactaaaatgcttgtttgtctattgctctttctttatgtccatcacagtctgggaaccagtaccttgaagcactatccttgattaatttataattttctgccctatactgactgcctaggaaagaggtggtcagaggtacgagagggtgaaaatactgttcttaattatgaaaacctatatctgttctgtgtatccatggataattttagtcttctaaattgatttgttattttccaagctttatttttataaaaagtcatttttcagtaaacatataacattgtcaagaactacctaatccatgtacataaaatgtcatgtgaatgtataaatatgtatataatgtataaaaataaaattattctaatttttaaa

SEQ ID NO: 131984 - DNA, 726 bp, Homo Sapiens
  misc_feature (686)..(686): n is a, c, g, or t
tttgagacagagcactacatgcttgtgaagacaactgagggtatgtgagtaggcagtactaaagaccaccttgggtctccctcatcaacagagtggcaaggggcaaatgccctggacttctgagcccagagtctttcagtcccagaaacaatccaacagcaaatctctatcttccgtctcttactggagcatatctcttccaagcaagagagactacgctgacaattgtggaagaggacagaatttggaagagtaacagcagccttatatagtccctttactcacctatgacgaaaggtggcaacagccctggctctctggttcctaaagcccagctctctctatgtcttctttactggactccatggcaacactgactggcaccgctgtcaccagagctcagaaggaaagtgggcagcaggcctctcccactcaccttccttctgcttcctccactggaactccaggaccacatcatcatgccccacgaaggtgtggactggggtgttcaagtcaaagacattccacaggagaaggctgttttccctccgcagctggggaaccatcacagtcaccaatccattgctgaaaggctaaggcagggaagggaaaagcaggtgattagattatttcagggagaatcagctgagtcttgagtttccaaacctggaattcttcctaagtanaataaattagataatggaaggcccaactcatctggagaaa

SEQ ID NO: 131985 - DNA, 948 bp, Homo Sapiens
  misc_feature (708)..(708): n is a, c, g, or t
ggggcgtgtcggggctgattctctggctgtgtggggcgcacggtcccgggatactggggacggcggggtgggagggcgccgtcctggggccgcggcggcctgggtgggggagatggcggcgcgatggagcagcgaaaacgtggttgtagagttccgtgactcccaggcaactgcgatgtctgtggactgtcttgggcagcatgcagtgctttctggccgcagattcttatacatcgtcaatctagatgcccctttctgaaggtcaccgaaagatctctcgccagagcaaatgggacattggagctgtgcagtggaatcctcatgacagctttgcacactattttgcggcttcgagtaaccaacgagtagacctttacaagtggaaagacggcagtggggaagtttggcacaaccttacaaggccacactcgtgtcatcagcgacttggactgggcggtgtttgagcctgacctcctggttaccagctctgtggacacctacatctacatttgggatatcaaagacacaaggaaacctactgttgcactgtctgctgttgcgggtgcctcccaggtcaaatggaataaaaaaaatgctatctgccttgccaccagccatgacggcgatgtgcggatatgggataagaggaaacccagtacagcagtggaatatctagccgcccacctctccaaaatccatggcctggantggcacccagacagcgagcacattcttgctacctccagtcaagacaattctgtgaagttctgggattaccgccagcctcggaaatacctcaatattcttccttccagtttattaaccccacaaccatcacatccaccatgaaagctaagctgctgaaggtgggggtctgggttcccaaattctccttgctgttctgcatcattgtctagatggattagtaaagaagaatgaaaactccag

SEQ ID NO: 131986 - DNA, 1365 bp, Homo Sapiens
tttctaattataaaatatcttttagcttcagaatacatcttgcttgttgttttcaggtaaatgaaattggactgcagggctcctaacctgggctgctaaatgaaattggattgcaaatctcctaaccggagatgaatgcatagtattaatgagatctgtgggcagattctatgcaattcacatatttacaggcaatatttctcaaatcatatgcaatcattgtgcagatttttctgaggaagggtccataattttcattagaattcaaaggaagtctatgacccaaaaaaggttaagaaccactgctctgatgttttctgcacaaagtaaatggcaggttcagaggttacgttgctaatactagtgtgtgtacgaaacagatgacttccgaatctcatctactggagttttcattcttctttactaatccatctagacaatgatgcagaacagcaaggagaatttgggaacccagacccccaccttcagcagcttagctttcatggtggatgtgatggttgtggggttaataaactggaaggaaggggcggcgttgtttgggtactgtgcagggaacttcaccagcatcttgacacgatggttgctgcagtgcacagacactgtgcagctcctgtctgccgcatccatctccacattgacattccggatttgcacattgatcagggagaattcctgctgcaaggtctgaggcagccccagttgatctgatttcctctcttccaggagatttctagggggatcttcttttagggcttcttcctccccatggcttgcagtgtgctggtgatctgtatcttcagtgtgcagggtcttctcaggttccggcagaagggaaatactctcaatgaactcatcaacaccatctaatatgtcatttgcacaaagcctctgcatctgggaatccacccgccacattctcaaggtctgatcccgggaccacgtcaccagttgatagtccttggacccttccttctgcttcctccactggaactccaggaccacatcatcatgccccacgaaggtgtggactggggtgttcaagtcaaagacattccacaggagaaggctgttttccctccgcagctggggaaccatcacagtcaccaatccattgctgaaaggtgtgtatctggccttccagacaggcacctggcaaggaagaatattgaggtatttccgaggctggcggtaatcccagaacttcacagaattgtcttgactggaggtagcaagaatgtgctcgctgtctgggtgacagtccaggccatggattttggagaggtgggcggctagatattccactgctgtactgggtttcctcttatcccatatccgcacatcgcc

SEQ ID NO: 131987 - DNA, 995 bp, Homo Sapiens
ttttttttcatttagcaaatatttattgaaaccttgatatatggccaggagctgtctttggggctggggatacaacagagaacaaaccaggtgttgtcattcccagagtcacaatatttcaaggcagaatttgaatccaggtctcactgatttcgaaccccaggttgattattaagtgacagcatctcctgtagtccaggaggcccaaagaatgttcgtagagggtcttggcttagggtttcttattaacagagtgaacaggaaccaaacaccaagtggaaatggagggtgatgggctgtggtgggtgggtccagtctaattgttcttcatcgtctcctggatccagtccacatatttgcagactttcgtgtagacaccaggctttcgggtgatcgcacacggatcctggccccaggagataatgccttgaagagactggttacagaccagagggcccccggagtcaccctggcaggagtccttgcccccttcctgcacgctggcacacaccatggtgtctgtgatgttgccggggtaggcgttctcacacttctggtgctcaatgatggtgatgttggcgcatcgcaaggtgtgaggcaggcgtaactgggggctggacgtgctgccccagccggaaatgaggcagctggtgccagcagtgacacagcgtgaggagagggtgaggggtcgcacagcccaggtgataggagactggcgatgccatcttcaccagcatgatgtcattgcggtggtctttgttggggaggctgttgttgaagccggggtgggggaaggactcagtggctgtccagggtctgctcacagccctcctccttctggaggttgtgctgccccaggtgaactatgtagcggggcttgaggcagtgggctgctgtcaggagccatctgggggcgatgagcgtcgccccacagagtagccgcgtcttctcgaacagggctgcctgccagggactgggagtgaggcttgcactcg

SEQ ID NO: 131988 - DNA, 710 bp, Homo Sapiens
  misc_feature (594)..(594): n is a, c, g, or t
  misc_feature (662)..(662): n is a, c, g, or t
  misc_feature (669)..(669): n is a, c, g, or t
tttggtggatcaaataaagcacatttattgtagcgatgtctgaacttttttcctatgtgttaagagaaaatagtgaccgctgtatcacaaaccctttcaggtcacaccgatcgttacaaattcctccatggagtcaaagaaaagacagtaggaaaggtaccgctctctgaactttgtacaaaataattcatataaaaaggaaaaaaggtaaacgtaccataaagtttccctctcaattccctaaggtttggttacaaaacttgaccaaatgttctaagtataaaaagtacagacgtcactctgcacaactcgggaagtctaagtcttgtttttcctaatacaaaagaaacgatcatttccctttcctggccctgcaggcacgtgagctttctgcgtggctgaagagcaccacactgagctcctgctaccagagatgtctgcttttgcccctaacgataaaggcttctgtggcatcagtggtgtcactcccgctgggcagagttgcggtggctctgtgagccgacaccatgtggagcagtgctgttcacagcccagcctacctgaccacagaaacacccacacagagcttctcanacagctcagcaccagcactccacgtgtctaccctgatcccaggacgcctggacgacatcaaaattcanacaggantaaaactcacaaacacactcattggagtataagatgtgggc

SEQ ID NO: 131989 - DNA, 1033 bp, Homo Sapiens
ttttttgaaaaaagatcacagaataattttatttataatgaatgttattctctccagacttcaactcatcagtttactcttataacagagaatcaatttaaataacaccatcaaaatggaatgaatataaaacaatctgctattacgtatcgatttctttgataggatataattatagccaattagtcttgcaacacatggtccatttccagtgaaattctcaataaactgctaggaattacagtccttcatattgacattttattgtaaagtctgctagacgtggctctcttgattgctttggaagtcagtcaaacaaatgctctgaagaaaaggctgacaccgcaaaacaacttcatatgaaatctgtccacaaatgggatagcaatgcctccagatcctttggtttttatcagtccctttggaaagttaattaattgatgattgttcccttaaaattctattttaaataggacaatcactgtctatacagtctgtgccagcgtccttgactttcttgcttccactgatttgtttatcaaatcatacagtgatggtagtcttattttatccatatttttgctgtaaacattaagaaatataccaaggacaactaacaaaccagaccatacatactgaaacgtgaatggtttagcaaagaatataaacgaaagtacaatggtcattgcttttcttcctgttgtcactgttacagcaataagtgcaccaaaaattttaatcaaagccagaacaaaggagattccaaaatatccagtgagggaaaaaaggaacgcataaccataggtccgaactggattctttgcacaaaatgttactgcagggcctaatccactagtgcatgtcaatcccagtaaaatgtatacaaaaccaattgaatacgaatacaataccatttcagaattagaagcattatgaagtttcatagctttctcttgaacatttccaatgacggcatctgcacatagtgccagggaaataagcaccacaccttcaagaaggtattaaaaaaaca

SEQ ID NO: 131990 - DNA, 1518 bp, Homo Sapiens
  misc_feature (1266)..(1266): n is a, c, g, or t
  misc_feature (1272)..(1272): n is a, c, g, or t
  misc_feature (1278)..(1278): n is a, c, g, or t
  misc_feature (1282)..(1371): n is a, c, g, or t
  misc_feature (1380)..(1381): n is a, c, g, or t
  misc_feature (1395)..(1395): n is a, c, g, or t
  misc_feature (1423)..(1423): n is a, c, g, or t
  misc_feature (1454)..(1454): n is a, c, g, or t
actgaaaagaatataatccaatttttattaaaaatatgaaaatgaaccctatacatattcatgagtaaagaaaaatgtacacactgttaacactgatttcctcacaggtggtactgagggagaagaaagattaatatttttcttcacacgtctccattttgttattagtatacctaaataatacttcataattaagaaaaaatccaatacattaaatcatcaatctattcatatttaaatgtcaacaaaacacatctagactttaagtccatgctatattttctgagaccctagagttttaaaaatttatgcaaaattagcatttttactccatgcccttttgttctactaatgaaactgttcatattccatgtcaacctcctatttacaacttacatccagcttttttctacctcaaattctagttacttgatgtgactttgaagttctgaaactgtattcagaaaaaaatgtagaacaaaacgacataaaggccctgcagaaacgtagctggtgattaaaactaagcagcagacgcttctatataataacatgtttattttgcacttcataaatgcttacagataaaaatattcaacagtacctaacgacaggtcaaaatatagggtgcacatacagcagtgccttttaagttgaagttgcagttttcttattgtttatacttgacaacatccagcatatgaattttaaataatcctaggaactctgaatctgaggtaaagagtgcccaaaatataaatttcagtcctattcacaagtatctaagtaaattttacagagaagacctcaatgtctcttctcacgccaagctaatttttctaatgattctgtgctgtccagtttgacaccccaaaagatcttcctgagtttaaagagcattcctgttcctaattttccttttattaaacagtaacttttgtcttgtctcatcctttggataacgtcactaatggctccatgctgtgtacactgtgaaccagttcctcatgtgaggattgaagaaggtttctgcctgatggaggttgctgaattggatttggatcttcacaaacacacatatttccagaagtttaaaatcacattttgaattgtgtatcactctgatttgaacactaagtttctggggtgagtttcatccatgaaactttggtgtagttgtcattcaatcgttttccattagatttctattgccattgtcaccgtgcttacctatccggcttaataccctcgtgccgaattcctggnctcganggccanattnnnnnnnnnnnnnnnnnnnnnnnnnnnnnnnnnnnnnnnnnnnnnnnnnnnnnnnnnnnnnnnnnnnnnnnnnnnnnnnnnnnnnnnnnncggagcatnnaagtgtaagctggngggtgctatgagtgagctactcacatanttgcgtgcgctcatgccgcttccatcggaanctgtctgcagtgcatatgatcgcaaccgcggagagcgttgcgtatgggcctcgctctcctatga

SEQ ID NO: 131991 - DNA, 1048 bp, Homo Sapiens
  misc_feature (969)..(969): n is a, c, g, or t
  misc_feature (1016)..(1017): n is a, c, g, or t
aagaattcggcaagaggcggcacgaggtcgggggctcaataaaaacttttaattacatttcagagacttcgtacagtgcaacagtgaatattcactgttaattttcacaagagtccatttcatcaaacgttcagagagtctgccttttcattcccttgttcctcagtgctccaatcaggtttccagtctcccagaggtttcttttagttttgattaccgaccaaaactccagtttagggagaatggaagtccaccgtcccatccccaccaaaacatatttcagtcaaacccaatcccagtccctaaagaattaggaaagtatgggccaagggtccttttaattatacacacatcacccttaaaactgcgtgtgtgtacgagaaataaagaaaaacacaagaggggctgtaaaatactgcacaagacaacaaaacagaaggaaagtcttgagggagaaacactaagacgcgagcggcaggatcctacctcctgtccgtgacactccccattgacaccttccccactgtgccatggcggggaaggactaaagtcgagtctctagggtctctagaggtcttgctaggatgagcttaaagagatggggtgagggtggggggaactgcttccattatatttgtggttctcagggttaagcagtgaggaggggcaggaagattcagaatgatccgtgggtccaaccctttggatgtgaacattcctggatagaaactggaggactctcttgacaaagtgcaggaagggatacacacaaataagatcaagtgaaatgggaaaaccctcaaagagatcaagatgggcagtggtggtggtgaaggtagagaagtggttttcagaacctgttctgggcaagggtggagatgtgcggcagcatgaagaatatcaaggctcaggtagctagcactttcaactggcacatggctttccagggggtggacaataggttgggangatcatcagtcaccctcgtgcgatctggctcgagggcaattcctaannggtcgataatcgtatcagcaagcgttcctgg

SEQ ID NO: 131992 - DNA, 915 bp, Homo Sapiens
  misc_feature (839)..(873): n is a, c, g, or t
caggttttcaattcaggacaaatgtttaatttgcttctccatcaaaaaagacacacaatattttctaaacagagaaaaaagctatgaattgaatattgaaaattttaaagtatttcaaataactgattaagaatgtgttatatacataattgttctaacagtaagactttgtaataataagctgcacaacagacagaattttattcctccaactacgaagtacttgtttctgggcatccaaattttcataaaccttgaagtgggcactgacgctgtaaatgtaatcctaaaataatttatcttccttcaaaaatctctgccatcgtgactttacataccacacacaaaaaagaatacctggaaataattcaaatgtataacaacaagtgtatgtcatacataagaatactatacagagtttaaaaagaaaactagatctacattgttaacatgaacgaatattcaaaatgaatgtgtgaaaaatgcaagctgcagaatacatgtaagagtacgacatccactgtgtaaagtttaaaaacacacaacagactacatattatttatggatacatacatatgcagaaaaggtataaaagcatgtacacaaagaatacacatcaacttcagaatagtggttacctatgtaggggatggagaatgtaaacaacgggatggatacaaacaagctttaactctatccataatgttcaatattacaaaaatatttgaaacaaatatggcgtaacattaacattgttaaatctggtggtgttacagtagacaccgaccccggccgtaatggccgaattcccgggcatatgtccggtaccgtcgactgnnnnnnnnnnnnnnnnnnnnnnnnnnnnnnnnnnncggccgcttcctcgctcacaaactcgctgcgctcgtcgtttc

SEQ ID NO: 131993 - DNA, 827 bp, Homo Sapiens
  misc_feature (40)..(41): n is a, c, g, or t
  misc_feature (57)..(57): n is a, c, g, or t
  misc_feature (85)..(85): n is a, c, g, or t
  misc_feature (105)..(105): n is a, c, g, or t
  misc_feature (122)..(122): n is a, c, g, or t
  misc_feature (126)..(126): n is a, c, g, or t
agcaacatagaatgatgtatatgtttttgtatctattatnntcatcaatacagtatntgatgtattgcaaaaatagatataattnacataacagttttctgttantagattggttcaagatntgtntgattattgttcctgtaaagaaaacaataataaaaagcttacctacataaaatttcaatgttttgacacttaattgttgtttggcacaatagtatggaagtaattcaaactggtaaatagtttcctctcatatctcgggtatatatacataccatattttattgatccagagatacttatttcactttgtgacatctctgaattaggatgcatcttacaactgatggcttattaggtttaatgaaatacagaagatacacagtataaaaagggttttcctgtggttggtttgtggtttgtgataggtgttctgtgatgtttatgctttgaaggccttaagactcatggttgcaaccatggaagcaaaatgaaatttttagctcttaacctaacaacctgaccatgtttatccatttttattgtttagaagtttatttactgatacttggtggaggttgtgtgaattagttaaattttaaatgtttaagacttctattaacagctgcaaaatatgaaagtaagtgcactcacttttcctgtagtagtctgtcttttgaattcacagcagttgtatccttgagttactttgttaatgtatttttctcagtacatttaaccactgggaaatgaacccttgtacgaatgtgtttcttcttctctgtaggaataaaaaataaatataaaaattttatttgtattgc

SEQ ID NO: 131994 - DNA, 1495 bp, Homo Sapiens
tcccgggaatcgtcgaccacgcgtccgatgttattgaagaactaatgaacaggtaacatattgtagaaaattagtctttcattgttttcttctgtgaagaatctgttgctatgtactgtatattcagcatttatatttggtttgtttcatagctaatgaggtatttagatatgaacaactgaatacatattgaaatagtgtgctggcttttgtagttttgataaagaccattgcaggcaatggaattgtgccagagaaatctgatttctagtacaaaaggaatacttagccagggcctcaagctcaagatacttattgaaaacatcctcaattgcaataaaaacattataacatgaaaaagagtgattttttgaaccggtgatttaaatgtattgatctgctttgaattttcaagcagccagaattttctagtttaaattggcagagttataacaaaggagagcctcaaatattagacaattgcagtgcggctttctgggcacaggtgtcactgctctgccacctatcactattctttttctgttcagtttttctctcaggtgtttgctgggaaattaacactggaactgacccttttctggcagtgaatgtaagctctagctcccccatctactataaagaaatgtcttcgagatgtagaaataaggaatattctgaaaataaaaattatacagtagtaaagataattcagaaagaaaaagctacctgttagaatttccagtctaaatggcacagggtagttacggagaaaaggggatggagaaggagaaactatgactaaagatgagaggtatgaacgagttgtcaggttcctatgggcttaagctaggacaatcaggccctaaactccaaatttggataaaatatctctttgcattcttcttggccacctgcatagtctgacacatacgtatgtacagttagacttgcaggctgcaggagtgccctgcattgttttcttttaattagaaataaaaagtattagtctaaatgtggttctggtgctggtgccctgtatatatgtaacaatataggacccctccaaataggttttgcttctggtgaatcttggtcattgggttagtatatgactgtctataatattttccatttgtattattatattggggaaaacattttttatcattttctattaagaaaatggaaaacttaaatatggtgttaaaaatggaaatatatgtgatatttgcattattaaacccctttgcagatctaaagtctcagggttccactattagtggttaaagtactgaataatgtctgggtctatttccatctgtaaaataagaatatttgtctcacgtgtctgtcatgaatagcaaatgagaaaatgtatataaaagcactttgtaaattgtaaaagtagtacagatgtgagcttctatttgtttagaagcataaatgtgaattatatacagtttgaattttgcataaattttttgtgtctaatttt

SEQ ID NO: 131995 - DNA, 1297 bp, Homo Sapiens
ccaccaaagtttatttctctgaaacaataaccagttgctgtcctctatggcacactgagagccccaggagggtctttaactcccttcctcagattatattcatcccagaaatatagccttggacaataatttggttacagcatagtcccaggaatgaggtcccccaagttgctaagttttacataggggagactgggaaattcaaagaattggatggagaaaccataggatccaagataatgtcagggggttgaagatgttggagaggcatggtagcatcattgagtttgaatctccttctcacttggagtggaagttgtaggattctgcctctaggaaatgtgccatctagagtggccagctctccgccagctgatcacaccaagagagaagatgatgaggcccaggcccagagtcactgcagacacagaaaccttcagggtctgcatgggggacagcccaggtgtccagtcccgaaggatgggctcaggagccccaatgtgctctaccacacaggtgttagtgtccccgtaagagggggttaaggctaaatgggagagggtctggtatgtccagtctccattgggctgggcagtcttgtgcgcactgctgtgaggcatgacaagcttcccgttcttcctccacgtgatagtcacttctgctggatagaagccccacacatagcaggccagcatcacaggctccctcgtgttaaaaggagtggttttggctacttgcacagatggtggccgtgtcctgttggtcagtgatccccagaagggctgggtgtgtgtggcacaattctgaagcccattgcgcaagcgctgcatcagggtgtctttttggttgaggtgctgtgagaggacattcgccaagctattcagcaccccaaattcgcaaggggccatcttattctcctctggatcccagcaggtcagcagatccttgttgaaggagatgcagtatgtgaaatcctttggagtcccagcatcatccaacagacaggtgctttccacatgggccacgaagccacctgctcctgtgcagcccaggctgagccccagcagcagcggcaggaatgtgatcatgctctgctctgtaaagatgccgggagttcagtccctggaccagctcttccagggtccgtgggtcctcgcctgtcccagaagccccagcctgggtagatgatctccagacactgagcagaatactatattgcccgggtcccttgaccccccaaatgagtgatgtggggatacccagcccctagatattaaatctgttccttccagctcac

SEQ ID NO: 131996 - DNA, 584 bp, Homo Sapiens
ttatttccaccaaagtttatttctctgaaacaatcaccagttgctgtcctctatggcacactgagagccccaggagggtctttaactcccttcctcagattatattcatcccagaaatatagccttggacaataatttggttacagcatagtcccaggaatgaggtcccccaagttgctaagttttacataggggagactgggaaattcaaagaattggatggagaaaccataggatccaagataatgtcagggggttgaagatgttggagaggcatggtagcatcattgagtttgaatctccttctcacttggagtggaagttgtaggattctgcctctaggaaatgtgccatccttctgaataattggacccaggaagaggagtgtaactagagtggccagctctccgccagctgatcacaccaagagagaagatgatgaggcccaggcccagagtcactgcagacacagaaaccttcaaggtctgcatgggggacaacgcagtgtccaatccccaaagatgggctgaagaggcccaagtgctcttgcacacaggtgtaaagttccgctaagaagggggtta

SEQ ID NO: 131997 - DNA, 1023 bp, Homo Sapiens
  misc_feature (757)..(757): n is a, c, g, or t
  misc_feature (788)..(788): n is a, c, g, or t
  misc_feature (796)..(796): n is a, c, g, or t
  misc_feature (804)..(804): n is a, c, g, or t
  misc_feature (822)..(823): n is a, c, g, or t
  misc_feature (828)..(828): n is a, c, g, or t
  misc_feature (864)..(864): n is a, c, g, or t
  misc_feature (873)..(873): n is a, c, g, or t
  misc_feature (901)..(901): n is a, c, g, or t
  misc_feature (924)..(924): n is a, c, g, or t
  misc_feature (939)..(939): n is a, c, g, or t
  misc_feature (986)..(986): n is a, c, g, or t
  misc_feature (1001)..(1001): n is a, c, g, or t
aacatgggtaaagtcttatatattccttttaaattaaacaaccagttttattagtgcatgcactgaactaaactgaaagaaaataaacttatgccaaaaatttctgtgcaaaatttacataaaaggtacaaaaatatgtacagacttaatttgttatatacagaaaagaagccctgaagttttcatccattaatgaaaatgtcattaacacttgtaacaatgtaacaaaaaatcatatagcacgtaatttgttaacacaagaactccattatccaaagaaccagcaaaatttgatccaaacttacaaggtgaaaaatctaaatctatgattctgttgtcatcatgaaaacatccattttaaaactctgttgggcatgtcccttaggaatctatcctaaggttttatgcactgcctctgggtccactattgatgcttccttttgcaaatgccaacaatctgtatatatgttttgggttgtcagtcacactgagaagcagctaacagaaatgctttgtcctaatttggacatgttcaaataataaagtgaatacagacaaaaatatgatcttgcttcaaaatactgttttggtaaacaattttaattttcaagaaaagccactcccttggaagtgctcctatgttccactctttttaaagggatgggaaccaagaagaaaaaaatggccatttgtttatggaggacaaacatgagataagcatagttctgtgcaaagggatcatcagagaatatatcanatttagaaatatgttcaagttctttaaccanactttcantgagacanagagtttaaattcttctnnctgangctgccatctactgcaacatttgacacagtcacttnagaaaaganatcaccttgggagagtgttccaatctcntacagtgacagagtcaactgganaaaatttacttgcanaactccctcagcatgtagggtgtactgtagtgagtaatgtacttcangagctatatcctcanatactatattacccagtcttca

SEQ ID NO: 131998 - DNA, 1289 bp, Homo Sapiens
tttctcatttcaaaatatttaattttgtctgaaaaggatacattcccggcttccctcccaccacatcactccggcccaccagcagtgacacactcgcacgcacacacgcacataaggccaatgggctacggtctgcttctgccctctctggctgggaagaaggaatttctctcttgcctccttcccccaacaaaggtaaagagaggggcccgctggaatgccagctcccagggaaggacacagagccccacacactctatcacatcacatgcacttagaaaaataaaaccaagtggtgttctggcatccccaacaccgtaagagagcaatatccacctggaagtcatctttgccattttctagaaaaatttattgcacttaattagcagatgttaaaggagctctggagtagagctttgccatgaaaaccagatgctcctcggccctttgcgttccaaggagcacggctcccggggcccaggtagagggctgcccagcttcagaggggttttcccccactggcttgcatgcctcccgccctgcctcaggccaaaggaccgtaggagcggcctgcacagcccctcagcagggttacatgtacccagacttaaggttcactgctaagtgccccctccaacctcagaagccagacaggaaaacctcttcctttggccaagggtaagagttacccaggtcctccacaaagttgccataaaccttgaaaactctccctctctctaaatgcacacgttcctccatcagatgagacatttataatatgaatattcttgcaaagttccagctcattcatgatttgtctgttctgaggttgcactgagggtgccacaaagctttagacaggatgcttaggaagtagacggcacttccaagcccatcgggaacccacagaaagccaaggtaaagtcaacttctctagcctccagtgactgacagatgtcaaagatccaagcacaggagccgcagtctccagcggtcggcctccaagaagcagagggcccaggagggagccgaggagactcccattccctcgacagaaactgagcaggcaccaaccctctcctgcaagcatggatttttttaggacaggagaggagacaaccttacctgagcacttcttttcccccacaggtcagcctctgtggacatcctccatcttgtccccaccaggctcctgactcagaggggcatttcgaaaagagtccagcagccacactctttccaagtaagcactttgggaaagaacccgatatcccgggaattccggaccg

SEQ ID NO: 131999 - DNA, 1080 bp, Homo Sapiens
  misc_feature (379)..(390): n is a, c, g, or t
  misc_feature (532)..(546): n is a, c, g, or t
  misc_feature (1021)..(1021): n is a, c, g, or t
  misc_feature (1064)..(1064): n is a, c, g, or t
atctcaattgggaaaaatctcacaattattaactcttctcagttacatctattttgagtcatttaaatctactatacaccagtttgtaaaattcaccttggttacctctccccatgcctatgtgctgtctttcctcaggtaagtccattatatgcatctaagtgctggggaggtttaaatagcacttaaagaatattcatgagagttctgaaatgaaggtttcgtctttagctattgactgtaggatttgtaattcaaatcatcacagcatcctaaagaaatactgtgtgaatggaatgcacacaattcctacagaacacacaaactgatgtccaaaaggcacagagtaatgctggtggctctttctagtcagttaagnnnnnnnnnnnngtctgcattattctttcataatttaaatacttaagtaatctccactttattattttataacaatgacttcaaatttacattattttaagtaccattgtaatagcttagtgtataatacagatatttgcgaatatcccatccnnnnnnnnnnnnnnncttcttcactatatatatatttatataaaaattattctgaaagacacgaacatatacaagggacttggtacagaccatcaactcaattttctatcaccacagttgtgactccaaaatcaacaaatatacagcagtaattaaaagcagtgcaaatatctttggaggttaggataaaattatattgcaagaacataaaactgaggaaacaaaaagggcaagtacttcaagtacaaggaaccagtcggcttgaggtccatcttagtgtttactgggggcttctttcctgcttctacttctttctctgaaatacattggccaacatggcacctgatgttgtcaactggcccattttgttcaaaaacttggtctttgtatcttcactcactaagcttgcagcaattgacattgagccttgaggctcttggacggtcttgttttcaactttttgttcacattcttttatcatggaacttancataacctcatgctctggagagagatgttccatgtcagtccgntaacatctgagaccag

SEQ ID NO: 132000 - DNA, 1022 bp, Homo Sapiens
tttttactttcattagtgttttcaatagtgtgggcgcaggctcagaaggtggagaggctggcctcagaggacacccaggcttggggctaagtcccagtgtccatatgaagctgtttctggccttgtccgtttttgttgtcccaggctctgtgcccctcactcagtcaagaacttgtctttgtgttgcttcttggggacatgctcagggcagaagtcagagcggaggaggcgggaaaagtagattatgatcatcacgtccagcatgagcaggatacccagcaggaaggtgcccagggtcctctggttcacataacgcaagaagaaatgggtgaggtaggcctgaggggccaggcggaagagaaagtacatgaccaggttcacatacttgttaacccggtagaggagatgatcctgggcattactgattttcatcatcatgcgaatggtgaggaagatgttgctgacttccaccagtagtgttaagacacccccaccgacaaagctgctccaaaagatgccggagaagaaggcacccatggccatgacgtgatggacaaggtattcccaagaggctcgcgtctgtccgctagccacgatgtccaccgtatcgtggatgaaataccccgcagagaagcaaacgagcaaatagccagaaagtgaccacgccgtctcaatctccactaacatgtcaggagtctgccatacacacagcagtgcccagatccccgacacaatggagtgagcgaaggagacgagcaggttgtgccagcgccaggtgcgcagggggtcggcgcgcacgtgcacgggtaggggcaggcgacagagcgcgcgccggagcgcccggaaggtcagcgctggcgcccaggagcagcggcagggcggggtgcagcagtcggggcatgctggccctccctgccgtccgccctcgaggccgcctcctaggtctgttctgggaaccgggatccctctcgggccagtccaggccggccgcctctcccgccggccgccagccccacacagtg

SEQ ID NO: 132001 - DNA, 764 bp, Homo Sapiens
ttttcaccagtgaagcaggagttttattgagttcctccatgtcacattaatacattagcttcaagacacagtttcaaagacccgggtccttctgacgtagtgtgttggaggcagctaggccagcttgaggcactgtgtgttgaagctgtccccctccttgccggcgacagcctccagcagggcctgtttcttctgcatgctccgtgaggactccagctcgtacatggtggtcaggttgaagagcacgctctcgtgcaggtagtgcctggggtcctgctggaccatggcctccagctgccgcagggagtccttgagcttgcccaggtagagcagacacacggcagcgttgttgttggccactgcgtttcttggatccatccttaagatctctgtgaagaacctgtgggcttctgcaaagttattctgcccgaggtgaaggaacgcgctgttcatcaaaaccatgattttaccctgtagtccatctaatttctgtgttactttctcaacgtcttgaaaatacttttcagctgtttttatgtctccaatctgcgagggaaatccggccgatgccgctgagcagctggggctcttgctctgggtaatacttgataaccgaatgatacgcctccacggccagcacataatccttcatcaggagcagacagtttgccatggagtacatcacccggcccagacgtgacctccacagccggatagaggcttgtctgccctcctgagtcacgctgctcatgccgccgtcttct

SEQ ID NO: 132002 - DNA, 655 bp, Homo Sapiens
tctaagttttcagactttccgtttccaacgagaagagttcttctcttgacagccttgcagctaacgtaaaggttatcaaagagccagatgaacggattgttttaaggagtgactcatcatcatgtttagattcaagtcagtttggaaagtcttcatccagtaaacaaggggatgctgatttccacgggaaagcttcatttgccacctaccagcattccacctctcctggccccttggatcagccccttctcagagaaaggttccatcctggttctcagtccacatggaagaatatccatgagagggtatgcagtcttctgacatcccacagagcacagctgcaccaaaacaaggaagattctacctctgaagtaaattatatcattgaaagaccaagctaccctctgaagaaatactcactgcatgaacagagatatttttaaggtactgtcttatgggaaattaatgaaagcttaaggagaatcatgaagagctcactcactgagacaattgaagcatccttaaagaaatgaacactttttgttgtctgtgttgagtcactgatgtctaatcccctttaaaccaaaccctgtactcagtcttttgtgcccaggtaagagttgttgattaaagtgtttgctgtttgggggctcac

SEQ ID NO: 132003 - DNA, 690 bp, Homo Sapiens
  misc_feature (633)..(633): n is a, c, g, or t
  misc_feature (675)..(675): n is a, c, g, or t
gtggggcaggccgtctgtctgagcgggactgcagctgatgtggacacgggcctccgtggagcctcaattttattacatttgagtaggaatgactttgtgttataacatcaaagaaagaatctgaatgtgagggaactgcagaaattaaactttcagtctgattctcagaatgccagagtaagatgaaccctttacagtaatagtgaaataattcgggctcattttcagtagaaactcaagctgcttcaatatggaaatacaattttgacaatacaaaaaaagaaagaaaagcaggggtgaggccccacacttaagaggaagaggccatcgcagcatctgtgccctgggcttgcctggcaggggtgacgttcccgcactgagagggaggggccatcccggcatctgtgccctgggcttgcctagcatgggtgaagcctcacactgagagggagaggccgtcccggcctctgtgccctgggcttgcctggcaggggtgacgtccctgcactggagagggagaggctgtctcaacatctatgccctgggcttgcctggcaggggtgaagcctcgcactgagagggagaaccatcctggcatctgtgccctgggcttgcctggcaggggtgacgtcnctgcactgagaaggagaggctgtctcagcatctgtgccctgngctcgcctggcgtac

SEQ ID NO: 132004 - DNA, 724 bp, Homo Sapiens
  misc_feature (304)..(321): n is a, c, g, or t
actggaaatgacttttaacggcaggttagtttaattttatagaagaaatatttttcaaacagtacaaatgacacaattagagagaaaagagtgacaaaaaacaaagagatgaatactgattataacttattcccacaacagaaggctacttatttctacaattatcaatcaaagcctgacaattcagtgattagatgaagtgaaagccaaattcccttttacatgtggtactatttcaaaagaaccctggtggcaggatcctgatggttttgagaccagaactgcttctaaaacctggcagcgnnnnnnnnnnnnnnnnnnatcgcgaggcctggtagatggacagattgaaacatagatggaaacacctaggacttcacttttctggcatgtggggtattttctggggttggcgtggcagtctgaactagtcagaagctccaagaccacgtcatgaatgacaagcaacatagggcgcttggtgtccttctgcctgctcaggccacctccactgcctgcatctgcacctgcagagaactgcgcggctctctggccttcctttgtcttttctttccttgtcatggctgcattgagctgcaaaagcggacacaggcagggaggcagggggaggttcaaaggtaaaggtggcaaacacgagggctccttggactgatacggaagcaggcactgcatctgtttcttgcaggctatcagtgagattcta

SEQ ID NO: 132005 - DNA, 1757 bp, Homo Sapiens
ttagggctaccagaaagacaaagttaacatctcaggaaccaggcagggctggccctgcagacgctcacagaaatagcagccagagatgccctaggctggaagctggtggtggcacaccctggcaccgtgggcccatccaggaacaactggtaactgagaactgtttaagttccaaagcttatgaatgatttccaccatttacattgttttatattgatataacctagagaatgttccaggttaccctatagaggcagtgctcttgcttgtttacatgccaaagtgctctgtggaagaggtgacgaaagggtggcatccctgggtaagtaagtgcctatgaagaagtagcccaaccaatggctttgcagcacacaatgtcccagtggggaaactgagggccagagaggggaagggacatgtccaaggtcacatggtgatgggacacccagggctgggccactggtccgtgcctgacctccagtgggtctgccagccaagggtgaggaaggctggtggggaggggaggtggccaagtcaggcttccccctccacctcgtcctcgctggcacagccctcggacacagctctgcgccgggatgcccgcctctccaggtactctgccttaagctgctccagctcccgcagctcagcctccagccgctcccggtggaccatgcgcagctgccgcagctgtttcatgcggaaggggttcatgtcattgaaggcgatgttcatcagcttccggctgttggagatggtcttggtgaagaagcgcaggtactggtagatttccaggccattctgtagcctcaagatctccttctcgttgtacttgaaaatggccaaggcatagcgaaacaccaccttcgtcccctcgtacaggaaggcatcccagacccgaaggaggatgttgctaatgagactgtccgcaaagaccacgaggaaccagttgaaggtgacgagggagagatccacgtggtgctgccccagatgggccatcagcctgggcagcttctccgagagcaggtcctggagcacccgctggtccacctgggatgccgtcagcgtgttgcagtagtaatcagcgggcatgatggtctccacaatggccaccaggcaccagaaggcgctctcctcctcctctaggaccagcagggcaatggccgccagcctgttcaggccctggcagtagccgatggtggggttctgccaggagaaggccagcagcacccggcggagcttgtcggggaagctggaggtggggcaggtgaagtgtttgttgttggggaaggtccggttcaggtccagctcaatctggcgggcagcagggtgttcgcgggcctggccccggctcagcagttcctggtagcagcctggagtgtgcaggtgctggacacggaggtggaccagccacctccagacacgaggccggtgttcacggggtactcctgcccgcagtagctgcttgagctcggctgagggcacaagatcgcccagggcagcccagcgctccctcagcggccgatccacagcctcgaggcccagcaggtggtgggatcgtgactccaatgcctggatcttggccagcagcttcaggtcttccacctcatagtcgggcaccgtcaggaagccgtactcatcatacttactgatggggctcagctcgatgctgtcagatgaggcctccccagcttcccactgcagtgcccctcgtgccgaattcggcgcgccgtcgacttcatactctctcccccata

SEQ ID NO: 132006 - DNA, 1638 bp, Homo Sapiens
  misc_feature (1094)..(1094): n is a, c, g, or t
  misc_feature (1114)..(1114): n is a, c, g, or t
gaggcctgggtggcgaattcggcacgaggcgagatttgtccctggtggtcccgcggacccctcgtccctccgcagtctccggctggcagcgatggagggcgctggggagaacgccccggagtccagctcctctgcccctgggtccgaagagtctgccagggatccacaggtgccgcctccggaggaagaatcgggggactgcgcccggtccctggaggcggtccccaagaaactctgtgggtatttaagtaagttcggcggcaaagggcccatccggggctggaaatcccgctggttcttctacgacgaaaggaaatgtcagctgtattactcgcggaccgctcaggatgccaatcccttggacagcatcgacctctccagtgcagtgtttgactgtaaggcggacgctgaggaggggatcttcgaaatcaagactcccagccgggttattaccctgaaggccgccaccaagcaagcgatgctgtactggctgcagcagctgcagatgaagcgctgggaattccacaacagcccgccggcacctcctgccacccctgatgccgccctggctgggaatgggcccgtcctgcacctcgagctagggcaagaagaggcagagctggaggagttcctgtgccctgtgaaaacaccccctgggctagtgggcgtggcagctgccttgcagcccttccctgcccttcagaatatttccctcaagcacctggggactgaaatacagaacacaatgcacaacatccgtggcaacaagcaggcccagggaacaggccatgaacctccaggggaagattctccacagagtggggagcctcagagggaggagcagcccttggcctctgacgccagcaccccagggagagagccagaggattctccaaagcctgcacccaagccttctctgaccatcagtttcgctcagaaagccaagcgccagaacaacaccttcccattcttttctgaaggaatcacacggaaccgaactgcccaggagaaagtggcagccttggagcaacaggttctgatgctcaccaaggagttaaagtctcagaagggagctagtgaagatcctgcacaanggcactgggggccgccccgncagggagaagcggggcgtccagcgcatacctgggcggcggctgaggacaaggaccggctggagctggtgcggcacaaagtgcggcagatcgcggagctgggccggcgggtggaggccctggagcaggagcgggagagcctggcgcacacagcgagcctgcgggagcagcaggtgcaggagctacagcagcacgtgcagctgcttatggacaagaaccacgccaagcagcaggtcatctgcaagctctctgagaaggtcacccaggacttcacgcacccccctgaccagtctcctttgcgccccgacgctgccaacagggacttcctgagccagcaggggaagatagagcacctgaaggatgacatggaagcttaccggacccagactgcttccctcactccgagatccaccaggtcacaaagatctgggagaaggtggctgagaaagagaaggcccttctgacgaagtgcgcctacctccaaggcagaaactgcccaggtggaaagcaagtacctgggccggtc

SEQ ID NO: 132007 - DNA, 726 bp, Homo Sapiens
  misc_feature (501)..(501): n is a, c, g, or t
  misc_feature (656)..(656): n is a, c, g, or t
ttttaagaatgaaatgctttttattttctgtcttgagacaaatgccatcagttatccagctggcacagtgaggccacccctcggtttatccagtgcttctggggcatgtctgttggaagctcaatggagaggacatagttggtagagtggcctgtggtggagagggttcctctgcgggcacttgttttgtagactggacacacatagatgtcctgatgcagaaacattgcgctctccccaggtttcagccaaatgatgggcagtgggtcatagaggattttggggagagattccccaatctgcatcgttttcctgtcccaacgggcaccttctaagaagagccctttgatgtaggccccatcttcggggttattctccatcactgtttcttgtggggttacctcaaactcaaatccaatgtggtcaatgggggatggtatatttccgggcataattttgagagacgccagtcaaaaaagactgtgtgaagttgaatccagnagatccaaaataccacagggggcccctttgtcaatccattcctggaagaaggtcaggcgggccagcaggtcagccacgtagccccccagaggcttcagtgatgggtaagacttggctgcccacatggctggcactttacccacaagcatgctgtntaagacttcctctagctccgaggacatcaggacctgtcctttgatggctcggccaagattgatgaggctc

SEQ ID NO: 132008 - DNA, 521 bp, Homo Sapiens
ccatttaacacatttaaggattttcatggtgttttattgaatgaaagtgtttcttgagatttgtacagaaaagcattatatagtattatgtggttcttaaggtttaaataagtacatcaggataaatttttaaaatatgtaataaataaactaatttaagggggttccatgtgaatcgttttcttaaaccatcatccctaatttaatttcataggttagttgagcatcaagaatatgaaactgcggcccaagaaacttggtttctaatcatgctcctaccaatacatgatcataactgatcacttaacttctgtgtttctcttccctcatctgaaaaagagggatttgtatggaatgattttaaagtcacttattcaaaaattctgtatatctatgaaatcctgatttttacactgtggcaaaacctgccagttgaccttcagtatcacattcttccttcttagttagtaataagcctcctgatttttagctaggcatacagcctcccaaatacacactgt

SEQ ID NO: 132009 - DNA, 691 bp, Homo Sapiens
atttgtttttaatttattttgtcatatttttgtaaaacggcagaaatgcaataaaaactatatttcaacagtgcccgaggtcagagcagtggaaaagggagtgggggtgggggagtctgggtggctggggcctaggttgggaaccccctccccccatcctggtacaggctggcttgacccatgagggcctcctcccaaaaactgggtcttggccacagatggaaaactccaggctgcgccgcctctgagacggcccagatttggaggccaacttcagccctggcttcagccactagacaaaggaaggaatctctaagtgctgaaaagaggcgacaatgtgtgcacaggccccagtcctgagtaagactccttctcaaagaggacagcgcggtggtttgcaagacgtggccccttctggcacacccgcctcctggaacatcgtctggggagccagagacagtgggaagagcttgtggcatgaacatcagaaggcacctggcacctgagcctcctgcagtccccgacttgtgatactgagagaatggcacatttgggtgtccccaggacacggggtggcattgggatgcagcagggatgtcccactgtgggacagacatcagacccaagtcactgggactctgtcgtatgactcaggaacaggaacgtggcctctcagaccctcacatttttc

SEQ ID NO: 132010 - DNA, 713 bp, Homo Sapiens
  misc_feature (654)..(654): n is a, c, g, or t
  misc_feature (679)..(679): n is a, c, g, or t
tttttactagaaaatttaaaatttttaataaatgtgctttgttcacaaaatgtgaaaaaatacaacaaacacacacgtacattttcaggtatgctacctcccaccacttggcaactatggtaaaaccacatgatctagtcatgatactgaagaatccaaccaaatgattaccatttgtttttgaaacaaccaaattattttggagaaccagctgtgaatgtgacaggaggcctcataacttctttatatccaaaatgaaataattcttaggagtacccatacagtattagaaggccctattaacttccacttgttattacatacatgatctggcatcaagctgcaatgactgcttatacttcaatacttatacactgaattggtttttgtggaatgtgtatcagtttaaatctgtgccaacctaattggaataagctgaatttacagtaacaaatgatataaattcaaacaaatttatactaagtggtagtaggttttataaagagacttcctcagagtactacgtaaaatacatcatgcacactttggagcataagcagaatcaacatctgtaaacaatcagaatttatagcaccaacattttcgctgttacacaaaggctgactccagggtcatactataccagcctttcanaagcgctgttttcatttactttcanagcattttcatttggtgtattgttttctttgctc

SEQ ID NO: 132011 - DNA, 721 bp, Homo Sapiens
  misc_feature (629)..(629): n is a, c, g, or t
tttaacgttttcaagttttatttttaaaatatattacaacatcacattaaaaacagtagaggaaaacaagcaaacatgatagaattacttttttccaactcaatagtacttagctttacctagaattttcatacagttgatgctaacttcttctgaaccctttctgactagtattttaccttatgtattctttatagtatttccatataatctttaccgagacctattcagagcataacatagacagggcagcacaagcaactgacacctttgttggtagtacagtgttttttcaaccagtttatgagagaatgaaaagaatgaaagtgaaaattttacttaacttagggttaagtagctctaggtaatctcttcagaactcccctgcttcaccttctcaagttaatcaacagtggctagtttataactagaaaccacttaccaaattgcctaaacaagaaaactttttaaaataacaatttgctgatctgtccaataactccaataaagttgaatttgctttatttttccaaaaattatgttgtctaaagactctttgtaagtgtaaatgtatgatatattgagttgatttttagtccctattagagagttgttagacaagttattanagtttaagaaaatttggattctaaatttccacctggatacatatatgaaatattttatattttcaatatatacttacttatattttgcacac

SEQ ID NO: 132012 - DNA, 1068 bp, Homo Sapiens
  misc_feature (131)..(131): n is a, c, g, or t
  misc_feature (174)..(174): n is a, c, g, or t
  misc_feature (179)..(179): n is a, c, g, or t
  misc_feature (182)..(182): n is a, c, g, or t
  misc_feature (193)..(193): n is a, c, g, or t
  misc_feature (200)..(200): n is a, c, g, or t
  misc_feature (483)..(483): n is a, c, g, or t
  misc_feature (989)..(1009): n is a, c, g, or t
ctatgatgcatctgcacccgctccatttgtcgtcgttgtttgattgacgaacaatcccaggaaagttgaagatcgattatcgatccttaggattgcctgagccagatcgcagagctcagccagacagactnaccgagtgtgatactgccagagcagactgagtccagtccctcntgtcntcnccaccgtcccntcagacncaggtgtgtttctccatggcagccctcaggacgtgacagctgctccatgtagccacacccctttgtctcctccagtggggtgtttcctttgtcagatgttgactgggaccaggactcagcctgggccagtctaggagcccagctgagccctcctgtgtcttttcccttcatgctgccagcagggaagagaaccagtaggtgccagcccaggcaagcctgtggcccgcgtttctgtggctgtgggcaggagctgggccttgtgtctagttgggttttgctctgnagaaggggagctgtgcctgaggccctctgtgtgccgtgtgtgctgtggggcgggtcgccacagcctgtgttaaagtgtttgctcttcctctgctgcctcctctcgaggcagggggtccttggctggctgaggcagtgtcaccttcctgagtgtcctctttggcctctgcagaatctgacccctttgggcctggactccatcctgaggggaaaggaggatgcagagggtggcctctgggcacccttgtgggtaagcggggggcgggggcgggaaaaactctggccgccagtttttggctcctgcgggcaccaagcaggctcagtgtctgatgcctgacatctcctcctgtcctgggcctggaacctgcagctgagaaaatccctcaaccacctcgtctcctccatcgcccctgctgggccccccagcctgacagtgggttgtatgcctgcctctttccaccaactggcctgggcactgcccccaaaataaaggaactctgcactgcnnnnnnnnnnnnnnnnnnnnncctgagcaggcggccgcaagcttattccctttagttgagggttaattttagcttggcac

SEQ ID NO: 132013 - DNA, 1097 bp, Homo Sapiens
  misc_feature (181)..(216): n is a, c, g, or t
  misc_feature (364)..(380): n is a, c, g, or t
tatgtggatcctcactgtttgcagctcccaatgtttttatttttaaatgttatatacatctcaagggttaaccagaccctttcctccaaacccaacctttcatttcctacttcattccagcaggaggcacttaggggagactcggatggggacatggagaacaacccaagctccttaaacnnnnnnnnnnnnnnnnnnnnnnnnnnnnnnnnnnnnataaagtgaggcaggaaaatgcttctccttttaaaatcccctccactcctcacacacacacacctcttgaaacccttccccaagaatgtttctttatagacggacttcattgaaatctttgttgttcttgaatcaagtgtaatataannnnnnnnnnnnnnnnnaaaatattcccactcagcactcagagacacaaaaatactgtaagtctcaattaacagcagaatctcagagaaaagctgtttgcaatccaaatccagcctttggaggaatagagatggtcaattaacaatcaaaaagaggagattaacctcttgtttttttaccacctggtgaatcagccataacgcacacacacgccacccagcctcttgtttctagtatgtactttgaaatgctaactgagggtcttgatgcttgagcctttgactgataaaactcaaatagcagtccccagtgatttgcctcttaggttctttcttaaattgttggtggatgactgtacattttagtgatttgaaaaataactgacaaaccattgaaacagtttattttatgttggaagagatggcgcagatgtgtgtcagaagggagatcacggtgtgagtttcgtagctatttaagtgatacatacctctagtttttgtatgtcttttgagatcctgagttcatcccctgtgaatcagagtgcacaagcacctctcctgtgagtggctaatgagaagagggacagaccgaccaccagcacagtagggcagatctggacagcagaatgttataacgcaagttcatgtgttgctcccaactccattctcttttctctcgtgcaaccagtttgcccattctcttcctattacttgctccagggataggtaaaaaaa

SEQ ID NO: 132014 - DNA, 1444 bp, Homo Sapiens
  misc_feature (303)..(436): n is a, c, g, or t
  misc_feature (1060)..(1060): n is a, c, g, or t
  misc_feature (1066)..(1066): n is a, c, g, or t
ggcagcagcagacatttattgagctcactgtggccggctcccctcttagcccggtccccacatcgctagttcttatagcgtccctatgaggtgggagctgtcgctccactttgcgtgtgggaagactgaggcaccgaggccatgccaccagcccaaagtacagcagacaggctcagaaacaggaggctgcctgtcctccatccccagggcaggaagtaaggccgagctccaaacccactctgccccagggcaaggctttaggcaggggaaggatacggccaggtcagcacattagaaagtggnnnnnnnnnnnnnnnnnnnnnnnnnnnnnnnnnnnnnnnnnnnnnnnnnnnnnnnnnnnnnnnnnnnnnnnnnnnnnnnnnnnnnnnnnnnnnnnnnnnnnnnnnnnnnnnnnnnnnnnnnnnnnnnnnnnnnnggcgggactggatgcagtgttgggaactggggtccgaaaagttcccagacactcccttctccgcaggcctcagcctacctgaaacagaacaagtatcaacaagcggaagagctgtacaaagaaatcctccacaaggaggacctacccgcccctctcggtgcccccaacacaggcacagctggtgacgcagaacaggcccttcgccgcagcagctcactctccaagatccgtgagtctatcaggcgaggaagtgagaagctggtctcccggctccgaggcgaggcggcggcaggagcagccgggaatgaagagagccatgtcactcaacacactgaacgtggatgctccaagggctcctgggactcagtttccccagctggcacctggacaacggcccctcggaccctcagcgccagcacccaggacctgagcccccactaacgtccagtgaactgcgctggccgcagctttcttgggaacagtgcaggaggggatgggctggctggggtggagaagggggtctatcatctccctggccccccccttgccttctggggtaacttggggggataacctgcctttctccctgcgaattaaagggctgggggacgttggaccccaacnccacanagccacgcggttaaacgcgcacagcccctggtcgggcccgccctcccggcccctcgaaaaaagcttttcctaaaaccatttcctttttgggtgccgccgggccccatgaagggaaagcggaactctgggcccaaaccctggttcccccaagaaaaaacctggggcaatgaaacaagggctttggaattcccccaccaaaaaaacaaccgcccgcggggaaactcaaaccggtttttaaacaaaccccaaaggggagtctcgggggtcgttacttggaatccaaccaacagggaatcccacgcgggtctcaaaatcaaatatagtgcccgcccccgtccattttttgcgaggagtggggcacaccccataaacctcccg

SEQ ID NO: 132015 - DNA, 763 bp, Homo Sapiens
  misc_feature (687)..(687): n is a, c, g, or t
aaaaagtaaataaatgcatattgacaacagctactggatttaagcacagcttctggtcctcaaaaccacactgtgatacagggggcaaggcacatctcacccccccaggacagataaacaaattgagactcagagatttatgtgagttgcctgagcacccagcaaggaggaatgagccatggtcccttgtggcttctcctgtgctccctcagtcttctaccctggagggagcagagggggtctcaggcacgacagcttctgccaggagctgaggcgggcccagcatgtggggtccagacctttactccttagtctgctcgttgaaggaggctgagctgtgccattttccaaagctttgcttgtggctgaggggtgtgaggtgggagcgggtgaggaaggtctgtccacaggaggatgtaaccagactccaatcattggccggtctgcggagatttgtgttctggagcgggattgtttgaggggtggatgggtggggaaagctggagccactgcggaaactgtgacttctgcaggaccagggtttggctctgacattccgggcttcatccagacgctctcactatactcagcctgagccaggggctgccctctgactctgggcccagcaccagggtcaagggctctgccgcagagcttaggccccctgcactgtgcttgggcaggcantggggctggagggggatggtcacctgttctcaagcctggggtgaccaggctcggggcaggctctgtttctgggctt

SEQ ID NO: 132016 - DNA, 1001 bp, Homo Sapiens
aaattattaatttattttcaaatcatactcagtttgagttcaaatagttcaaaaatcaatataatgcttcaggatgcttccagctattgaaacaacccaattaaaaaatatacaactcacactttattttagttaaattcataatgtaggtaatattaaaaattattataaacatttaataatgctttataatttgctattatagtacaccactacagacacataaaaagttgacttatctaattaaaacattttcccttcctatgtttctaattctgaaaactataaaaatattaaagtcatgttacatatttttcaaaaataaaactgccatatcccattgccaactttacatgaaaaaggtatatgttctggtatattaggaagttaatgatgaaaaatataggttcagaattttaatttggtgtatttgaatatgaaaacacaaatgacacaaatggtttaagtcttcattaaaacaagcttcacatttctctgaatgcatattttgcagaaggatgaactgctagccaacatacaataaatatatcaattgtttacattcccaaattttgaaaatactgggtgaaaaatctagaaagacagtgttaaaggagcataattaaatgaaccttagaccttttatcattgaaaattaagatcctaattttagttactgcttggctgtggtatgggaaagtctgaactattcatgcaaaatagaataattttttattttccattttatacatagctgctatccaaatgatcttttttgaaaaatgaaaaattattagctattatttgtgattcaatttctagcaatggccatcatagtatggtcttttacatcatgtgaaaatacttgttgcttttggtgactacagtttcatggatgggaattcaagatagactcataacagaacaaattccaagttacagtacattgtgttaaagtaaggctccactgtattttggacatgtaataaacaagctacagc

SEQ ID NO: 132017 - DNA, 834 bp, Homo Sapiens
  misc_feature (659)..(767): n is a, c, g, or t
atactgataagcatgtcacagtatagagcataagaggcaatgtatgtatcctagtgacattagcagtgcttttccccccttaaactcctttaaaattacttttagaacttgctgctcattcttgtgaatgttatgaatggtgtcatattgtccttttacagaagatacgatttttagaaacaaatattcattgaatgtctgccctgtgagatactcactagagtgaacatgaggaggcttatgtagcaaaatggcacctacctgcaaagaacttagtccctaatggagatgaatatataataagggatcataaatgtgctaagtggatttactagtaatatgtgagccaaggacgataaagctcctgattctgatgggtatcaggaaaggcttttcaggaagtgttacttgttataggtcagaggtcagcaaactacaggttacaaccccactgcctgcttttgtaaaaaactttattggaatacagttatgcccacttgtttatatattgtctgtggctgctttcacattacaacagcagggttaagtagctggaacaaagcctaaaatacttggtcttttacagaaaaaaatttgccaacctgttctaaacttttaaggtcaggagaactgggggaaggagggagtagaaagaacannnnnnnnnnnnnnnnnnnnnnnnnnnnnnnnnnnnnnnnnnnnnnnnnnnnnnnnnnnnnnnnnnnnnnnnnnnnnnnnnnnnnnnnnnnnnnnnnnnnnnnnnnnnntgcacctggaattgtcttaatctgttttaatactattaaaattttttttgtttcatctctttcagtg

SEQ ID NO: 132018 - DNA, 673 bp, Homo Sapiens
ttttttaaaggtggcaaacatatttattgcctcactgtaaatagagaaaatcttgtcttctctcgaccagatgcccaaaaggttataaaagaagtataacttagctccaatttgaggatatgtactaaaaattttaaacgtcaccttggtgtttttttcaagactaagtgtgataccacgtaaggcatttccatgtcataaattaattctaccatatttttatgtaaaaaatgctgcacgttgttgtgtctgcagctgtgctgtgattatgagacagatacaatgattcacactggctggaagctaagtctcacgtcccagggatcagggcagtccagcccggtgctgccacaaagggtggtggtatcaggtcacacctaggacctgccactttagactgaccttgtttgatccacggttgtgaccatgtattaccacaaatttaacaataaaaaattgttttaagagtatctgagaaaggactaagcagtcattccattttgtgtccttcccttgttttaaaataagcaacgtcctatacttccatcatttaagatcatcaagctgacttgttcagtctgggcccatgtcatccttccagaacaagcacatcctaggatttcaaatggttctacaaaataaagtgagagattgacccaagtataaagtctta

SEQ ID NO: 132019 - DNA, 1596 bp, Homo Sapiens
  misc_feature (254)..(267): n is a, c, g, or t
  misc_feature (403)..(411): n is a, c, g, or t
  misc_feature (496)..(504): n is a, c, g, or t
  misc_feature (506)..(517): n is a, c, g, or t
  misc_feature (545)..(553): n is a, c, g, or t
  misc_feature (625)..(768): n is a, c, g, or t
cttccccacccctgttgtttttcttctgagcgggggggtggcgcattttatttgtgtacccggggtgtggtttgtgtagggcgcgcggtgttattattccctccccgggcgtggcaattgtattttttccacccccaccgcgcgcttccccatgtgggtgggtggtcacgcgacgcgcgcggggcgcggattcctggttatgtacagacacacccgccgctagagattaagagagggttcatgcaaacagcccnnnnnnnnnnnnnntggctgtatgtggttttattgtcccccgctcttttgggagagacgtccctgttggaggagggggcgccgttatattttggtaatttggaggcccccctggcggggcgccctcttcgaataaagactcccgggtatnnnnnnnnngggttttttctctttgggggggattccccaccgcccgcttggtcccccgcgccgcttgttttattaggggggaagtccgcgcgcnnnnnnnnnannnnnnnnnnnncgtggggaacagaacaattggccaaaannnnnnnnnggggcgcggggccgccgccccaaaaagaaattttttaaaacttttcctggggcggcgggcccgccgcgaagnnnnnnnnnnnnnnnnnnnnnnnnnnnnnnnnnnnnnnnnnnnnnnnnnnnnnnnnnnnnnnnnnnnnnnnnnnnnnnnnnnnnnnnnnnnnnnnnnnnnnnnnnnnnnnnnnnnnnnnnnnnnnnnnnnnnnnnnnnnnnnnncaacagccattttactcttctttaattctaccgtctttgggcatacatctcatttgctgtggaagaaggtctgacagcagggctgacagcaccgattcataacacattcttttcatcatacaaagagtaagaccctagaataatgggaccatctgctaccacgacagagctgccttactggctgtagaaaaagactgcttgtgtgggagagaagaatgaggacagaggaggcatctggggcaagtgagcgtacaagtatgtctacaaattcagaatttggtggaaaatccaaatttgacttcaacatgatagagaattgatgagaaatagctgtactgtttccaaaatttactgaatttggaacctgaggttaaaacttttaggataaagcaacctcaggttcagactggccttgggaagaaatggcaatcacagacggtaatgagtgtcagtgcttgagaagaagaattgccaaaggcaatctacatatttgacttgactcaaagagaggggaaaacaagtctcatttaaaaaggatgagtctgcagcaaaaaatcaaagggaagctggaacccctgcccacctctccattccccattctgctgctggtgcctgctcttcctcacagtacctcctgaaaagttcagaattcagttaatacagaattattgggttgattttcaacgtgtagtttaagatgaagagttccgtttggtttaaaccacttcacctaacctcttggtaacggtagtcctgagagttcgcagtgtcagtgaaatcgtcctgtgaccacgcgtcaagctgctgatggggcacagcaacttccgg

SEQ ID NO: 132020 - DNA, 916 bp, Homo Sapiens
  misc_feature (58)..(102): n is a, c, g, or t
aactttagaatttcattttattaaacatacttttaaaacaagcacctcttgggcaatnnnnnnnnnnnnnnnnnnnnnnnnnnnnnnnnnnnnnnnnnnnnntagtactccttccactctatgctaacggaagacttctcacaccagccagttaaacaatgaaattcttaaacacgcagcctgctggggctgcatgcagagctaaaatgcaggtgtgctgacttcttggagctggagcagaggaaaacatcaaaaagcatatctggaatctatcacagctttctttcttaagcaaataaaaatgcaaattagtttcataaccacaattcaatttatcaaactttttctgaagaattttcatttaattatgtatacataacaggaaataaaactttttcacaaacactctcaaggcttacgattatcaagaaaatgacaaaagtaaaagcaggaggaatattaaacacatggcggggaggtcaatttccgtttctgctcttaaaaagtaaaaaaatcaccatataattaagtacaaaaacctgcattgaatgacaactgctggtgtatttacttgatcagaaatgaagaccaagaatataataaagccctatgataatattcaccgggagcactcccctcagtgtgtgtacactaacaggttggcaaagtttctggagcattagcttatagaaacacaggagtccttggttagctgcattatatggaacgttctcttctgaaatgcacccacgattcagtttcacttacaaattgcaaactaaagttatctcttcagaaaaatatctgtttggcatctcctggactttgttccattggacagtagggacattttaatttgctaccatcccggccgtaatggccgaattcccgggcatatgtccggtaccgtcgactg

SEQ ID NO: 132021 - DNA, 1003 bp, Homo Sapiens
ggcggcggtggctgcgttgcagctggggctgcgggcggcggggctgggacgggccccggccagcgccgcctggaggagcgtcctcagggtctccccgcgcccaggggtggcctggaggccaagcagatgtggcagttctgcagcagaagcatctgccacaaaagcggaagatgactcctttcttcagtgggtcctgctcctcatccctgtgactgcctttggcttggggacatggcaggtccagcgtcggaagtggaagctgaacctgattgcagagttggagtccagagttctggctgagcctgtccctctgccagccgacccaatggaactgaaaaatctggagtataggccagtgaaggtcagggggtgctttgaccattccaaggagctgtatatgatgccccggaccatggtggaccctgtccgggaggcccgggagggcggcctcatctcctcctcaactcagagtggggcctatgtggtcactcccttccactgcaccgacctgggagtcaccatcctggtaaatagagggttcgttcccaggaagaaagtgaatcctgaaacccggcagaaaggccagattgagggagaagtggacctcattgggatggtgaggctgacagaaaccaggcagccttttgtccctgagaacaatccagaaaggaaccactggcattatcgagacctggaagctatggccagaatcacaggcgcagagcccatcttcattgatgccaacttccagagcacagtccctggaggacccattggagggcaaaccagagttactctgaggaacgagcatctgcagtacatcgtgacctggtatggactctctgcagctacatcctacctgtggtttaagaaattcctacgtgggacacctggtgtgtgacagatcagctgctgaagccctgtccctggataatgcagtatttcaagactgcctttatgctggatcatgtgctactggtataaagttctggccttctacctt

SEQ ID NO: 132022 - DNA, 869 bp, Homo Sapiens
  misc_feature (588)..(612): n is a, c, g, or t
  misc_feature (617)..(685): n is a, c, g, or t
gcatatacaactgcaaatatatgtacattgttgtaggaaagcaacaatattctttaaaaaaagtaaaaatctgggagttagatcccccatctactcgcaggaatattttacaacgaactcattaggtcctgagatttcctttcttccacagttacctgctgatatttgcctcgtaagatccccttgggatcttcctgttttaactacccagcccggaagcaagtttaagatgaacttgtggtacctctcctccctatttggctggaactccagccttgatttttaatcacctttgcaaaaagccctagcttagatggactcattttgatgttggacctaaagaaaagaagctcctcagctcatccccttggcaaggggtacagcaactggtaagatgtttaattggctgattgtaaaacctgtctttcgagcctcagcacttgggccccactctgtccacagacacaggcttatccatgaagatatccaaggaaggaagttcagcaggaataaggaagtcttcacagctattgattgggtgaccaattctatcatcttttctgcagcaggacttcctctgggacggcnnnnnnnnnnnnnnnnnnnnnnnnngagannnnnnnnnnnnnnnnnnnnnnnnnnnnnnnnnnnnnnnnnnnnnnnnnnnnnnnnnnnnnnnnnnnnncctgggactgttttaagttggccttcttttcccccaatgagctacacatgacaggaaaaaaggacatgtgcttttggttgttctggtgaacagataactctaaggaggcggacgcgtgggtcgacgatatcccgggattccgaccgtaccagcctgctttttgaaccactggtgcatatgtcca

SEQ ID NO: 132023 - DNA, 1509 bp, Homo Sapiens
  misc_feature (402)..(474): n is a, c, g, or t
  misc_feature (1356)..(1356): n is a, c, g, or t
  misc_feature (1375)..(1375): n is a, c, g, or t
  misc_feature (1395)..(1395): n is a, c, g, or t
atcagaggctttgtgggcggcgagcgtgtgtagtgatcagaccgctagcacacggtgatgataatctgccggcacacaccaaatcaacgcacccgaacgcacgagcagagtcggactcgccactcgactaacagacagcaagtctggtgttggtagggcgtacgccgtcgcagcacacctgggaagcataagataagtagaggacatacccacttcttgttttgtgggtggtgcccgctctggagaatactagacggcaggccggagagtgcagaggtccgccaccccgccggtggagatcgtaatatcggccagccccgcccctctgcgattatattctttcctttgtgtcttctggtgtcttatcttctttggatttgtgactgtcgagtgttgtttggnnnnnnnnnnnnnnnnnnnnnnnnnnnnnnnnnnnnnnnnnnnnnnnnnnnnnnnnnnnnnnnnnnnnnnnnnaaaataaagttatttaatagtctccatttaattggtttatttgctgttaataaattggcaacacaaggaagggccccatgtccaggctcaggcaggagcggctgcctcaggcagaggcagggcaggcacagctgccccgtgcctcaagggatggagggaaaggcccctcacttctgggagaacccccttggatgaacacagcagccaatgagcaaacagaaccagaggagctacaggaaaatgaggcagaggggcaggcttgggggaaggcagcattctctggtacccaccacccctgcccagggctcagaagcctttgcctgggtccaaaggccagggacaagggaggcttggctcacagatggggggtgggggtcacccatatcttcctccccactctgggactgactgacagccaagaaaccggcaggagctcacacagagctaatgctaaatgtcctcttacctctgggtggccctgggccccagggttctgaaggaaaggtgggcatggtaccctgtcctcattatggggactgaggctctccatgacctagggccctcagacccagggggaccaagggcttctaggacttccctcccaccaagcctgtacccaaagacctggggcaggcagagagcagcagggaggaacgggaacagggcagggcgtgtggcatcgtacccacgctcacccacactggcccagcagcctccccgaggcctggcccaaggtcactcctcagtgaagtccctgtctatgtccatgtagggctcctcaatgtagctaacgagagcagagggtgactggcggtcggggttcaccaggatggacactgtctcctttcagtatgagaagctgatgcaggagctgttctctangcggtgctgtctcctcgtngcgatttctggctcgagggncaatcctataggagcgtattaatcgtatcagtctagtgttcctggtgaatgtatcgctcaatcaacacatcagcggacatatgtagctggggctagatggcatcaatatgctgc

SEQ ID NO: 132024 - DNA, 859 bp, Homo Sapiens
  misc_feature (385)..(386): n is a, c, g, or t
cattttaaaaataaagttatttaatagtctccatttaatgggttaattggctggttaataaattggcgtcacaaggaagggccccatgtccaggctcaggcaggagcggttgcctcaggcagagtgcagggcaggcacagttgccccgtgcctcaggggatgggagggaaaggcccctcactttctggggagaacccccttggtatgaacacagcagccaatggagcaaacagaaccagaggagctacaggaaaatgaggcagaggggcaggcttgggggaaggcagcattctctggtacccaccaccctctgcccagggctcagaagcctttggcctggggtccaaagggccaagggacaaggggaggcttggctcacagatgnngggggtgggggtcacccatatcttcctccccattctggggactggactggacagccaagaaaccgggaggagctcacacagagctaatggagagcagagggtgactggccggtccggggttcacacgggttgggacactggtctccttccagttatgagaagtctgatgcaggagctgttctctaggcaggtggtggtcctgtgtccttgtgcaggtagtggctgctgccagaagcgcagcaggtgtgtggaagttgttgagcacggaagccggggtacttcttgctgtgctccatccgctgcagcagccgcacggtacaggggcagccgctctttccgtcgggccagcatcaggatcaccaggctggtgttgacggcagctgacgttctcctgggtcaggcgtctgccacgtggatgactgtcgactgaggccggaagagggaaggacctctgcgtgggcacctgggatatg

SEQ ID NO: 132025 - DNA, 2804 bp, Homo Sapiens
gcgcgaacaggggggccatggccccccagaagctcgccagcgaaaggcgacaggggggacaattccccctgcgcgtccgccaaaccgcaggccccagcaagtaatgctctactcggggcctggcccaggttcgaagaaagtggctggaccgtcccattatgggactgagctctgcatgacctaggccctcagacccagggggaccaggcttctagacttccctcccaccaagcctgtaccccaagacctggggcagcagagagcagcagggaggaacgggaaacaggcagggcgtgtggcatcgtacccacgctcacccacactggcccagcagcctcccgagcctggcccaaggtcactcctcagtgaagtccctgtctatgtccatgtagggctcctcaatgtagctaacgagagcagagggtgactgccggtccgggttcaacaggatggacactgtctccttccagtatgagaagctgatgcaggagctgttctctaggcaggtgctgtccttgtccttgtgcaggtagtgctgctgccagaagcgcagcaggttgtggaagttgttgagcaggaagccggggtacttcttgctgtgctccatccgctgcagcagccgcaggtacaggggcagccgctctttccgtcgggccagcatcaggatcaccaggctggtgttgaggcagctgacgttctcctgggtcagcgtctgcacgtggatgatgttgatgaggcggaagaggaaggacatctgcgtgggcacctgggatatgtaggcgagcaggcggcattcagacagtacctcggcaactttcatatccgcctggttttcaaatcggtccagggacagagtgacacagcgcaccagcatgttggagtccaccagggagctgttgatctgcttcaggaatacctggaactttgcatcggtgttgatatatttattgaatctcttgaatgcatcaacgttgaacttcatcagcttcccccaggaggtcaaagtaactctggagcacatcccttgacttacactcgctgtccacaatgcagtaaaggatgtgctccaagaggcctcgcttcagcaggaacatctggtctgcataggaggtggtccctcggaggaaactctccacagcccgagcttgccaaaacctgaaagacgactctgctggctccttcttcatgacctgcagcagacgagttaataagcccctcttcccatcacacaccaaactcctgtcggtgttgaggacagcttccacctcagggatgttggccttgagagagatggcactgagttcattcagctcctggttgttgagtaacaagtacttgttctcgtggtggtcactgaagctctgaagaagcctcaaaaactgtatcttcaaggtgatgtccgggctacagtcacagttctggttgtgaccatggaggacaagggcagatgctgaatgcttcctccaaatcagtttgtcaaacaaattattaagtccagggatcagcttggactctgcaatcattctgtgaacctggtttcgctgacgccccatcagcagcacgcagaggacatagagcacttccagtttgtacatgatgtcatgcataatcttcattgactggggcagctgggttctggctgacgtgtgaggcagtccattctcctcagaagcccctggaggagggaacacaatggaggcttgatgtgctctgactcctcattggccactcgcatcagggcatctagcaccaaagcattgtctagccatgtgtaccactcttccaactcctgaaggaagctggctgtgcccgttgactctgacacctttcgagtcgccagtttgcaaagccgctcaacaaagccaggaatgctgagaagggccgcttgattgatttcagctgcagaaggccccaaactcaagctcttcttctgttgagcatttttggcaagaagcgtgtgcttgtcatcattccctgtatccatctctgaaatggtgacagccagaatccggcagaaattagcgagctgctgctgatcgaaattggatactaaggaactcagattggggacttcatctagtcggatcatttcctttttaacacccaaaatatcttcaatgagggttgctgtttgtaagaatgtcttcttacttgtcatcaatgtaaacaggaagatcacaaagtcattcttttctgccaaacgctttgtaactccctctgtacagacacaggtattatacaggatactcaagcagtccttggacatttcatcacttattttcagtttctgtccccggatagagatcgtaggcctcataagaatttctacaagaagatcaacacctccaaacaagtcaaaaatataagtatttggataagtggtttcttgggtaagtttcctctcttcagtaacaaatgccatagcctccatggagagaagaggagaaatttccttgaggatgttttgacactcaacaaagtcactgtggaggtggctggtggtgtgcagcttgaggagcagctgaggaattccactccacttggattgtttgtccctctccgtcaaaaaagtctcagtgaactgcaccgcccggaccaggccccggccggtcagctggccctgccgcagctgcagcagaatgttaccaggccgcggccggccgccccatccgccccaagccgccactgtggctgccgaccgtctccctcggccggctccagacccagccgctaccggcgccgccgccatgtctcctcgtcctcgtgccgaattcggcgcgccgtcgacttcatactcttcgccc

SEQ ID NO: 132026 - DNA, 762 bp, Homo Sapiens
ttgccaactttaccggtctttaatcgaagaggggtgcttgtttgccttggtcccttgaaacgtcacaacagatgtgaaggcgttgatttttagtgcgaagcccaatcagctttttttgtggcatttgcaagaggtggctgtctcattcctgtatcatctcgaaatgttacagcagatccggcagaattagcgagctgctgtgatcgaatttgatactaggaactcagattgggacttcatctagtcggatcatttcctttttaacacccaaaatatcttcaatgagggttgctgtttgtaagaatgtcttcttacttgtcatcaatgtaaacaggaagatcacaaagtcattcttttctgccaaacgctttgtaactccctctgtacagacacaggtattatacaggatactcaagcagtccttggacatttcatcacttattttcagtttctgtccccggatagagatcgtaggcctcataagaatttctacaagaagatcaacacctccaaacaagtcaaaaatataagtatttggataagtggtttcttgggtaagtttcctctcttcagtaacaaatgccatagcctccatggagagaagaggagaaatttccttgaggatgttttgacactcaacaaagtcactgtggaggtggctggtggtgtgcagcttgaggagcagctgaggaattccactccacttggattgtttgtcccgatcgcgtggtcgacgatatctcgggaatccggagcgtacca

SEQ ID NO: 132027 - DNA, 535 bp, Homo Sapiens
ggagaggatttttcttgcgttgcttttatttaatcacttccccagcccttccatcgccttttttgaggataagaaacccaaagttcccagagattaacttgcccaagatcacttggcctggatttgagcctgaggctcagactccaaaacccacactcaatttgctacatctcccaggggtggggccaaggcagctgtgagcaaaaggagaagtatcagcttctcaagggcctagggtttgttggaagggcaaggcaagggcaaagggggatacagaacaagggggcaagtaccagtgcctgggatggacccatccattcaggcagggggtgtggggtgtcccctgtgcttagaaaccacctagcatcatagctgcaacagcactttattgggatctgagtctacagttcacatagggaggtgaagccgtgggagaagcaggggtaaaaaaacgacgcgtgggtcgacgatatcccgggaattccggaccggtaccagcctgctttcttacacactggtcatagttcaccaagca

SEQ ID NO: 132028 - DNA, 996 bp, Homo Sapiens
ttattttactttaggtttttattaaaacaaacatttctgatagctctaagcaaagcattagaattcatcaagcggactcacatcttttctctgcacagagagggctgaaaagggagagaaagtcccttatgtatgtctagatttggtaaagcgaaggatttcagcgaatgagtcactgaggctatacacgtttgcaaattgtaaggcactggcgggcagagagcacagataaaggacttctggggtcccccatcctgtccagcaacctcccagctcacaccttagcttctaccaagaagggtgaacacagcatccctgctatcttcactcagaccccagaagacacaggaaaccgcacagctccactcccaccataacttattaggagataagtcacattttatcaacttgccatcgcgcctcctatagattatacttcggtaaacccaatctgtataaattcctttgtactttgtgcactttaaatgccacgattgtgaatcacacaagcattgcccaatttgttgaaagcatttttactggaacctcaaaggcccaccatgtggggagcaattattttttaatacccactgggcaggacacgccggtgcccccaaggccgcagtagccattggggttcttgctcaggtactgctggtggtagtcttccgcatagtagaaagtctgtccctcccggatgtcggtagtgatggggccgaagccgtgctctgaaagaacctttcggtagttctctttggagctcagggctgcctgcatttgcttgtcagaggtcgggtagatggccgaacggtactgagtgccatggccgttcccttggcgcataccttgggtagggtcttgattctgccagaagaccttgagcagttcctcaaaactcatgtgttatggctggtacactactcggacgacttctgcatggccagttttttctgagcagacttctttataagtacgatttgaagtatagcctcctgc

SEQ ID NO: 132029 - DNA, 1491 bp, Homo Sapiens
  misc_feature (58)..(79): n is a, c, g, or t
  misc_feature (489)..(497): n is a, c, g, or t
  misc_feature (1018)..(1037): n is a, c, g, or t
  misc_feature (1146)..(1360): n is a, c, g, or t
gtgccaagctaaaattaccctcactaaagggaataagcttgcggccgcctgctcaggnnnnnnnnnnnnnnnnnnnnnnagagtgtcactgatgctttatttacatgcgtcaccatctcttttacaaactagattacggttttaagtggaatacacaaggcaatatctacaaacaccaaggaaagttaagtactgcatctctatttcatttggaaaggggaagattcccaaatcaaactggttttgatccttaagaaaggcggcagagttaattcatggcaacatatggttagacaaaatcctcagtaagaatgccatatgatagtgttcgcattgaaagaaggatgaggtgcttcaaatcaaagtctcaactgcttgactctcaggtgtttaaatatggccacacaccatatttagttctagattatatgggatatgagcaaggaattgaaacagataagatagtttttacagatactgtatacagannnnnnnnnccattcatgcaacttttttcttaaaaaaagttaaacatgtgaagccaaaatgcacaatacatttttttaaatattaactaatttttctggtcctccttcacatttgtttacatttcccatgtacataatgtgctaggacaagtatacaagagaagactgattgccaggcaatgagataattttagagaaataagtgaccagacacatagttcttaaaagcagccgcacacgtatttctggagtgtggcaagaggcctcatgaccaatcattcatcaaagaaaaatacaaacagatacaactaaacaagaggaaaatattccattcatttaaactgcataaaatgttacccacttaagatttagataaaatatactcttttatttgggcatccgcttcaagacctcatttgacaggcatgattccatcagaacttcacttcctctagtagtactctgcctccccggtctctgagagaggctagctttttcgtacctctttactggtgattgcatttctaccnnnnnnnnnnnnnnnnnnnnaacattatgcctaatcatacaatgttcacccaaatacagcaagaaaaataaaaccagagttcagagctgttagggtttcctttttgctttcagagaggatgagtaacannnnnnnnnnnnnnnnnnnnnnnnnnnnnnnnnnnnnnnnnnnnnnnnnnnnnnnnnnnnnnnnnnnnnnnnnnnnnnnnnnnnnnnnnnnnnnnnnnnnnnnnnnnnnnnnnnnnnnnnnnnnnnnnnnnnnnnnnnnnnnnnnnnnnnnnnnnnnnnnnnnnnnnnnnnnnnnnnnnnnnnnnnnnnnnnnnnnnnnnnnnnnnnnnnnnnnnataacatttttatttcccctcgcaagtccttggcaccaacatggaggacttctttttgactgctttattcttcatggccttttccaagagattcaaatgctccttattctttaagtggggttcactaggta

SEQ ID NO: 132030 - DNA, 768 bp, Homo Sapiens
  misc_feature (670)..(670): n is a, c, g, or t
  misc_feature (732)..(732): n is a, c, g, or t
ttacaaacaacaacagcaataacagctacaatttattgagcacttactaggtcttaaatatttgctaaatacatacacagtactcacaatagccccaggaaattatagatgtatttaagttttggatcaatgagtaatcgttagctgagtagaaagctcttttctaccctacaataagctcgacattaaagactgacattccaattaatataattaaccctggacttatagaactgttttctcataataatgcacatctactgctaaatgactactctcaaagttgttttctttttcatgttcaaagaaaattacatttctttcctttcacttttccaatagaatactcttcagttctactctagaatctcttaggaaattatttgaaatagaaatcaatttaagccctataactagagctttttctcttgttgagctgctttgcagggagaaaatggcatacatatacaaaataatactctgctgaaacacataacactgactcccaagaatactgcttacttactctttgtcaaacactgttacatgctaccaatattagatgtatcaggactcccttttcagtaactatggttcttggagtcctggataacttaaaaaaatagagacctgtctggctaaagaatttaaaagttctctaactctcaancaagacacttgggaactacaatatggatatgtcctacccagttcccaggagtacattatganaaagttcatatacatcccacatccactgcagtatct

SEQ ID NO: 132031 - DNA, 867 bp, Homo Sapiens
ttttttactccttcttgctccctttcccacgcagaactttactaaaggtcagtaagaatgggctgttgtgttttctctcaaatcctatacagaagtccttaattccgaggtaaacatctgaatggaacaaatgagtatgatctgggggttaaggcaattttcaagtgtgtgtatgtgtgtgtctgttttaaggcataacaaagtccagagattaaggccgagttaaaaaacaaatgaggacaaaccaatgaggacaaaccagtccgctgaggtgcggccagagcagcagcaactgtgtctgctttcttgataaaggctgtgaagacggcacgttttactcttattcgtgtatttcttttgacactttacccctctatgaagcctcagaggtgttttaaaattgtgttaggaaacacacagagataagaaaaggcaaatggtcctgatctagtgtctcagggaagaggctggaaaggaaacgcggcgcgagtggggtgggagagggggcctgtggttttgcttctgtccgggctgaagactgagtaaggtagggcccctccttctgcggatgggtttctctctcattccaccctccacccacctccggttccgcgtgcacgcgcgagatagtccagtgggcccacagataacgaccatcagagattaaagaaggaaagtcagcgagcttgaacacaggcgtcccgtgtggaaatgtccaaggagaccgccagaagtgcgcaagccggagtcggctagagtttccttctcaccgagagggggagcccggcgttcccggccgggagcgacccggagtccccagccccgcgtcccagctgccgccagcgccagttttggattcggcggatt

SEQ ID NO: 132032 - DNA, 633 bp, Homo Sapiens
ggataagataaaatgcattttaatagtttgaagtgccatgaggtgtctgcatggcactgcagcctgggtgagggaggacagggtcatcatacaaagtaggcggccagggctgacatcttgtccttgggccgtctggggttgggcttcccagggggcctcctggcccggccccgccctcgaccctgccttctccctggtccaccgcggtgcatggggtggcaggaggccgcatgcttcagctccaccagctcctggaagacggggtcacaaaagacgcagcccatgtgctgcgtctcatcgcccgggagtggggacttggccttgttgaagtccacatcaagcaaggcggcctcacagacactgcaggtgtcggcggacacccgcacgcggtgggcgttctcgaagcagtgcgctaccacgttgcacttgttgcaggccaccttccacttggggcccgaggtggggtccagcaccagcaccccactctcacattccacgcactggccgatgcccagcatgctcagcgagtgctggcaggaggggtgcgtacactcgttgcagcccatgcctggcggggagaagggagccctgtaaaggcacgcccactgtgcccacctgccctctgctgcctgc

SEQ ID NO: 132033 - DNA, 645 bp, Homo Sapiens
gcagcttgtgcacttcttttattattaaatatataagcagcttcctatcttgttaaatagatatttaaatgactttatataaaataattcaccacttccaagtataaaaacaaaatctcacagtgcgtgagccaatgtcctctcttgacttctcagagaacagaaggggttcctgagcaggtagcctggggggacaccagaggtggctctggggctcctcctgctctgatgccaccaagtgctcaaaaagagcttctgcagtgggttggattgcttttttgacctttaaaatattatatgtttaaggtagggggatgaagggggaatgcctttttatttttcttccatttaaaaatatgtgttttctagcatcaaatatagaggctgtgactagaaggctaagccccatatgcaagttcactgcccttccctaagctgtcggcatcaggacagggaaggtggggccagccgaccctcactttcctgggcaggaagggaaagtcacggggcccagcggccaggtagggcagggtctcttagcggaggacaaagggcggcaggagaggaggcacacagcagcacaaaggaacccaggggcaactggcagccctgtcgctcgttgcctaggcctcagagcaccaccac

SEQ ID NO: 132034 - DNA, 870 bp, Homo Sapiens
tttgtttaaatttctgaatccaacagttggtcacagaggtcaagtattatcaaggctcctttgtcagttctcaatcgtgtctgactcatccatccttcaagtacatgcaaggctcaatagttttccagaggcagatgcctggggccatttaagatacagatgaaataggattatgaggtgaacccatttgagtaagaactttatccagccactggagggggccgtgcagatgtatctcaatccagcagggggtgctagtaacatcctggcggtggtattctgctccccagcccttcacaaagctcatacgtatagtacacatttttgtaagctcatagactgtctcaaatccatggttcacagactgtgccaataactgagcaaattcttggttgttaaaaattttcagactacacccactagggatcttgcaaacagtagtaggatgaaatccatgatggtagttgcagttccgactttgcacaaagatgctactgtcactaaggcattcggcatacacctcccctccaacataataaagatgaactccttttccaatatgccgcctggtgttttcaatagtggaattccggttaacattggagagcagcccaaggcagaaacggttcttattgttgggaggatcagtgaaaccatccaccaacacactttgtggaggaggcatggaacgcttcacccacacgattgttgagctcatagtagacaatagagcaccagtgttttggttcctcataagcaaccgcctgaacatctcctctgttgatttctgagggcaggggaggcgccatcatgtttgtgtccatcggctgagagccatcctgggtcatggggtcttcaggaggcaggtaa

SEQ ID NO: 132035 - DNA, 1283 bp, Homo Sapiens
  misc_feature (195)..(212): n is a, c, g, or t
  misc_feature (771)..(781): n is a, c, g, or t
tgtggggtgttgatactctccttggtacggtgggtattgttgtggatttttttcttgttcgaggctggcgcgtcctgcttattgtttggggtgcgctgttgtttttgttctacgacccctcgacgggttgtgttgttcgctgactgtgttgtgtccaacctgggccgtggttgtatgctgcttcgtcttgttctnnnnnnnnnnnnnnnnnngttttgggatgtcgctgcctaatcgggcggggtggggtctcagcgcgcgtgtcctcgcgccctcccgaaatatctggtgcaaaagaaagttgggtggcccgaccgcgctatcctcccctgcgcattttttgccgcgacacgcaagttggggtcgcagcacacacaattgttaagaaaggatttattaggggatactctttcaaggtgtcaccgtgagcgtttactcggccccgatccttcggctaaacaaataggttgtgaaattatgatgaaacccatgaaagaagactcaacatgggctctaaacctgataaaacacgtttcagaacagctattaatgctaaacttctgccccacgatgaccttaaagtgccaacaccaagaatctcttaggaccgttttctaatagaccatttgtcctggcttggccatctctcctttaactggacaccaagtcctgctaaaagtctgaattttagttgattttacaatagaatgttaccaatgtaaactaaacaggttcttgatatccaccagtatgttaccaaggtgtgtgtgnnnnnnnnnnngtttgtttaaatttctgaatccaacagttggtcacagaggtcaagtattatcaaggctcctttgtcagttctcaatcgtgtctgactcatccatccttcaagtacatgcaaggctcaatagttttccagaggcagatgcctggggccatttaagatacagatgaaataggattatgaggtgaacccatttgagtaagaactttatccagccactggagggggccgtgcagatgtatctcaatccagcagggggtgctagtaacatcctggcggtggtattctgctccccagccctaggaaaaacatactggaggtcatttaacttgtttaactcagtggttaaacttattaagtaagaagagttcacataaccaaagactctgattaaagctatgcatctttcctccctgacccccccgcccctggggagaaaaaaacacacatgcacaaacgcacacataatttcgcaggcaatttcaagggatggatgttagctccccag

SEQ ID NO: 132036 - DNA, 795 bp, Homo Sapiens
  misc_feature (765)..(765): n is a, c, g, or t
tttagttttccaggatttaatatggtgcttttaagaagagagccaccggtctcagcttataattacattttcacaaattaatccaaaattttacgtatgaataaaaaggagtaaaacaatacataaaaaatgaaattgagaactgatttaatactaaagttctgaataaaggtgtgcactttatgattgattctatctttttgcacaagttggatactccagtttcccatcccaacatgttgttcgcaatgtgtgagaacgtgatgaaagacgatatccccgtttacacacaaattcaactgattcacctgttctcgaataaagcttctgtttggctgtccaccttaatgctatgttataattttccataatttctcgggatattacacacggatgtaagcattttggtggttctgaccattgtccatttctacatgttattcgcttgttaccctcaagttgatacaagttctggcattggtactcaactgatgaagctggagcatatactgacaacgggaatgaagtaatgtccccattgtcaataggtggagggggcccacattttcctgtagaatctttgcattgaggtggttccgtccagtttccatttaaacacatcacttcttcatccccaaacatttcataagggctcctacattgataacgtactttctcaccagatggatatttactcatctgtctcgacactatataagcattttgtactgtgggcggatcacacaggaggtgtctctgcatgtntggctcctgtcatctgctataatgcatgtt

SEQ ID NO: 132037 - DNA, 1517 bp, Homo Sapiens
  misc_feature (132)..(178): n is a, c, g, or t
  misc_feature (852)..(908): n is a, c, g, or t
tctgaatgcaatgactgttttttactcttaaggaaaataaacatcttttagaaacagctcgatacacacaatcttcagtgtgaagcaatatactaataagaacactagtcgtcttaacatttacagtcttcnnnnnnnnnnnnnnnnnnnnnnnnnnnnnnnnnnnnnnnnnnnnnnnacgaggccagatataatacacacgtttaccattttacagtcatatgtacaggaagttgctagggcggccctgggctgggggctgcgtcaggcctatcgaagcgtggacagagctgaggacacggacggacaggcggacggactggcagggactggcccgggcggtgagtggctgcgtggacaagtggcgtcgcggtagccacgtgcgggcaaaggcttcctttctcccccgcctagtccacggagctaggagccgccctccgcctcttccagtactgtttcgacccccacccccaagcccagggctcctagctgcacgccacgaccgactgggttgcggcaagcacccacgtggaatgtgtgccacgtcgtcttgagattccagagggaaagtgtccccaggacaaagccgtctcccaccctcgccggaggctgagcgccccggggagtctggccgctccgcgggctccccctccgcaagcctggcacctggggtgggcaagaacgccctgtgccgtccggttccgggagcaggcggctccggagcgggttttcctcccaaccggggccagcaagtctgagccctaggcggccggatcccggatccgggacccggatcaaggatcggctctggaccagcgctgggagcagctcaaaggcccgggggctgcgcannnnnnnnnnnnnnnnnnnnnnnnnnnnnnnnnnnnnnnnnnnnnnnnnnnnnnnnncgttggggtggattactacggcagcctcttatgtttgggacatttcaaagaaaagttctcttcgatgaatatgcaacctgcatcgctggcacacgggtagtggtaggtgtggaggcatcctttgtggcagcacccaatggtggccccggcttcttggcagctggaacacatcatgtccacggccaccttcatggcctcctgcagcccaaagagcttcgcggccaccaggtagacgccgccggtccacacggcacaggcctcatgcacccagtgctcctgggcctccccgccgggctctgccggagcctccttgctgcactcatgtttgcgacccttgtcggctggggctgcctcctcgcccccatcctcccggccatcacagcagtagcagctctgcagcctccgggacaggccccgggcactggtgcgcagtgggccctgcttggccgggtcagctgggccgtcaggcctggggggcttcccggcagtggcggcagctgcacactcgggacctttgagtgttctctcaagcggcagcgaggcctcctcacaggtccttctggcccggacgcgtggtcgacgatatcccgggattccggaccggtccag

SEQ ID NO: 132038 - DNA, 1047 bp, Homo Sapiens
  misc_feature (767)..(767): n is a, c, g, or t
  misc_feature (804)..(804): n is a, c, g, or t
ttttggtgtaggaaatgtatatttaatcattctcttgaacgatcagaactctaaaatcagttttctataacaacatgtaatacagtcaccgtggctccaaggtccaggaaggcagtggttaacacatgaagagtgtgggaagggggctggaaacaaagtattcttttccttcaaagcttcattcctcaaggcctcaattcaagcagtcattgtccttgctttcaaaagtctgtgtgtgcttcatggaaggtatatgtttgttgccttaatttgaattgtggccaggaagggtctggagatctaaattcagagtaagaaaacctgagctagaactcaggcatttctcttacagaacttggcttgcagggtagaatgaagggaaagaaacttagaagctcaacaagctgaagataatcccatcaggcatttcccataggccttgtcaactctgttcactgagagatgttatcctggtgcccgatagagttctggctctctgtgctgaggcagcagccaaagagacagaatgcttatttgccaatgactaatgtgaggaagcagacagatttgttggctcccctctttccaggcccttttctactcaaaaccagggtttcttagtcctgacacagttgacacttcggattgggtagttgtaatggggagacgtcctgtacatggtatgaggttgagcagcatccctggcctttatccactagttggtagtagcactgtatcctcctccactccctcattgaggtaatcanattgtcttcagacattcccccggagatggggggcganatcacccagctgagtccactgctctagatgctattgaaactgaggtcttagctgtcacgcaggatggaaggagaagctcagagctgtgatgacatatggcatatagtcaaggtgaaggtcttccctggacattcaggatgacatcattgagaataaacgcattgtttgttacaagagggtcatttatataaaccggtccgacggtcgttagccaaatagatcattccacttggattgcattga

SEQ ID NO: 132039 - DNA, 1620 bp, Homo Sapiens
ctttctcctgcaaaaacatttattcacaggtgggctggggtcagctgagatttattcacaggtgggccagggtcagctgagcgtgaagtgctgggcacagagttcacccggccgtcccagcaggccctgggctgggataaactccagtggcaccggctcgggccccttcttcttcaggtcccgctcaaagatctcgtaggccgtgagctccagcagtggcgcgatgctgacctcaggcatggacagggcctggttgatgacgctggcggctttggacacctcagggtggtagtggcgctggagggcctgaagctcccacagggagctctccaaggcccggctctgggctgggtcctcctctccagggtcgtaggggtcggcgtccaactcagggccgtgtggacggtgcacgaggacccggcaggcagggtgccggcgcagcaggttacagatgaaaggcaggaccatgagcagggcctcagggggagccgtcagggccaggcgggccagccgcttggcgaaggcggccaccagttaggcggggaggtgggaggaggacaggaagaggtcagccaggtggaagaagcgggcgcggtacttgacgtgaaagacagaggggtccaagaggccgtagagcttccggtagaagtcagggtactcccgaggtcgcaggcgcgggtgaggaagtcgatcatgagcgtgggctgcgccagctgcggcaggatggcgtcatgcacaatcagcagcaccttcttgtagaggctgaggggcagcttgtgcttgaggaagctgagccacatggcctgggaaaacccctcttgtgctccttcaaggtgagcaaccttccaggtgtcccacagctccgcccgcttcacatagaagctggagaccggtgggctcccggcggggcaggctcacggcagacagcagcgtgaaggcattgttccaaaaggcggggggcacctcggggtgctggccagtgacccgggccacggcatccacggctgcctgcatggtgtggtagcgggtgtcgtcgtagtccaggtactcccggaactgggacaggagcaggctctggtcctcctcaggagacagcaggcctcccaccaccaacttgaagagctctcgggggaacaggtagttgccttcccacttggacttctccagggggtgcgctccttccagctgcacgaacttcaggagtgcgctgagggccagctccttgacctgaaaggaggggtggcccaggagctctcccaagcgattgcagcagctgtgatagcggtgtctcatccacaccttgtacttccgtgtggctccctgggaccctgtcatgaccatctcctcagagggcagctggcccacaaacagctctccccgctccagcaaggccccgaaaagacggctgcacgtgcggactgcttcctggatctcctcctggtcctcagactgcagcacggccaggatgtcgaacacggcgttggcctcactgcggctcgccagcaccgcctccagccggcggcccagagcccggcgaactcccgcggcgcccggctcccgctccatgccgcccccaacacggaacaacgcggattctcagccgccggcgctcccgtgacg

SEQ ID NO: 132040 - DNA, 893 bp, Homo Sapiens
ccgtttgcttgtagacgcctgaagggcacacttgtgccttgaggaaactggagcaacatgggccttgggaaaccgcctcctggggctccttccaggttgagcaacccttccaggttgtccccacaggctccgcccgcgtgtaacaatagaagctgaaaccggtggctccccgccgggcaaggctcacggcagacagcagccgtgaaagcattggttccgaaaagccgggggcacctcgggttctgcccagtgacccgggccacggcaatccacgctgcctgcatgtctgtaccggtgtcgtcgtagtccaaggtactcccggaactggaccaggagcaggctctggtcctcctcaggagacagcaggcctcccaccaccaacttgaagagctctcgggggaacaggtagttgccttcccacttggacttctccagggggtgcgctccttccagctgcacgaacttcaggagtgcgctgagggccagctccttgacctgaaaggaggggtggcccaggagctctcccaagcgattgcagcagctgtgatagcggtgtctcatccacaccttgtacttccgtgtggctccctgggaccctgtcatgaccatctcctcagagggcagctggcccacaaacagctctccccgctccagcaaggccccgaaaagacggctgcacgtgcggactgcttcctggatctcctcctggtcctcagactgcagcacggccaggatgtcgaacacggcgttggcctcactgcggctcgccagcaccgcctccagccggcggcccagagcccggcgaactcccgcggcgcccggctcccgctccacctcgtgccgaattcgccacccatgcctcgctaccttaagaccgttatagttactgccag

SEQ ID NO: 132041 - DNA, 862 bp, Homo Sapiens
agaaggctgaaggggcagtttccagggtgagccaacgtttccaaggggtccgcacagcttccggccggcttcaacataagaagctggaagacgggggggcttcccggacggggcaggctcacggcagacagcagcgtgaaggcatttttccaaaaaggcggggggcccctcggggtggtggccagtgacccggaccacggcatccacggctgcctgcatggtgtggtagcgggtgtcgtggtagtccaggtactccgggaactgggggcagggagcaggctgtggtcctcgtcagggggacagcaggcctcccaccaccaacttgaagagctctcgggggaacaggtagttgccttcccacttggacttctccagggggtgcgctccttccagctgcacgaacttcaggagtgcgctgagggccagctccttgacctgaaaggaggggtggcccaggagctctcccaagcgattgcagcagctgtgatagcggtgtctcatccgcaccttgtacttccgtgtggctccctgggaccctgtcatgaccatctcctcagagggcagctggcccacaaacagctctccccgctccagcaaggccccgaaaagacggctgcacgtgcggactgcttcctggatctcctcctggtcctcagactgcagcacggccaggatgtcgaacacggcgttggcctcactgcggctcgccagcaccgcctccagccggcggcccagagcccggcgaactcccgcggcgcccggctcgcgctccatgccgcccccacctcgtgctgagttcgccacccaggcctcgctacctagggccttattgggccgggttgagagggggggcggagagaaa

SEQ ID NO: 132042 - DNA, 1017 bp, Homo Sapiens
  misc_feature (890)..(927): n is a, c, g, or t
aaaaatatgaaaatttatgaaaagacgaccaggagtggttattttccatttctactaagatgcaaacaagaagaaatgtttaaactgcaatgagtcaacatcagacataataattatttgatgcagaatgaactagcaacagagtttcggaaatctcctctcactacagagcatgaaatattgtcaatcacaaaaccaggatcagttaagaacagctcagactgcaggtaacttataagctaaaaaacttgctaaataaatggcttttcccccaatttttaaaattctgaattcataattatgtgtagaataacaatcaatttataaactgaatacaacatactttaaaaacagatggcccatatctgctgatcctacctcagcatcacttttctaggtattttgcagaaacaattacatttacaaaaggcccatttcataatgcaatctggttactaaaccaaatcaaactactcgaagagcagaaggtctgctgttgaaatattgtaaaatacctttggaaaaacggtatttatagattagcttttttaaaaagggataaatatgtggaagtaattctagcatatccctgaaaataattatactgccacctatgcattttttatgaggtggaaggataaatcaacagactgctagattatacaagccaattattcctgttgaaatttgggcataagaccaagggactttctccatatgaattcttactgtatccccagaattaactggtgccagcagtatcaatgcaactattactggtgatgatgtcatgttatgctgttttgattatgaggacaaaaatgggaatggaaaaaagaggcttggaaaggttttcggtatggtttccttataataagatttagcagttnnnnnnnnnnnnnnnnnnnnnnnnnnnnnnnnnnnnnngaatgactgtttaagccccactgaacacattaaggtcaaggatttcaaaagttaatccacttttcttcccccaagagtttatttttggta

SEQ ID NO: 132043 - DNA, 943 bp, Homo Sapiens
tttgaattttaataatatattttatttaacccaatacccaaaatatttcaacacatatataaaaaagttattgacatattttacactccttttcttttgttatcatactaagccttcgaagtctggtttgtgtttacacttgcagtgtatcacagctcgaaccagccacgttgcaagggcctgacagctgcacatggctagcggctacatattggacagcacgggtctagagggcatcatctgaccaagacccgcaaagggaactgagaaaagggctactgcctgagcatctcaggactgccctaagtttgagaaaacatctcccctctactccaaaactagatctctttggagtactttttaaagtcctttatagaagcaaagctctttctgcaagtgaaatacagagacacaatactaaaactgacaatggctgaactgctcagactgaagaggatttagcaggtcccccagtggtcccagagccccccgcccccgccagggtgtgaggcaatatgaaaatcgctgcctttgaagattccaaaaggaaacgaaaccacaactgcatgtcaggactctccagacacctgcacgtctatgacttactaagcttcacatcacaatcacctgccaaggaagcagcatcctcactgagtagaagagaaagtaggctcagaggatctactgcccaaacttacatgtgctcactggaccatgctgccctggaagaagacacctgaactcatttccaacctcagaactcacacaccaactttcttgcccccaaagccctccaagtttggaccccaaatttaccttaaggactcccattacacaaatgagataacagctttggccagatgagagctagactagtgtggggccacacagagctgtctggacttgcttggaagccctccagcactcaagaaaaagacacctt

SEQ ID NO: 132044 - DNA, 1068 bp, Homo Sapiens
  misc_feature (746)..(746): n is a, c, g, or t
  misc_feature (792)..(793): n is a, c, g, or t
  misc_feature (904)..(904): n is a, c, g, or t
cttacttccacatggtagaaagaaaagagtgagaaaaaatgttttggaaaccttgaaacaatttattgaattgctttatacaagattaacaatctccacaccacccctaacaccaacatagtcgctgcacaaaagccacagcccctctcacacctaagaaacggtcacgcccggtaagtgctcagagactttcgctgcgccagggaaacccctgcagcccccagaccccgaggctgctctgccccaccctctgctgcggcctcgcctgtaggtctgccttgccatggctgttcagtcattcgctctttcattaccacaaataaagcataaacaaggaaaagaaatctcaaactccccatcaaagaaacgtttccctgaggcaagaggcatcactagattcctaaaaatgagggtattctgctccagctgcacgcgcaatggtacgtggggaggagggagcaccaaagggaaaggaaggagggcctgggacccgggtgtttatgggcagagaagcctggagagtccctgctcagcctccactgccggcctctgcttggctttgagctcagcaatacaaatctcttctttggctcttttgctactacctaagactactctgtaaacaaactggaaatccaagttgcaaaaaatatatataacaaagggataaggaatccacttagcccaatgtgaaacacagattggttcttatgtaaaaaaaggagtcagagcagaggccgggccanagggcggacagaggtcttgctccttgggaaacggggaaggcagcannactctgatgaggatgagtactgggcgctgtacctgggagtcaggagcaagagcggtcgttttccacggtgtatgtgctgaggacacgtaactctcacgtgctgatcactanctgagcatcagtcagactcactgtggcaagactcacagacagcagtgcctcaatcttgtgaaagcatggtgagtgggctaggactcgcatactgctatcctcgatcatctcagtcttcgaatcacttcatcaaataccatgctgggagccagatcaggcatctg

SEQ ID NO: 132045 - DNA, 762 bp, Homo Sapiens
ttttttgctaggtgattacaacagctgatttttatttttcttcttgattctcttctacagtttccaaattctctacaatgaacatgtacttctttttaatatcaaaagacaaaagaattggtacgtaaaaagaacatccttcccatcttcaaggtcaagattgaacgctgactcctgcaggaagtcttccaggattcccaggcaggaatgatggctccctgtccctgtagctccaggagttcttgcttcacgcacgcctcacataccagactgaatgttggcaggaggagtgaccaggtcggtcatctgtgtccctaccacctacaacaggccagcaatctacccgtgtgtgtttgttggacagaattaaccatgatgggcggccgagggcgcctggagctatttgggggcttggagagaacctcttaggagagtgtcaggccctaggccagtgtcaccagaggaggtcagtctcagtccttggagtggtgggatggaaaccagacgggactggcatggtccacagttcttgccacaagagggcttcaggagaggctgagggcccctctgaggcgtgtgcttggtcagggtgagcaagggcaatgcagctcatacaaaggcccagatggacagagggacctagcccagcccacgcatcggtaccgagcctggctcaggggcaggccgaggcttgtgcagtagacaaacatttacagcagacaccaggcagctcctggaaaccactccccaaaaaacagcacc

SEQ ID NO: 132046 - DNA, 730 bp, Homo Sapiens
  misc_feature (659)..(659): n is a, c, g, or t
tttttacaaaacaaaacgcttttatttggtccattggagcctgagtcggaagccactgtggagaatcctatcataaaggaatggggctgacagttgataaaatagtctctgtgtcacaagagcgggccgtattcacagggttaaaaatattcacagctcagagtacagggacgccaaagggcagtgggaatgtttctctaggtgaaaaggccccagaagcccctgctggggtaggagggggagtggggggcgcagctggcccgctgccgggggtgaggggccaggtgggccgggtggggatgcaggaagctgggctcagacgtccacacactcctgggtttctgtggggaggtgggagcggctgagtcctgccgatgcccaagatgggctggggtccctctctggcagggccaggccgagggacagggttggctgaggagcctgctggtcccggcgtgtattagggcataatttctaactttttagtagctgcagtatctcttttttgactcaatatcattaaattatcatttgggcttaatgtaacatggcatttatatagttcttgatctttactgataatgtataatcacaggcttactatttgtatggaagattctcatatccactagggtgattttcacgtgtatttgacttanaaactaaagagttgtacattgcttatatagaacattaaatacattaagccattaattggcaactaggccat

SEQ ID NO: 132047 - DNA, 1520 bp, Homo Sapiens
  misc_feature (937)..(968): n is a, c, g, or t
acaaaacaaaacgcttttatttggtccattggagcctgagtcggaagccactgtggagaatcctatggtaaaggaacgggactgacaattgataaaatagtctctgtgtcacaagagctggccgtatttacagggttaaaaatattcacagctcagagtacagggaggccaaaggggagtgggaatgtttctccaggtgaaaaggccccggaagcccctgccggggtaggagggggagtgggggcgaggccggcccgctgccgggagtgaggggccaggagggcacgcagaaagctgggctcagacgtccacacactcctgggcttctgtggggaggtgggagcggctgagccctgcccgtgcccacgatgtgctggggtccctctctggcagggccgggccgagggacagggttggctgaggagcctgctggtcccagtgtgcccggcagcagtgagcggtgctgagaactggtgcccacccacagcgggcctggcgcccgcctgcacccagtcatggcttcgatcctggcgggcactccaggatttgcatagtgtcgctggggggctggccaagggccccttcttctgagacaggcaccgccccgggactcgccgctccacaccagggctccagggaccccgcctgccctgtgggggacagggacccgggctctgggggaaaactgaccttatgccccgtgaggggtggtccctgatcccaccccagggtcttggcctctgacacccagatttggttttgcggacagagctcctggctgcctagcccgcaggagaccctgagcccacagggaggggcagcctggcctcggcccccgtcgggtgttggggctggcaggtgagcggggctggttcacagcccgcctggttcgaggtattctgcgtggcggccaggaggcctggccaggcggactgtnnnnnnnnnnnnnnnnnnnnnnnnnnnnnnnnggcccatgggaagctgagtcctgggctggcagctccctgggcggggtcctgagattctggctcaagcgtcctctgtcggggtctccctcataaagtgcgtgtgggggtggggggtccgtctgtgcacagcccctgccccaggcatggtggtcacagcggtcggggcccatgcagaccggcgacctctggcgtgagtggggggctgtgggtccccttggaggctgtccagtcactgaggaaggcctgggctgccttgcgatgtgccaggcggtgggtgatagagaagccggcgttgccctctagctgggacaagatcaccaggacctgcctgtgcaggggtggcacgctatcctgggtacgcaggctgccgcgtgtggacaccacgttgaagctgtcggtgcagtcacactgcacgtgcaggtaggccttggggtgtcggttctccaccaccacgatgagccccgcccaaccgtgtgtcaggtagtagcaggtcatgccctcctcgtgccagattcagccacccaggcctcagtacctagcacatatgttgca

SEQ ID NO: 132048 - DNA, 592 bp, Homo Sapiens
tggagtcccgtcatcgctccggttctcgaggctgcctgcgtcggggggcccatgggaaagctgagccctgggctggcagctccctgggcggggtcctgagattctggctcaagcgtcctctgtcggggtctccctcataaagtgcgtgtgggggtggggggtccgtctgtgcacagcccctgccccaggcatggtggtcacagcggtcggggcccatgcagaccggcgacctctggcgtgagtggggggctgtgggtccccttggaggctgtccagtcactgaggaaggcctgggctgccttgcgatgtgccaggcggtgggtgatagagaagccggcgttgccctctagctgggacaagatcaccaggacctgcctgtgcaggggtggcacgctatcctgggtacgcaggctgccgcgtgtggacaccacgttgaagctgtcggtgcagtcacactgcacgtgcaggtaggccttggggtgtcggttctccaccaccacgatgagccccgcccaaccgtgtgtcaggtagtagcaggtcatgccctcctcgtgccgaattcgccacccagcctcgtacctagcactaagtt

SEQ ID NO: 132049 - DNA, 853 bp, Homo Sapiens
aaatcacactgtacaaatttagatagaacattatcaatgctcagatttataaaaatgggaacagaaagactaaagctagcgaaggaacgtacatttctgttttgtctttttaaattaggaaggtaaaagtgattttttcttcaggtgcagtgatagtaaatgtctagaagacatccgaagagccagaaataaaaagcacaggagccgcctgcagactctcagagttctgtcttcacccactgaatccgaagtggatgcgtgtggcgctcccgcagggtggcctggccccgtggatccacgccgaacgctcaacgagattcccaaggctggctgtgtacagcctaaaactttgtgctcagagaaaaaccagcatgatgggttcatcaactcctgtttctcaaacaaaatgagttttctgtacacttgttacaaaggtctgtacaaaagcacgaagctgctgtgaggtgttatttccgaaagagttaaaaatggatggaagggagctgttcgtacagttccgcctgtacattcacagagggaggacaccataaaaaaaggactcactcagaaattccagaccggagaatcctggcttcttaaaagattattttgaaagcttggaataagtttcagctctgccatttccaaccgcttcgcccagcatcgtcatagttcagcttcctctaaaactatattctccctttcttacacgcaaactaccaggaaaataaccgcaacccagtgaaactatggggcttctgtgaatataaggaacgaggcagggagaagtcgtaaaagctgcgggctcagagcccggagcgcccttcacattccgggtggccgtggcggccgc

SEQ ID NO: 132050 - DNA, 1652 bp, Homo Sapiens
  misc_feature (1623)..(1623): n is a, c, g, or t
  misc_feature (1636)..(1636): n is a, c, g, or t
atttggaaaatgtcagtttattacacctgtttttagatcttgttattaaatacatgaaaaagaagcacattagtttcataattttttagcattttggtaaactgtttccattggtttcccttataatcctatacattttatgggttttgttgttgttgttgttctgtttttgagacagtctcactctgttgcccaggctgtctaaaaaataataataataaaaagcattttgaaattagtcgtggtcaatgcaattctactctttggaatccgtttagctaaatgaatgtagtgctcttgttgaatggaaacaggtgataggaaatgcctaccatttgactcaatatggataatcaagagttgctcaggatgcttggatctgggggtagattctcattcatcattgccctggcacatgtcaattactacataaaaggtcaaatgcaatgtcaaatccaaagcctcaggaggaaagtgagttcagttcccaagagaacagcaatagctcaacaatgtaaaacttcatctagagtatatcggcattaaattagtgctgtcgaaacaatacgttgaggaattacagtaacacctggaagttccttctcatgtacatataaatagaatcatggaagctttttatattacctgttttatggccttatagaattaatgaaccaaatgaaaactgaatctccattccacaatcccatcctttatttctattcttattttcaaggtagtattaagtgtccatatttctcaagccacattcaaggaaatcatgtcttaactattttggatgttgcctctccttcatcttgtacatgaaactccagcagatttaatattggcatccatcatctagtcaaacctctcacatgttcttcaaatcaatcaaatttgggattctcaacattttctgtgtcaataaaaggtgtggaattagtagattcgatgaagacctgtttttccttgccacattggacttccagacgccatttggattgggtttagaagatggggaaatttagaagacgtttcttggcctgagtctcttaagagtagagatgcagaagagagagtgagaccacgaagagactggctgttgactgcagggcaccaccagccgccttggtggtggcattagttggatttggggccaacccagagttggaagtactctgggaggagttacttgaagttccagttgttgtttcactggaataaatctgcgtgggtaggagcagtgccagcagcagcagccccagcccgagcctggccaccattgctctgcccatgtcccctccgtcggtgcgcggcgcgtctagcaggatgctgggtgcttggagaaccgctggctccgggcgggcgcaggcaaggtggggagcgcggcgagccggcgagaccccccaaaagaaaagtccgcgcctccgctgcggcggggtagccgcctgtcctggagcaagtgcattgccactcagactgcaaaatgcgccccggggacccgagaggggctgcgaattccagtgcgaccgcgtggggggcgggcgccgggacccctcgggcagggcgacagcgtggtcgacgatatcccggaattccgaccgtaccagcctgcttttnttacacactgttntatagtacactagcac

SEQ ID NO: 132051 - DNA, 1185 bp, Homo Sapiens
  misc_feature (1122)..(1122): n is a, c, g, or t
taagacagctgcaataagggcccacacccagagaaggggcattttagtgggtttctacaaacatttcaagacacttggggtctgataggctccacagattttctgtgtgcataattagtttgtggaatatcatcccctttaccttagtttacccacatccagacccaccgctgagaaggcttgatccagaaaatgaaagggacacattactgttaacagcagtgaaggtcattttccctgatgtgaggggcccatggcaaaagcttctgtccttcacatgattggcttggcagtgaaaatcaaaatcaatcaagaccacttcactatcttttttaaaaagttgagtatttttattgggtcttcaaatctgggtcccacagtcctcatttgatgtcactcttagctctgtactgatctctcctctgacttttacggagggcttgccaaagtagcctattgcagccaaagtttcactccaaagctacctctctaaggtctaaggttactatggtaaagttttatacaacagttttccttaaaaatattccacgatttgttactcccaaacaaaataagattatgcaccactcggagaaattagtcattctgaagatgtctaagaactatatcactgccaaagaacatttctcagttcatattctttccttcaattttcatttgcacatccacactgtggggttcacaagtcatctgttttccatgatcttatggtcaagtcaagaggacttagacttatacatcattttccaacagctggatgcattcacagtttggtgcataccaatatgtatgaaaataagaacctcacttccgttttaatctgataattcaacatcagagtcttcagatttggctttggcaagttcttcatgtacctccctcaccatgagaatacgtgttaacatggtgtccagggttccagggtctatcgggaatgtggagtaccacatggggctattcgggacacaggagcgctcaggttgaaggttaaacacatcattcctttgcttcacactttcagaacattttgacaggtaaaactcataaagtcggactgggcatcttagtggattgtcagtattctctgccatctccaccccnactggaacctcatcatcttcatttcgtttcctcttgccaacagtcagtttatctggttctgac

SEQ ID NO: 132052 - DNA, 750 bp, Homo Sapiens
atttatgcctttatttatttttaccaatagttgatatacctatataatattcacgtgccacaaaaatatgagaagattacatgtgaatattgatctcatgggtgataaagtatacaaaatgttgattaactgaagcagaaatccattgagaaatgcttataaccatcaggtattacatttacagatgttgccaagtcaaagttgaacatccacagtgggacactcatcataaactctgtttaatctttaaaaggagacagagaaatagccaagtacgtagtaataaaatctgcctaatcattctcctacgattcttctatgcttgagttcgttttataggagtcttattacatgcacgtttacattccttcccgatatacatattctcaaggaaacgtggcgtcctgtagcccctgcttagaatgaaatccttaaaggcaactgttccgtgaaggtctgcaagtaactcctcctgttcctgcagctcctttttaaaattctcctcttgagccttatgtgagacctcagggtcaaccagaggctcgtctactctttgctttttccacaacttggggttcaaataccatgctccatacctcatcttcacccactttggcttataaggattctgtggtttctggagtttcctctcatagcctagtttctggaagactctgtctcctgcagtttactgagcccacactacgctttagctccagaggaacctgatttagcttcatcgtgtggagc

SEQ ID NO: 132053 - DNA, 1384 bp, Homo Sapiens
  misc_feature (636)..(636): n is a, c, g, or t
atattacccttataataaaaaactttatttaataaaaaaaattccccaaaccacagcaggaacaattaggtatgacaagagtgggagtgtttttctttgtagggctgagatacacaaaggaagcgggagagggcggagcgccaccaggaggctgcgggcgtggagcggggacaaggaggggtcggctgtctgaagcagtcaggctcagtcccagggtggctgggcctggcgtcggccatggccactgccaccaagggcagacaggcggggcaagggctcttctgggccatacttctggatctccaggtcagggtagacgggagagatggggcggactggagcttgctgggtcgagtagggctcgggagtctctgcacagggaggtcacctcgtggctgtgccccaggactctgccttgcctgctcttgcactcaggagcatctttgggggacagccccccaccccacccaaagtctcctcagtgggaggcaaggccccaggccccagacgaagagcaggcagtggtgtcctgtcccttgggccccagctccgggctgccctactccatttgtctctaaggcagatttccatgtccccctccctcccctggacccatgtggcctgcaggggcagggnccaacccacattgggcagcagtcacaaaacaacagactttaatggaaatcatgaaggagggaagcgggcggaccgggaaggggctgagtgacatcgcccatgccgctccctccgccaagcctgagcagctcctgatgccaccctctcctcacactccccagatcttttggcaggagggcagaaggttggaggccccttgttcagcatgcctgcagtgagcccagtgaggatgcggtggtagaaacggagctggggcagtagagtgggctcagcgggagtgagcagcaggaggaggtgttgtttaagccagaatgattcccaagtttccccaaggaagggctgtttgtctcctgggtctcggaggagtggggattggaggaagtcaattgcccccagtgcgggcctggtaccattaaaaggggcacagggtgggggagatgccagcctgagaaggacaggtgtgagcttggtggcactgtggttgttggcttaagggggaggggaacagagtgccctgcttgtgcccagagtggtgcttgtggggttgaccagaaatccccaagtcccctagcgccatcccctgctgaagttgtgcctgggctgagcacctggtctacctgtccccaccccgatcccagacacctagcatccctctatttggcctcctgtaatgtccccacggccaccttcactgcttggaacacagcccagtccatctaggaaaaagagagaggacaaagcattttca

SEQ ID NO: 132054 - DNA, 665 bp, Homo Sapiens
tttacttagtattagcatttgttgaaaaaataaatggccaaagtgctttaattttcatttagaatgaaataatctggcttacctttgactaattaaagaaaatatagggtaatacaattgttcaaaatctaacacaaataggagcgtttactatttttgtctgctttaagattttaacttgatcgaaaataccaacatccccaaacaaaatttactgacctgacatcagcttactatagactgaatacactttcaacatcagtccttagctacctcaaataatgacacaaagtcttagtttcttttgcataaggatcaagatcaagctatttttaaaacaatttaaatggtctcaaaacattctccaacttaagtgcaaatttgagtacacataatatttccaaagagtagaactgtttttagattatctttggattctaataaccattttgtccatttttaaataaattacaaaaaataacagttcagtgttttttttcttcaaattttcctaggcctttgttatggcaacacaatatatacttaacaggccagcttgcaaccagtactcagtacaaatcaaaggatgattgaagcctccaatatgattgaagcccttgtaaccacagctcccccaaaggcagtttacccctgccatataggtc

SEQ ID NO: 132055 - DNA, 685 bp, Homo Sapiens
ttccctgggctctgatcagactctttttattgttttgttttttataaacaagtctcaggtggaaaaagaaagaaagggaggagctagctctctgccttctcagccaattgaaatcgtggaaaccaatgggcttcagctagccccactcatcactgctgggggggaaaagacatccctactccccttccccgtggcactcatgatattctcaatgccccaacaagggtcatcttggttcctctcggcgtttctgtcctggcctttggctctggctccggctctgactccgagctccggccagggccccgggagcccctagagctgctggagcccctgtgaagagttgctgccggccgtggaacatgtgctggtgccctggccccgggacaggaagcttggtctgctgtatgggagccaggcctcttcatctgggtggagcacccgctgggctgccaggggcacggcctggaccgctttcctctccccactgcgctcccgctccagggaggacatgctgcctgctgccctcagctctagggcccagctcgcctcttcctctggcggtggcaagggtggtgggggcaagtccccaggactgttctccctcctgtagggaagagccttgtggtttcttccggaatcgagcacggggtccttgaacgtgggggagtcatctccccattcc

SEQ ID NO: 132056 - DNA, 967 bp, Homo Sapiens
  misc_feature (209)..(217): n is a, c, g, or t
ggatacaaagaaaattcagccctaccctgcataatttgaagacacagcagaaagggggcttagggatgaggtcctggtttttcttgtataaataggagtcatgggcgttagttctgtagtaataacttcccagcacctggacatctcttccagagttatcccactggcttggtgtgtatacattaggggaggataatctgatgctaacnnnnnnnnnctctttggttcttgaatagcttagtttctttaataacaagtcaaactttattacaacaataactgaagttattcttttaggttctcgtgaaattctcactgaaagccacattcttagcctaaggcatttcatcttttatgatataaaatgatggctatcaaatgattttccatacattgtactgatcaagttatacacccaggggtatatacactttcttcatgtttcttctttgtatatttggtgactgtatcgtcatagatgtacatattgtgtcggtagggctatgaggcatgttacaggaatgtaattttctcagaatttacactcactcgcagtcatttatttaaaaagataaaacaagataatgggttctttgtattggcactttgcaccagaaacatatcattatttattgatgtgattacttatttgttatccaccttgtactagtaagttttagcactgaattccttcttcactgttgtttgtatttatgaaattctgaaattatggggaatcagcgtaatgattaagttattcatcaccaggctgtaagcaatatcttgagtttgtagcttagaattgggaggatacttaacatttggaagacaagttcatttcatcttgagatcatggtgaaatattttggatatataaattccttaagctattgtaaccatgttttattgcaaagatgtaaaatatgccagatgtgtgtgagttggaaatcaaaaaaagcctcgtgcc

SEQ ID NO: 132057 - DNA, 856 bp, Homo Sapiens
  misc_feature (781)..(815): n is a, c, g, or t
ccatccataaattacttttatttctcattaaatgagcacagagtcattagtatattaataacagatatgtttattattacatatccatcagtgcggctttcaataccacttgaaacatgcatatcatcctagagacgatcggttttccagtgcttcttatctgatacacattactgcaaagccattataaattactgaggaggtatttggttaaaaaaataaacaataaatcatactgtccatatgaatcaactcttgttactggacaagagtttaacagtatttatctggtaattcctatgttaactggaaaacatcatggatgtattgccatatttcctttttatgttggtgcaaccttctacattttttgcagttttataaagtcattattgtagcaggtagtttgatgcaaagattgtactcaatttatgaaagtccaacaaacctctaaatattttaaattaaaccaattatcaatgaaaaactcactgacacacataattttttgaaaatacattttttggaatttctatacttactcatggcagtaaaataattatctcaaattaaggcactaaaaggacaatgcaacccccattgaaagtgttctaagaataatttacatttcaaacagtgcatacatttcttatatgtttgttaacttaatgtctttatcatttaaaaccacaaagaaatacattatacaattatagaaatgatgtacccccccggccgtaatggccgaattcccgggcatatgtccggtaccgtcgactgnnnnnnnnnnnnnnnnnnnnnnnnnnnnnnnnnnncggccgcttcctcgctcacagactcgctgcgctcgtcgttt

SEQ ID NO: 132058 - DNA, 752 bp, Homo Sapiens
aaaaggacaatgcaacccccattgaaagtgttctaagaataatttacatttcaaacagtgcatacatttcttatatgtttgttaacttaatgtctttatcatttaaaaccacaaagaaatacattatacaattatagaaatgatgtaccccacaaaatgcttttaaacttggttcttttgtacagttagtttcctaatgtctctagtagtaaaataactcaatatggcttggcaaaaatgcatagattaaatgtaacttttttttgtcctctcccattccccaaacttgctgaaacatatacagtattttgtaaagcataatgaaagatatttaatttctccatcaagtccaacatgggcaatcaacagtaaggcttttaaattctacagtgagggcactgaagttcaagtgatatcactgctttcttaaaatagttttgtatagtcttgcaagagcacaaaaacttaagtcattaaagaaaaaacgaaacttcagtttgtctcattttgagatattttctttactccttccatgagctgatcttgatagtgatggctgttccacttgaaagtgaaagtcccttcctcttactcatatgaggaaaactctgttctatcacgactgacaggcattttcttataaatccaaaaaggcagcaccttttaaaaaaaatatatctacctaagctttcccccaactgtacttgcattacatagtaataattaatctaatctacctgtaggcaaacccg

SEQ ID NO: 132059 - DNA, 1042 bp, Homo Sapiens
  misc_feature (574)..(574): n is a, c, g, or t
  misc_feature (1022)..(1022): n is a, c, g, or t
cgctgcccttatctcaaagtccgtggctgtttccccttcactgactcagctagacccgtaagcccacccttcccacagggaacaggctgctcccacctgggtcccgctgtgaccacggtgggcagcccaaaagatcaggggtggaggggcttccaggctgtactcctgccccgtgggccccgttctagaggtgcccttggcaggaccgtgcaggcagctcccctctgtggggcagtatctggtcctgtgccccagctgccaaaggagagtgggggccatgccccgcagtcagtgttggggggctcctgcctacagggagagggatggtggggaaggggtggagctgggggcagggcagcacagggaatatttttgtaactaactaactgctgtggttggagcgaatggaagttgggtgattttaagttattgttgccaaagagatgtaaagtttattgttgcttcgcagggggatttgttttgtgttttgtttgaggcttagaacgctggtgcaatgttttcttgttccttgttttttaagagaaatgaagctaagaaaaaagaaacctttgtngtgttgtcttctgaggtctgccgatgataaagtcctggacaggaggggctgtgccaggaacccgatgccagcccttcctggggccaggaggaagctgcccctctcctctcctccccactgtcctcggcacaccccggtggaggggatggtgttctggccctactgtgtgtgggggcgcaggggtagcgccctgcaggtctcccttcctgcaggccgagttggcctggtagggacgggtgaagaatggacctacaggcctctccaggacagcctcctccctgcccttctgagggcaatgtctgtctgtccctgggcccagggtggaaggcggaggcaggagagttgagcacagctgggcttccctgcaccctccgctggccagctctcaactgccctcctggcccgccaactctacagcttcctgtccccggggtgtgagtggctgtangcgggagtgagctctgctgg

SEQ ID NO: 132060 - DNA, 754 bp, Homo Sapiens
ttactttataaacaagaagtttaattgactcagttccacatggccggggaggcctcgggaaacttacaatcatggcagagggagaaacaagcaccttcttcacaaggcagcaggagagagacagtgacagcaggggaaactgctgtctttaaaaccagcagatcttgtgagaactccctctctattatgataacaacataggggaaaccacccccatgatcccatcacctcccatcaggtccctcccttgacacatggggattacaatttgagatgcaatttgggtggggacacaaagccaaaccatatcagatggtgaaaatgttatactaaaaatgcacagtctctacaaactccctggtttcttttctgtcagtgaagtcaaatatctacacaacggccctggacaatgctacagggaggacacattaccttaatcatctttctgtcccacttctcagccacaaaggcccgagaggggcatgaacttggctggtgagctctgcacctcaacattctcttcccaggcttgtctaatcaaagataactgttccaattacattttgaattggtaactttcagaaatgcacaattaggcatgctatccagatacaatgcacaatcagtattcccttattgaacacctatttttaaatatctgggtctctaccacctgtcattcttaaactacaggtccacatttgacaggaaccaagagcactgggcaggagctattttataaagtggatattgc

SEQ ID NO: 132061 - DNA, 1553 bp, Homo Sapiens
tttttgtccttccactcctgtggtattaagtactaaacagcctgaagtgcttcaaacacagacgtcagatgaacttggctcatcccaggcacaaagccacaagcaccatgaatgacgttaagtaacatgactaaggctgactggtgaattctcctggccacgcctcatgagaaaacaattacaccaatactctgaattggacctgcatattggtgaagtcaaaacttactgccattagttttgaaaacacagatttaggaatttgcagaatattttcaataagagaacaaacagcaatgtttctgcctctcagtgtgaaacctcttgctaatattgatcaaaagcatgacactttatcatctatctgtgttcatgttaaatctgtcatcagagatggtgatggagaaatatctaattgccatgtaaaaacacacaaaaattggacatgctatacatttatcttttaaaatgtagtctgtattattttcaccaaccaaaacacacataatatattttattataaaacattagcaatgttacttttgagatatgcaatctgaaaggtcacacttgtatttattaccaggaggaaataccagaggagtcacattagaaatcaaccagacagactcgtacgtggttatcgcaacttacacagcattaaatgcgggttgaagcagcacccgctccgtgtttcagacacggacttggggtgggcaaggggccctgtaagagggcttcctcctctcagtactggggctctgcgtctcacctgctcccatctccaggcccacggctgacacggtatgcacagccagggtttccagactgctctcctgctctcacagaactctgtctgctctctggactctgcccttgaaactgagacctggacatgggggagacagtcgtttccttcttggctggaaactaagtcaacaaatgaaacaaacctagtctaaattccaggataatagtaaattacctggtttataaaaatacatgtccaaaatagttacttcctgggttgtgtacaatataaattacaaaaataaaatagaaaagatgaaacagttgagcacatttttcagttctttaaccaacatcagcatttatccatagagatcagtttgaaaccatttgcgtggcaccaagaccctggcaaatctaggctcaggagagagaaccctgaagctggggtgaggtatttctgtggagccctgtggcctgtcctaggcacgctcgcctctacctggtggaagatggcctttccaggaaaccctccacaccgtcacgggctccatctgtggcaagtggctcgctgaatgcacagaggagcgagtgagcagaagggcgtctgcgggtgcctcgtcccccgtccacgtctcccggggagggagcatcacacagtgcagggcagctcgcgcattttcaacctctccctttcgtttttccttttaaagatagatcgacgcgtgggtcgacgatatcccgggaattccggaccggtaccagcctgcttttgtgttaacaacttgttcatagtcacctat

SEQ ID NO: 132062 - DNA, 2332 bp, Homo Sapiens
  misc_feature (711)..(719): n is a, c, g, or t
  misc_feature (1885)..(1920): n is a, c, g, or t
tttttctatacaagccatttatttgaaatgccaactatatgtaggataaagtcagtgttacatgcttatcagtaacagtagaaaaatagaagcagtgaaaacctctgtacaactgtaatggtactcaaaagagaaatgtatcgttttacaatgcttcacacagacgaattcaagtttggaggtacctaaataaaaatactatatatttctttaaaaatcactatgtacaattgaagcgtaaacaagttttacaaagtactggttatgcaggttgtagaaaacacttgcataggacatgaaatcagtttaagaaaaatttctgagcctttagcattgaaggcacttgactttataccagtaacagcacaaccacaagaaacgcagtgttgtagatgattttccacctctctgaagtacagatgtggtgcatacacagcagggagagttcaggaacctttatctctcagccaccccatcgaagagcaggacttggtaccgcctgcccatgtaacccagatacagttacatgtaggtacagatgatgaagcttccagagcttatctgatctcttagacagaactcacataaacacacaaatacaagaggttattttcaagacacacacttgcaagtaatctttctatagaaatggccacagcattataatattcaaaatatggaagattgacagtctgaggattttctagaggnnnnnnnnntcaaaggacttgccaaaaggataactacataccagatatgacaatctacaggacaaaaagacaacatgtcaccaaatattgttcatacaacagcgttaatggaaaacagtaaaacaccttttagcagtgtgcatgttaagtcttttagtaagattatctgtaatgaggtttgaaagtaaatcacttagtagacaaagtaaaccaccacagaaccaggaatagcacccatcactgctgctttgtcactcccagaaaagctgaaagtcaaccgaacaatgaaaaaaagtcaaagaagcatttccctttgaattcagtcctaaaaatatgaatgccttataattaatttcaaaataagtatcttacaagtgtttcatgaaacattgttttcctaaaaggcaaattcaacattatgaaaatatatattttgccgggttagttactgagaaatgtcaatcctttcaactctagagaatgatgcatggaggtcggctttgagccccactgccgctggcgcgtgtttccaatttgccttctgcatcggcaccttaatgcagatgtacaaggactaagctcattgctagaatggcaacaacaaaccaaaacaaaaatccaatgaaggatggcagatgcaataaaaagtttctgaggaagcaaaaacaagaattagttaaggcttcataaagaattctataagaagatttaaatgtcaagaattcactgaaaagcctcaaagcctaacgggttattgcggtgtcaggctagctgaggtctagtgacatgttcccagaaataaagctaaagggggcatgtgagaacgggcgtggaaaattgaaacaattacgtttcaaatactttttgcctttcatgatgctgttttttccttaggagccacgggtgactctgaacttcaattattcatcaaaatcacaaaactaaaacaataacataagaaaaaagaccaacagcatctttaagaaacttgaacgtcctctcggctctagcgtgtaaacggtaggtctctaacctcaacgcacagcgggcactggaagcggtgattgtccaaaggcctgattgtccacgatctcaaaaggagatctggtatttttgtgatttggttctcattaaattcctataccaagtaaaatgccagttcccatggcctaaannnnnnnnnnnnnnnnnnnnnnnnnnnnnnnnnnnnctgagagcaaccttactcagacttcacatttatcttagtacagcattaaaaaagatttaatagatgggttcaaaagccagaggcatgtagctcttgaacctaccctagtaaccatacttcacaagatacattaaaagtccactaacacctaacctaacgcacacaaaacccacgcctgtttaccttctgcaagtcgcatcggtccgcaatcccacagattaaagcaagttttccctttatacgcaaagttttagccaggtaagctattgtatgattaaaagcaaactttataaactaaataatcttaggaatagtggccacttacttttatatttcagggatatgagagaatagttcatgaattttcagaaaaatgaatggtgtggatcaacagctctggtctaacaattgc

SEQ ID NO: 132063 - DNA, 1136 bp, Homo Sapiens
  misc_feature (91)..(106): n is a, c, g, or t
  misc_feature (839)..(847): n is a, c, g, or t
ttttttttggagtcaacacttttaattgttcaatattttactacaaatataagaaacaatacagaattaaataacacatgaaaatcttgcnnnnnnnnnnnnnnnnaatatccaatttaacagcgaaaacaacttacactttaattcctaggccactggatagacacagacaaagcagaagatactgaaaaagcaactaattatggttattaaagattcaacatcattccactagctggaacaatatctttagaacaaagggattgtatgctcatatttgcctcctctgctattgggaaaagttaacgcatggaaaaagaagccagcagagacaaagcatatgaattggctgactgctatacaggaaatctcctaaacatctgttttcataatgtattttcattatatgaggctgaatttagaatgacgtaaaatagggctgggtcatgttataagacaaatggacagggagggcatgcttctcaaaaaatgtgagctattgtctaagactaacaatatttatctagctataaaaataagttaaatgaataagttaagattgccaatgttacttcacaataaattcagtcctatttgtgttggagtaaatctcatagaagcacatgaagaacagcagtgaaaccaaggattctagcaaggccagctattagcaaagcagtaagcaggaactggactagataccaaatgatggggaaacagactcatagacctaagaacataggaagaagagatgtaacatcaacagaaaggcaaaaggtaagctctctgtattctttcttctctctctctttcaattcttccccctttgcttattcccnnnnnnnnnctggaattacattttaaattaagttttagagctatgtggtaaattatttggtccaattcctttatactttggatgaggtaaagtgactaacagaggtccccaccagtaggagcccaagtcagtctgtgagctcagtgctcctgatactaactaagtccagtgccctttcaaccacataacatggcattgctttacaaaatcaagtcctacaacagacctgagaggtaaactgacttcctcttgggattcaaacactgagtagctcagatggcagtaaaaagtcgtggga

SEQ ID NO: 132064 - DNA, 3108 bp, Homo Sapiens
  misc_feature (429)..(463): n is a, c, g, or t
  misc_feature (1185)..(1185): n is a, c, g, or t
ttttatctacacaactcgcgaaaaaaagttcccaaagtatatttccctttgccccaaattttccagggctcccagtatctattccccttagtgtttaacacctcataccaccgttgaaaatttgtataatttccccttgaggccctttaaaaatctctctgagaggaaattgtggtcccccatattggtcgcccaccccccgagagataaaggtccccttctccccaaggtctccccagagttgccaggttgttccctccatctcaccgaccgttgtttaaaccggccggcccccttgtccttagccatatttaaatccggcgctcccctcttatggggccccctttgtgacccaaaaaacctgggtgacaccgcgtttaaacctgggcgccccccgcggggataatattttgggccgcgcgccccccnnnnnnnnnnnnnnnnnnnnnnnnnnnnnnnnnnngaactcccaagtacaaactttatttctattacaaggaagttaataattattataacagtaaaataaaaacaaggggaaggggctctgacacttggttttcagagcaagtgtggggctggggcagagcccaacatacctgctgtggggacagggagccctcagccctccccattagaaagcagtgaggacaaaagatccatgctcccccgggaacagaaggcagtgatgccaaatgccaaggaagcagcttaaaacacagcccccggtccactcacctccagctcaacacatcaaaagcctcgttactgacagacattgcaactggcctgagcaccttaccagagcgcctcatacacacctggggcccaatcgagtgtggacagacgcagtacacggagaggttgcccaaaagcccccaaatttaggccccaacagggcagagaatcaccttactggtggctaccaggtttccaaaatcttcccctccttccactgggaccacacagcaccaaggggcagtggcgacaataagtcaaaagggagccctggcagccgaggctgcagcttgtatttcactgctgccgaaaggtagcagctaaggctgaagcgttcctcaaccgccaccctgctcccttccctcaaacccaaacccccacagcacaacctcaaaagacacaaaatggccataacctagaaaaatctaaaatctggaaaaactctcnccacccaaagagccaaagaggtgggcctgcacagcggcaagtgctgctgtgcacagaagacaggaaccgatgtaaagtctctggagacaccattactcctcctcttcctcttctgcatccccagctccctgttgcttggaaggctttgcctttgcagttctgctgcggtagttggcagctgcaggggtgacccgggaattcctgccaccttcactcctaccactagctccgtatctccctgaaggcccaggggagaaagagggcacaatgttttctgggtagagattttgaggagggcgaatcactgaaacgtgcccaggggctatggccccattctggctgtctcgattccgcccctggatgtcctggctgtctgagttgctgagcttcggcacacaaggagagctgggctggcacccaggtctggggcctgatgttgatctcgatagctggttataggtagctgtcatattgttaatgggtcggctgggaggcagacaggaggtgggcccattagctgtttcctgcttagtatcatccaggtaaccagaagacaggtctccctggtgtctgacacgcctcctgggcagctctggtgaggtctcttgaggctgggaatccagtctaggaatcccctctgtcacatggttggttgcagtggctgggcgttggtcacactggtcctggtgatggaacagcacctcctcttccagctgtaccccacagaattcacatgggataatgatgctctcctccacagggtgtgaattgctcaggcccatcaaagagtctaactggttacttgcagcctgttgcaagaagttctggaagatgacatcaggttcctccacccctctgggggaagagctgccagtattgagtgaaggtaaggcacgtgaagggttacagcttgtctgatggtcaatcagcagttcctctgggtagagctcctcacaaaattcacaaggcaacatgatctcgtcagctgcaccctttatgtcactgagagaccctgggaccgccatgagactggtcggcctcacatacggccctcccagaagtcctgctctgccacactggaggcttggccttcattttgcagacttagggccaacatgaagtccaagtttgcactctcttcaccaccctctttggggggctgttggcctctattcctttcctgcctctcttgttcttcaaacagattattctgaattgaaacctgggctgtaatgttcctttggttggtagttctattgtggaaaacatctgattcaaaggctctcaggggccttcgcggcagcctcatgggtgggtccagagcctcaatttgtctgaggagttgggatgcaatccagattccatcctgaccccaagattcatcatatgcattaggaggtatggcaacctcatttctcttttcctccccctctctcccacaaacttcagggtgagtcttcagatctttcacaaggacattgcgaccacagttgccacatagttccgtccgggcaccacaataatcttcatgttccttcagtttgagaatggaaagttctaaatcacagtgctggcagacagcaagccgcaaagggcactcagtctcctcatgcttctttaacagcctcttctccaacttcttgttacatttgcaggtcacctgacagtgttctgcagccatgtgagtctccatgtcagatttgggaaatggttccttacaggtaggacacataccaatgttcctttgacagtggatctcatggatggtaaagttaaacacaggaatttcttttttgcagttgtcacacagtcgagtttcctggtcatctagaaattcagccatctttagctcttccagggacgagaggagaaacgctgagttgacacactagctgcagacacgatcccgggaattccggaccg

SEQ ID NO: 132065 - DNA, 908 bp, Homo Sapiens
  misc_feature (786)..(786): n is a, c, g, or t
  misc_feature (852)..(852): n is a, c, g, or t
gggagggttacaatcacacgagcaccattgatggagggcgggtactgattgagggtggcgttcgcctgctcgtagtttttactgacttccctcgtgtgaagtccgatgcttgcgttgcgcagggccagggtgtcatagatgcatgagctatctccgtcacagtgggagatcaaatgttcagcccaggagctgttttttggcagttgtgagtagaaaacaggggtgaagttggaaggcagctggtcattcctcttgccaaggaggcctgtcccgttgatctgccaggtcattccaaagtggaaaagcatctcctcagggctccctgggggaatggtggagccattgggcatcctgaagtcgtcctctggattgttattccagacccccaggagcccctccgtgcggttctggtactcgggcgggaggctggcggaggagtggaggatgttggagagcgcgatcaccgagacggtggcccagccgtcgaagctggcggagacctcagagccgttgcggctcaggaggactccggtggcgttgaacgtctcctggcctccgccgtcttcatggtcaggctgaaatgtcacagtctggttatccagcaggacacggattgcgtcgtgaggctcaaggagccattggaccgtgacggggcccaggctgctggagcggtactgagccgcaaaggcgatgaagttggtggcctgggctgagccagtctgggcggtgcggccctgaagcaggaaggaggagttcccgtcttgggccccgaccagcaggaagtcncccagcccattgaaggtgtaactgacaccatccaaggtggtgatgtgggggtccccgaacatccangcgggctgtgggggcctgtatgtagcacagcccacgtggggcccctctgctggtac

SEQ ID NO: 132066 - DNA, 982 bp, Homo Sapiens
  misc_feature (38)..(38): n is a, c, g, or t
  misc_feature (123)..(123): n is a, c, g, or t
  misc_feature (125)..(125): n is a, c, g, or t
  misc_feature (150)..(150): n is a, c, g, or t
  misc_feature (242)..(242): n is a, c, g, or t
  misc_feature (384)..(384): n is a, c, g, or t
ggggcttttcaagcaactgggaaggtccatccaggatntggtaggtttaatggatgtacctgtgttcctgtttaactcctcccaaaaaaaggaatggccccatcagtttcaccagcccataancncatgcatgaggtactccttttgccntggtcccaaccacaacaaaaggcttttaatccatatcccaagaagaagcctgcacagaagggtagcgtgatcttcacagtcacccttgtttntacagagaagggccagcagagtgcaccactgctcctgtttacctcctcctccaataacaggggctcgttcataaccaaggaccattaacaaatcttgctgcttgccttggagtatcaagaagccgtccagctcgaagtggtntaacataggaacagactggtctatttatcccattttcatcctgtgcaaaaatcttaaccagtcgtgagttgtgtgagggtcgaatttgcaaatattctctccaccactgcttagcatatacaagaaataatcgctctttctctgcagttttctgacgttccaaagcaagctgtgtgttcactacttcttgagataacgtttgattgagtggtggatacatttcaagttttatatttaaaattcccacagaaacttttgattctgtgcctacacccataagttccacagtcagactggtcactccattttctgagcccaaaaccgatcgccattccagaaaatatgatgctactaaagtcgtctcaccaaatatgtctgttttgattagcaccatatgaattggatcacttattgataacattgttgttgaatcagccattctagttccatcacccaagctttctctgtgtacttcaagtaaaaagccatcatgaaaatctggttcacaggcacatggaacaggtttagaacgaaaacgttggtttcgataatgtaaacataaagtaaacgttgaacaaacttgtccaggtaaaggctc

SEQ ID NO: 132067 - DNA, 1322 bp, Homo Sapiens
  misc_feature (144)..(169): n is a, c, g, or t
  misc_feature (1098)..(1098): n is a, c, g, or t
  misc_feature (1106)..(1106): n is a, c, g, or t
  misc_feature (1177)..(1177): n is a, c, g, or t
  misc_feature (1193)..(1194): n is a, c, g, or t
ttaaggagcaccccttcccccagttgagtatgattactcaatgggaagcagtaatacaaatggaaaaatcttccctcctatattgaggaaagaagataaaataagattaagccatgtttagcactgagtattttaacacatggnnnnnnnnnnnnnnnnnnnnnnnnnnaataccatacttcagattacaatacccaaaattctaaggtcctaatgttaatgatagtatctcaatgtccattttcggtttgtttcaacatgattttctccttttgcctctgtgtcacacgtagtctttcccgctggaaggtgcaggttttggatagggccttggtgttgggtaagaggttgtttttcggggacaggaacagcaaagtagggcacctcccagaaggcagagagaagcagcagcccagccagtgaagagagcctgaccaaattcgtacctggcattgactggggtcatagggtcatagaattcttgaacgattctattgccataccatgctgtggcaactaaaatagccagacctgcaagaagaaatatcgcgcccccaatgacagccatcctcatcttctgcacctcatcgtcttccaagcacttcatacacttcatgccaacggtggccacaaagattgctatcactcccaggaggatgccaaccaccatcaaggcacgggttgcttgcaatgtgctgctcagattcagcaaggagtcaaagactttgcactggatctgcccggtgctctgcgacacgcaggacatccacagcccctcgtacatggcctgggcggtcacgatgttgtcgccggcataggagtaaatcctccactggggcagggcagtgctgacgatggcgccgatccatcccaggaaggcgagaatgaagcccaacagctgcagccccgcgttggccatgactcgctcgggcgcccgcgctggctcaggggtggcaggtgcagaaggcggagagtttgcaggtgggcaacccggactcccgaaggtggctgggccccgcggaggacgttaaggcggggagccctgctcgctgcgccgccgctggagaagctctgggtcggggttgggtccgcgccggngcgggctngatctggtatcctcgtgcccgatctggctcgaggggcaatcctataggagtctataaatcgtatcatgcanactgttctgtgtgaanntgtatcgtcacattcaacacaacgagcggagcataatgtaagctgggtgctatgatgagctatcacatatgcgtggctatgccgcttcatcggaactgctgcactgatatgacgcagccgggagcgtg

SEQ ID NO: 132068 - DNA, 1005 bp, Homo Sapiens
  misc_feature (764)..(764): n is a, c, g, or t
tttttttctggctacaaattttattccgttacaaatagcaccgagcccttggggctgcccctgtggagagggatccccctcctggacccccacctcctcccctgagctacccaggtagtgtctgggagctggcacacggcccagggtccctctggaagctgggccaggccaaggggttaggcccaggcccttcgtggggtgggcccagggccagctgtggcagatgtgcaggtaggtgagcggcagcctctcagatgagcacactggccacgggcacgcgggtggagcggccccgctggggcaccacaatccggtcgtctgtggaccctgcttcgtgcagcaggccctgcacgtgcagctgtgcccgccggcggtcggcctcaatgaagatggcggtgcccaggaaggctgcgccgcccagtgccccaacaaacgcgcagagcatgagcgagaactgcagagcccggaactcggacaagaaggaggggggccagttccggcgcaggcggtcagagatcaggccaatgaggtaggggctcccagcatcacccagcaggtgggacagcacgatctggaaggcctcggcggtggagcgtcgggtagggatcaccacgtacagcagaatgtcggccacgatggcccagttcatggacaggagggtctctccattgaagatgaaaatataagtggccacgatgctaccacgggcgcaggcaagggacaggaataggaagggtgcagagtccaggaggccagtgccacanaccatgggatcagcccggggtttgtttggcggagccgcggtgattccacaccaggcccaacccaggatccggtcaggatgttatgattccataacatactgtcaaagatgacatgatctcgggaaggagggtgggctcccatgacaccggtaccatatgatgccggccaatatcacgagcctgtaagcgaactatatccacggaaaagaaactggttctgcagacccaatgccacagaggg

SEQ ID NO: 132069 - DNA, 1130 bp, Homo Sapiens
taaacttggctaagttgccctttattaacgaaaacatagagctttcggtcaattccaccacggagaacacaaaccagagataaaacccacaccaagggctatttcccaagctggggaatttgagaacacacgggcagagttcacgccacacaactacactgggctcgtccttgggaggcgttcacaggaagcaatcacgagcgccaagccacccacaaggcagtgcggcaaggctcccgggatccttacaggcatccaagcgaggtacagaaacctccacagcagtggggataaggggaaaatattttctcttgctaaagaatatccttagttctcaacataaacatgactacgtatatattcagcttcaaatgaaaaacaagtttacaaatcactactggatacttaaactctatgttgcttttctttttggcagcaccagcctaaactctgtgggtttgcaatatttcagaaacttcaggtacattacagtcttctgagaaaggcccagaacttcagaattcctggagcggccagaatgtttttggcttcttctgcatcctgcaaagggctctctccatattcttccttcagccactgccgatactgatggacctcatgcttctcaaactcctggagctgtctctggaagcccacgttggggttggcacaggatctcccagcacgcacggtgtgcagggcatcctcccagccaaagtcagtgacggtcatgatgtatgcgatcaccagtgtcacgctcctggagaccccggccaggcagtgtacaaggcagctctcaccgcggagccggcactcgtgaatgaatttaatactttctttgaaatgtcttgtcaggttttgagatggtgaatccgctgctgggatgcacaggtatttaactccctccaacataggcctggcactatcgtggacagacagaatatgtgtcaccttgttcttgctcaattgttccgcgtctctggcatctttgaagttgccgatgtacaggccgggcaggatcttgttcatcccattccccatggtggctgaaggcgaacgctagcgccccggccgtgtggtcgcaggcgcactatggcatgttacagggaggaggagcggcggggcgggcg

SEQ ID NO: 132070 - DNA, 1395 bp, Homo Sapiens
gaaggggcaaaggagccagtgccccagcccatggggcaactatcccccgggggcagccaagttcaggtccaaccccggttaggggtgggccgaattccagggccctggaaccagggcttggccggttttgcttgggggaaaggagcccttgcccccacttgccttgggtaattccctttcctgtcttcatgggcccccacccacggcacccttgcccagccgggcacactggagacaagcattgtgaaggaaggcagcaggtcgcttgctttaggtctcccgtcgtataattatcgtaggtcagcggagccagtgccggaaaactggctccaccgccttggcgcctggcttggggtctctgtgcgccccttgctccttaatatttacccagaatgtttttggcttcttctgcatcctgcaaagggctctctccatattcttccttcagccactgccgatactgatggacctcatgcttctcaaactcctggagctgtctctggaagcccacgttggggttggcacaggatctcccagcacgcacggtgtgcagggcatcctcccagccaaagtcagtgacggtcatgatgtatgcgatcaccagtgtcacgctcctggagaccccggccaggcagtgtacaaggcagctctcaccgcggagccggcactcgtgaatgaatttaatactttctttgaaatgtcttgtcaggttttgagatggtgaatccgctgctgggatgcacaggtatttaactccctccaacataggcctggcactatcgtggacagacagaatatgtgtcaccttgttcttgctcaattgttccgcgtctctggcatctttgaagttgccgatgtacaggccgggcaggatcttgttcatcccattccccatggtggctgaaggcgaacgctagcgccccggccgtgtgtgtcgcaggcgcactatggcatgttacagggaggaggaccgtcgggcgcgggcggggaggaggcgcgccgggagggactgagtgctcgcagtgtcaacaagtcagcggcagggaccggccgggcaacccagggcgctccagagacccggcgtggagggcagggctttctgtgcggcggcctagaacttcccggcgggagccgggcaggggcaccggagcctatgccgggaaatggtcccgccttgccggtccccgcccccgtgcgcaccgggcaggcccagcgtccctcctcgctccgcccgcccgcaccctgggattcgtagtcgggttcctggctgccgcgccccactccgccctcgcggaccccggctcgcggccgccgggcgtgggaggcactaggctcggcctcgtgccgaattcgccacccaggcctcgctaccttagaaccgttatgttactgcca

SEQ ID NO: 132071 - DNA, 1378 bp, Homo Sapiens
  misc_feature (21)..(21): n is a, c, g, or t
  misc_feature (44)..(74): n is a, c, g, or t
  misc_feature (703)..(713): n is a, c, g, or t
  misc_feature (897)..(897): n is a, c, g, or t
  misc_feature (1250)..(1284): n is a, c, g, or t
  misc_feature (1288)..(1331): n is a, c, g, or t
ccctcaactaaagggaataangcttgcggccgcatacgcggtcnnnnnnnnnnnnnnnnnnnnnnnnnnnnnnntcattaaaatatttaactttattaacagaatatttacatttcttttaagaccttatttaaccatagtgagtgttccaagtttaaaaagcattaagcaataaccacacacaagatgaaaacagtgtaaactatacagttctttatatacaatttttacaaagtaacacttttttaaataatataactggacacaaaaatatacactttagagaaattcacatcggtaattgtataaagctctcctctagggtcctgaaaatttaggacaaacattagctctgtaaataaagtgttactgtgacagtcctgaaaggccactatatatatttatctacataatagatatcacactgacattttcaaggctaccagctttactatataatttttagattatgtattcaagtgttgaggtgcttatgattatgcaaacattaaaagaatagtggtataagaagtagctggggaataaatttgagccagcatttagattacaggctctaaataccccaacttaaatgctaaatggctgatactttctcacttcaaaaacagtagtgaataatgtttaaaagtactgcaaacaagctcaaaacatgattcagatttagtacagttttcttaagagnnnnnnnnnnnaaatgcaaacaattcatttaccatttctttgttttagtgcatctgcattaaggctttgaattatttgacccaagattttacaatattaaaatctgactcaaaattttacaatgttaaaacaaataggtccacaaccatactacctactgtgtctcactgagtcagcatagagttaaagctcaancaccttaaggaaatggtagcagagacatttgctaatatctaagaagttacatatatagtttttaattaaaggatgtataataaaacaaatagcttagtggcaagaaattggtgctaataaacaaaggtttttcaaaagaaattgtaacatctttggaaaactgtctggttctaagttcccacttcctttagttcccacggagttcatgcagatacatttcttaagacaatcttaaagtacactgtggatggaaatggaatgtacatccagaactagaggtgaaaactaagacctgggtgctgcccggccgtaatggccgaattcccgggcatatgtccggtaccgtcgactgnnnnnnnnnnnnnnnnnnnnnnnnnnnnnnnnnnncggnnnnnnnnnnnnnnnnnnnnnnnnnnnnnnnnnnnnnnnnnnnnaaagagtagcgccctatagtgagttcggaataacaagggttttcttt

SEQ ID NO: 132072 - DNA, 1149 bp, Homo Sapiens
ttttttttagggttcaagtcagactgtttcccaaggcaccaacaaagaaatccaggaaggccctcttggcccagccaagagaacgagggctgcagctgcagaggcgttcactaaagatgtatttccctgaggccccgcacctgatgccactgttgccccaccctgacccacgttccctgctgcctctccctctggccagcccctccctccctgcggctgcagcgtcgtcagagctctctggggatgatggagaagggcagtacagggctgctggcctccagctcaagggcggtgaggaagcagtcaacggcagcctcgttctggccctgggcctgcagcacctcgcccaggccctgccacgcctcgtggcacgtactctgcctctccacggcatcacgaagcaccttctgggccaagctcttgtggcccagccgactcagcatcagacccaggctatgcatgatgcgcacgccatctgggttcaccgtgagcgcctccttgtacagctgcttggcctcctccaggttgcccttcacctcagccagccggccccgcatatagagtactgagtgagaagtggggaagaggcccgccgcctcctggatgcagaaacctgcttccttgaggtgctgctgctccatgaacagctcagcagcctgcagccagatctgttccagcgtggtccacagctgcatggggccctgcttcaggaccgaagagggcatagtcagctctgacatggcctcctccagccgggaggcggctatgtgatgaagcccgtcgggagccagagtctgcatcgtggagcatccgtcgccagagtcaggtgcctgcccactctgcttcttcatggtgagggccttcaccgaagctgccatccttttctaggcctcccagctgggagaagctgtacagggtctgccacagcctcagcacttgtctgcaggtcacgagggcttcctctgggcctttcagcacctgctccagcttcaccttggtgaacatcaggttgaagttctcagggtgctcggtgatggccatgttgacaacatccagggcatgctggtggtgcttctgggcagagaagagcagtgccagcccacgcgtcagcggacgcgtgggtcgacgatatcccgagaattccggacc

SEQ ID NO: 132073 - DNA, 1152 bp, Homo Sapiens
  misc_feature (113)..(113): n is a, c, g, or t
  misc_feature (178)..(178): n is a, c, g, or t
  misc_feature (187)..(187): n is a, c, g, or t
tttttttaaaagtctgaaaggccatttattaaggtctaagtggtgaaattaggaatgatttttcttttcttcccttggctattttcaccttctgttttcacaagtgcatattnctcatttgtttgtagaaaaggtaccccattcaaggcgtgtgcctgtgaaggaactggatagcagnctcaagtcnagaacacctgccctctggaaaacctctctcagtggcagttctgggtgacatgggctccggttcaggacatataagctgttgacatttataattcccatgcaggtgaaatgtgagcactttctctctctctgtcatagacgcaataaaggctccaataaactcaggagacctcacggcaaaccacggatgacttcagtttatgagacaagtgtacctggagtcctaataactttgttcatgattcttccttctttaattgcaagggagctaccattctcccctcccttaaccattccctcctgggagacagaagctctgcatacagccatacacccctgagatgtgcctctaaagttgggtgctaggtttggcttctgaaatcaactctgtcatttgacaacaaaggtgcaaggctttgtccacagaaaggctcatgtctacagaagtgaaaaaactgagcaattccactaaatacaactccactcacaccttctttcccatgactaattcttgtgtttttgatgaaggtgttctgctttaagcaggtcctcagttaaaaaatgttaagtctgcagttcctgaactcatttgaatttcacaagccatgggtttcaggatgagtttttccagaaaagagtctgctttcagcttagaattgtaaagagctcagtccattcctttctatttgacttgatctgccaaggacattacgtggactgtggcctctggcttgagccagagtctgcatcatgggcatcaggcaaagtcaggtgcatgccactctgcttcttcatggtgaggccctcaccgaagctgccatccttttctaggcctcccagctgggagaagctgtacagggtctgccacagcctcagcacttgtctgcaggtcacgagggcttcctctgggcctttcagcacctgctccagcttcaccttggtgaacatcaggcggaccggttgttt

SEQ ID NO: 132074 - DNA, 1566 bp, Homo Sapiens
  misc_feature (88)..(105): n is a, c, g, or t
  misc_feature (114)..(165): n is a, c, g, or t
  misc_feature (172)..(192): n is a, c, g, or t
  misc_feature (219)..(219): n is a, c, g, or t
  misc_feature (222)..(222): n is a, c, g, or t
  misc_feature (250)..(250): n is a, c, g, or t
  misc_feature (260)..(267): n is a, c, g, or t
  misc_feature (275)..(275): n is a, c, g, or t
  misc_feature (279)..(280): n is a, c, g, or t
  misc_feature (284)..(284): n is a, c, g, or t
  misc_feature (286)..(418): n is a, c, g, or t
aaacccagacgggaagtccggcgccccgcgcggcgatattttcgtagggggggagggtggaacaaaagacaaaaaagatggcatattnnnnnnnnnnnnnnnnnnaaaagggannnnnnnnnnnnnnnnnnnnnnnnnnnnnnnnnnnnnnnnnnnnnnnnnnnnttatggnnnnnnnnnnnnnnnnnnnnntggggagcgccgccccgcaccgcgcgnttnggggtttgtgttttggtttttggggttntggggttttnnnnnnnntttttttntttnntttntnnnnnnnnnnnnnnnnnnnnnnnnnnnnnnnnnnnnnnnnnnnnnnnnnnnnnnnnnnnnnnnnnnnnnnnnnnnnnnnnnnnnnnnnnnnnnnnnnnnnnnnnnnnnnnnnnnnnnnnnnnnnnnnnnnnnncaaagtacaacaacttttaatacaccattaatactaatgattaaaaattattgcatagtcttatgcatttaccctaaaacattttctgaaagcaaacgaattatataaaagacaaataaccctttaaaatgtggatggcctttactacctcgatcttctatccttttttgtcttttcagtacttttgtccattgttttctcattatctcccctgcactttgggcaataccatttcccctttggtttataggtaagtgaaacacatgaaaagtgaaaccattcaattggacactgttcattgtcacatcctatcatctccccataagacacttggttgcataagcagtatgtaggttcattaggatctattgcaaactcaacaggtgaagcttccctttcctgcttggccttggagcgtttctttttctttgctgacttggatttcttttctttaggtggctgatcatcacagtcttcaatcccatttgccatgtgacataaatcacggctttcactggtccgctgcctgcggggtcttcttgaagatctttctggttggctggaatccatctttgctttatctgaggctcgttcactttcagcaggatcttggaaacactgtgagtgtaactccatttgtcttgcccgattttccaccaattcgagcatttgtgtaacaatctgtattttttcatctcccaattcttgactattaattagtgctctctggagaagctgctgtagacgtttcttctggtttaaatcatcttctttcttatatttttcgtagacatcatcaatttcctttaacgtttcttgatatttgttgtccagctctcgcagcacagacacgttcctctgcatgtcgtggggcagcgactccacgcactcaaggtagtcctgcacgtagcaggtgagcagccggctccgctccccggtcaggagcgcagccgacgagtacagttgctgctgctgctgccctaacatcctgccgatccgcgccgtcgccgccgcctccgcatccagcagccgcacatgcaccggccgcggccgccgcgggccctcagctcagcagcccggcgccgcggggaccccgcagccgctcgagagggccctcgtgccgaattaacacccagcctcgacctagc

SEQ ID NO: 132075 - DNA, 739 bp, Homo Sapiens
  misc_feature (603)..(603): n is a, c, g, or t
ctttggcaattaaaagtttattttagaccacagcctgttgtgtgcctctctcgatggcctgtcttcagggagctccctggctgatgaggtggggtcaggatggatgtctcactacagtgtgcaatccatccccttaatcagggccctgggtggggaggaggagccctgttgcaatctgcactgtgggtagcacaggacagattccttgggcagtccagagtgaggtggagaggcattagtcggtgatcccaagggcatctgactctgagggtggaatcccaggatgaacccatggtctcccccttatcagggatacctgccacctctacccttcttgtctctacctctgcatcccattctctgcacccacagcttaggtgcccctggcggccaaatcctgtctgaccttgcccctcttgctgatgcaacttctcagcaattccagattctgcaagaggagtcctgctgggttgttgtctgtttgcacctgatcacacaaggcagaggtcatggctaacccccttgggtctgagtccaacttggctagttggcagtagtgtgccaggtccccaagcctgccagaatggaagaacaacccttcanacccagtgtgggccgtgccatcacacaccatgctgccgccttcattgagttcatccagcagttgtgcactgagctcctactgtgtgccagcccctatgcacatctgtgaagctgaggacatccggcccttatgcct

SEQ ID NO: 132076 - DNA, 1150 bp, Homo Sapiens
  misc_feature (73)..(95): n is a, c, g, or t
  misc_feature (960)..(960): n is a, c, g, or t
ggttttaacgacggccagtgccatgctcaattaacctcactaaagggaataagcttgcggccgctgctcaggnnnnnnnnnnnnnnnnnnnnnnngcattgggcagctttcatctgtgtttattttttttcatataaaagttacatgtttgaaatgtctgcaggaagatgccaccatcagacaggttagctggggcatatatattacaatgtaaccctgtggaggtcgtggggccggagcgggaagatgctccccagaatcgggttcaggtcagacatggtgtgtgcctgcccctccttgcccccctccaccccgacacctgcaggtgaggactgacctctgcaaggaacgagtcctccgcctggctcacgtctgtctgtgaagactgattcccacaacccgcccgggccccccaaaggaacagacgagccacggccaggccgcagcactgagcacagagctcagcaataaccagggccaggcttagggggcacagggggctgcctgccatcaataagttagacatacatcgcaccttgccgtcctcacgcagggagcccctgggcactgctcatgtgctgcctgggccctgctgctcagaacaccaagggctcccaatgagggcctggggaattgcctgggcacactggggccaggcacagggtctgttctgaattcagggaaggtgaagagacccacctctatccagctcaagcccaagaacaaggcagacagagctgtggacagcacccgaccacagacacggttctgcctgctgctggagtgagaggcctggtttctgaggctgcagcatggcactggcattgcctgtgctacagatggggactcctgcgagtctcacaaatacagggagaatttcagttcacacaccccaggggcctgtgtgcagagcggcctcacacgcgcacagcagcatcaacagagctgggcagggaaggngagagagatcagggatgaatgagggactcaaaagaggacaactaaaccccaccaacacatactgtttatagcacgatctacaacaactccttaatataaatgacggtccggctggcccgcagacaccgcagaggggtccgcacaaaggggtccgctgcatgacggttctcctcatctaagcaaaaacgga

SEQ ID NO: 132077 - DNA, 736 bp, Homo Sapiens
  misc_feature (668)..(668): n is a, c, g, or t
caataaaatgtagaaatattttaatttacatattacaatgaatcaataaggagtcaaaatccagtgacacattcataaaaactccatatatcatcctcagaataatcagtttctgtacaaagatttacagatgtccaagtatgtagtttttcctcagtgtgctacagaatttaaaggttctgctcgaatattccccaaatcaagcgcagaatctgtttcttcatcgatttctccaatgactgcactaaaaaagtcagagttaaaacaatcacatttctgaaataaattacatgtgtttcaaaaatcttactaatcaaatcaaagcactgagtaccattcttccaaaaaataaaactgagagagcacagtaaaaagaattaaggtaaaaagcaaacaacattggcgtgagtcagtgaactgcatatttaagtcacaaaactcaagaaataatttgaaggcacattattacaggaaccaatattaaaggacacattgtacacagtgattgtatcatgaatctttaaaggaaacagacacacaaggatagacacagtaaaaaaccctcaaacttccaaaccatatttcaattcaattctaggactgtgttaaaaataaatttcacaaaatcactcctaaaataattagcaagtaaaaatatcaatcatttngagtaacttttgatgaattaaatcaatgatatagacaacagcgattagattgttttcctaagttttca

SEQ ID NO: 132078 - DNA, 716 bp, Homo Sapiens
  misc_feature (574)..(644): n is a, c, g, or t
ccaataaaatgtaaaaatattttaatttacatattacaatgaatcaataaggagtcaaaatccagtgacacattcataaaaactccatatatcatcctcaaaataatcagtttctgtacaaagatttacagatgtccaagtatgtagtttttcctcagtgtgctacaaaatttaaaggttctgcttgcatattcccccaatcaagggcagaatctgtttcttcatcgatttctccaatgactgcaacgttgtcacttcttacaatgtataatcctagtaccacttgttctaccccctgtgaagagctgaatactcgttcatggctttcatccaaaatcaaattaatggtctggtcaaaacctttcagtgttcccacaatcattctcccatctgatgtaataacggcaacagttcctgataactgaatcaaagaaagtgttccttagggaatgcaaattgaaaacagactctggcaagggaatgatttgaatttttagaataaatatgacaactaggtataagtattcaacacagccactaagttcactacataaaaacgttaaaagtttcttcnnnnnnnnnnnnnnnnnnnnnnnnnnnnnnnnnnnnnnnnnnnnnnnnnnnnnnnnnnnnnnnnnnnnnnnccctggcctggtgacctatagtcccagctactcaggaggcagaggcagaggcaggaggattgcttgggctca

SEQ ID NO: 132079 - DNA, 523 bp, Homo Sapiens
tagtgtttaataatgcaatacaatgtagacatattttcatttacatattacaatgaatcaataaggagtcaaaatccagtgacacactcataaaaactccatatatcatcctcagaataatcagtttctgtacaaagatttacagatgtccaagtatgtagtttttcctcagtgtgctacagaatttaaaggttctgctcgaatattccccaaatcaagcgcagaatctgtttcttcatcgatttctccaatgactgcaacgttgtcacctcttacaatgtataatcctagtaccacttgttctaccccctgtgaagagctgaatactcgttcatggctttcatccaaaatcaaattaatggtctggtcaaaacctttcagtgttcccacaatcattctcccatctgatgtaataacggcaacagttcggttgatgtagttctccaaagcggacgtcatgctgttcggcccggcggttccgggtaacgcagcggtgcggacagcaagcagaactgaaagcccc

SEQ ID NO: 132080 - DNA, 871 bp, Homo Sapiens
tttttagtgttctgtgtgcacatttatttctttcaaagattgtttgtgttccagccacatcttctccaaaggaacccacccaagcccgtgtgcaggcttgctgcagggctgtcttcggcgtttaaagtgctactgaggaatacaatcattgtcacgtaagttcatcaccgcactccagcgtcaggccaaacctttccgtggacctggaaaacctgccattttcttctctttttacaatgcagtttcgacataacattggtagagtaaacaacaaaccacaagcctaaatgatgaatggtgcgctgctgcccagctgctaactgagagaacgaggcagtgtattgtgtttcgaatgcaaacggtcatggacccaagttaacctgagtttgctctgcaggattccgcgggggccttgccctgtgcaggctgctttggtcttcgtgtctaggccggtttggggcagtggggagagggcctggcagcagggtttacgccagccccgaggtctgttttccgtcagacagagatacgtgtcctgccttccaccatccaccaatttgtactctgaagttttcagatcaagagccgtgagattactacccaggagacacctgccttcgggtggccagcagtgtaaattaatctttgcctctctgctcaaagcaactttgcagcttctggttagtgaggtcggccagtaaaagcccaagcagaattctaaacaggcaacgaggtggccaactgaatgcgcaatgggtcgagtaacagttggtcataaaggatcgtcgctgggtttagactcagacttgaaactacccgaaatagaagctgtgagcgaaatgtcccagcggttttcctcttgcaccaggga

SEQ ID NO: 132081 - DNA, 1056 bp, Homo Sapiens
  misc_feature (83)..(123): n is a, c, g, or t
atatgtagatatagaagagtgcacttttgtatttcatagtaagcttaaagcgcgtctttgccggtgcagcgacttctttcaannnnnnnnnnnnnnnnnnnnnnnnnnnnnnnnnnnnnnnnngatttttaaagaaattctttaaaggtttaacgctagattgtgaggaatgacacaccactccctccccaccttgaatccctaattagattaaggaatagcgctgccattttctaaaccgtgatgcggttgtcacttagttctgtggttccagcagatctcagtgggctggttgatttgtgtggcccatggatttgaaagaagctgctgcacccgaaactgccagtgtgcggtgacaacggcacacgcctagactgagtgtggtttcgtcgtgagtggatggacggcaagcttagcaagcctaagtcccctcatgttcagtgagcctgtttcatttgctatatagaaaaagaaactcctatttttaccttgctggaattattggataaaaaagctatttttataaattcgttatgaattggatgatgactatattgaggataaaatttctagagaagaaacaatacatgcttgctattaatatttcaatttggaatgttctgaattgaccaaatttaatgaacctgcccaaagttagctaccgttccatggttctttgctctccccgggtagtgatgaacatttactactataaaagaaacagctatttaatgaaattttgatatctgcaaatttttattgatatgtaatgctcagattgcattttacacttgatctaaacatatatcgaaagatatctgctaaacaggacttcaggtaagtgaggtgaaatggtagccagtgacccgttaggagctctcaccgtacatactccagtctaatttaaatctgaccacagttgcatggtcgctttaccatgttagctgtgtattgttttaaaagttttaacttcaaaatatgttatgcacagaatgtttattataaactaatataaaatgtgctctaccccattggctcagagctagggcaaacagc

SEQ ID NO: 132082 - DNA, 970 bp, Homo Sapiens
  misc_feature (104)..(163): n is a, c, g, or t
caacctctgatcagatctcaaagagacctgaaatccatatgtttaccactgcagtgattatttgtattactttgaaacggagttttgctcctgtttctcaggcnnnnnnnnnnnnnnnnnnnnnnnnnnnnnnnnnnnnnnnnnnnnnnnnnnnnnnnnnnnntattatcagacaactttaagtgtactcctaatggatagtgaaagaatacttaagaaattttggagatggcataagtgcaatagctataccttcacacttaattagaaccgtgtgttttcctatgaccagcagggattacttttattaaacaatgataatggcaaaatatctggttcaaaatcatctctgctcagattttgttcttttttgccactgatagtcatttggaactaggaggggaaaaaggagtgtgtcacttcatagttcagttttaagtttctcatataagccatcctgatcaatcatgtctgtgtgcccgttccagcggtgataggcaaggagtgcagcgttgtgggctgcaatggcactcatctccatggcacttgctgcacactctatgccattgaggtaataaagtcgatcatggagaatgatagaggggcatttctccgggggcttatagtgaggatatgcaagccatggcttcttcacagcataatcataggacagaaagagctttaaaatttgtgctttagtaagagtttcttgggaaaagatcttccaaacatatgttccatctgttgatggctcaggatcttccttttctctcacagagggcacaatcccaatactgttaatgaacaaatctgaattatcagtggtaaaactgtattaaggccaaattatctatggggctagagctaaagatagatgtttcaattcccccttaactaagttgtactatatgtgattatattgatggaattccccaattggagatcaaagtgagaaaagaaattcgacatt

SEQ ID NO: 132083 - DNA, 600 bp, Homo Sapiens
  misc_feature (362)..(362): n is a, c, g, or t
gcagggagagccggcgtttaattctcagggctacgggcagagccgggcctaactgtcctgggggaccccggtttgtcgcagggtccggcgccggcagctctgccaattcctcattcccccttccgcggcacgctggtgcccgcgggccccgggtaggtcaggcccagggggggttaaaaggcctccgggagcgcggggcccggacccagcctctgcaggtgcgggtacaccaggcccagctccgcggggccttagcggtatggtgccgggtgtgcacaggccccgcaccaccggcggcaggaagccgcgttgcaggagggtgggcggggggtccccgggatgcgccaggccccatggccgcnaccggatcctgcttcaggacccctgcccggatgacagaggtgaactcgggcctcggtgtggcggggtggctggagggatcctcgtcgccactgtcctcggagcctttggtttccctcgggccgggctccactttgatgcgtttgccctgggtctggggggcctcgttctccgctggggcagcctgcttcccttccgtcggaggctccggctctgtgggctctggccccgggctggatg

SEQ ID NO: 132084 - DNA, 1003 bp, Homo Sapiens
  misc_feature (794)..(816): n is a, c, g, or t
ttttttttcgctagctataagcagaaaaaaactttatttctatcaaattgaaaagtatgaaccttcaagcaagataatcaacataatcaataatacaattaacagttaggatagcatatacagatcagactggaggtttagatacttggaagcacatacaccaaaattaagagggccagcaactgtcccaccgaggaaaagcactctgactcatcataaacacacgacttctgggaaacttgagctgacatttcacaggacagtaaaccaaagagacaggttgtcattgggttatagaactgatctgagcttgagagggatcacagtgaaatgccattgtaactcaacaatttccccagagatctgttcatctcaaaaacaggaatatataaaaatcagtagtacaaattctcataaaactagaaaagccctttaagccctaatatccttggagcttacataaagactgagttttcatttttcttccctttagtcttccctaaattaaatacaaaatagtttgttatttaggacatttctgactatatagccaaagctttaaaatgaagacaagaataatttttataaaatgaattagacacatatcaaccctagggggaatcttcaaggtggtctgctcctttgaaaagctttaaacaggaaagcttttatttaaagaatgacactgtgcttctgggaatacccttattattaccagaggaaggaattcatatctatgccatacaagagctttcatcctttagaaatgttttactgcagtatctctctctctnnnnnnnnnnnnnnnnnnnnnnnaaatgatcaattggggaactccctgaaacatacagataatggcatttattctggcaagaactgtgcaaattgttacaagaaagataagggatggcaagtcgacgcgtggcgacgcgtggtcgacgatatcccgggaatccgaccgtaccagcctgctttttgtaacgcgctgttcatgttacatgcc

SEQ ID NO: 132085 - DNA, 835 bp, Homo Sapiens
ctgaggcaaaagaggctaaggggagtgggtatgagaaattagggcccagtcgagaccccagatcccactgaacatctgtgtctttattttgctgcttgtatttattgtagtcaaatgctttacatcagaatgatgaaaataggcttgccactttctcttattttaattccatggtagtcaatgaactggctgccactttaatataactgaaaattcattttgagaccaagcaggatcaagtttgtagaataaacactggtttcctagccatcctctgaaaacagtatgaaacatgaccaagtacataatggatttagtaataaatattgtcgaattgctaaaaagtcttcaatcattcattcactaagtcactcagtgatatcaatatacttagctcagaaagtgtgggaggctgaataatggtgtctcccaacatatgcatgacttaatccccagaacctgtaaacatgttactttacatggtagaatggactttgcggatgtaattaaggaccttgaaatggttagattatttcatattgtccgggtggataagaaccaggattttgtaacagggaggcaacaagctcaaaatcagaaaaaagagatttgtcaatggaacaagaggttgaagtgctttgaagttggaggaagaggtcacaggcaaaaaagtacaggcagcctttagaaaaccaaaaggacaaaggaacagattctcccctggagtctgcagaaggaaccagccctgcctgcacatggctttagcccagtgacactgattttggacatctgaccttcagaactgcttgctcataaacttgtcttgttttaatgc

SEQ ID NO: 132086 - DNA, 849 bp, Homo Sapiens
  misc_feature (710)..(710): n is a, c, g, or t
  misc_feature (762)..(762): n is a, c, g, or t
  misc_feature (806)..(806): n is a, c, g, or t
  misc_feature (816)..(816): n is a, c, g, or t
tttagaagcacaaatttaacagatactattttattatttacaaaatacatggtgatcataagagaacattttacaaattacaaatgggaaaagtacagggaaaagtagagacaaatgggttaaataacaaggtaaccatttgtaatgagtctgtttagaataaaatagttcttcacaaaagttagacaaggccatgagtaagtatatcactgtataaaaaatatcagtgacgtcaaaatatacctgtaccaaaaagtagaacagcaatggtagtgcatctaaatgtgtcctaaattaaattacagcacatacagtttcagtgttccacaatacaaccattgctctgaggcagcaatctgtgagacttgattgcctagctcactgaaagagcaaagccccaggactagttaacttccctaccttccataaggctttgttcaggtgactttggaatgtagtgtcaaaaaccccattcatttctgctgcaagctccccaagaacagacactgtggcctcatcattggcattcagaattcgcacaaagaatttattccacaattcaccatcttttagctcagaaatattttggctaagtttccagaaggacccatcccagaagacctgtaggtgttccttgaacaatagtaaatgtgctaaatctgctataccaaacaggtctacctggtagggagaagaacagttagccaggntcttttgtccttccaggatctgtacagtccgaaagccgctgagggtaaaaanatccagctgcaccctaaggtcaacactgtaggaaaagtccactntcttcaaagnttgattgttcttgttacaatcatagggatcgtg

SEQ ID NO: 132087 - DNA, 1358 bp, Homo Sapiens
  misc_feature (770)..(1257): n is a, c, g, or t
  misc_feature (1265)..(1265): n is a, c, g, or t
tgaaatattttctcagcactcttcctacaaggtgaggtcgagagtcaccttgtgttgaaaatcttactagtataggactcaacagaaaatatattccccaaatgcccgtaagaattcctacttcaaacctcagacttcaaataactgccagaactacttgactgagctgttgctgtattggacacttgctcccatctactttcttctctggaatccacgggtaagccacatctaatgaagagaatatttaaccataaagtcttaaggaaaaattgtatgatgatttaaaagattataaaactttattactgggctatttacacattttaattgtttctcataaaatatataacattccaatatttactgaagtaggatatttttgtatcatatgtatgattataatttatagggtattttaaatgatgttttttggcctccttaagttttaagtggatcttgcaaatgaaaaccagtattattgagtttgacatactcaaattgcccaaatgtcagctgtttaaacaaccaagtcatcactgatactttagtaaaggttagtaaaggtcatcgaaggcttatttgcattttacagtttttattacttaggagagttaaggagtacctgccaggtttgtccatgctaatgttacaattttctttttgtagttcaaccgtattttgtatggagatactttgaggctctgtaaatatctggttactcctcagaacccactagatttagcatttcacctcgtgccgaattcttnnnnnnnnnnnnnnnnnnnnnnnnnnnnnnnnnnnnnnnnnnnnnnnnnnnnnnnnnnnnnnnnnnnnnnnnnnnnnnnnnnnnnnnnnnnnnnnnnnnnnnnnnnnnnnnnnnnnnnnnnnnnnnnnnnnnnnnnnnnnnnnnnnnnnnnnnnnnnnnnnnnnnnnnnnnnnnnnnnnnnnnnnnnnnnnnnnnnnnnnnnnnnnnnnnnnnnnnnnnnnnnnnnnnnnnnnnnnnnnnnnnnnnnnnnnnnnnnnnnnnnnnnnnnnnnnnnnnnnnnnnnnnnnnnnnnnnnnnnnnnnnnnnnnnnnnnnnnnnnnnnnnnnnnnnnnnnnnnnnnnnnnnnnnnnnnnnnnnnnnnnnnnnnnnnnnnnnnnnnnnnnnnnnnnnnnnnnnnnnnnnnnnnnnnnnnnnnnnnnnnnnnnnnnnnnnnnnnnnnnnnnnnnnnnnnnnnnnnnnnnnnnnnnnnnnnnnnnnnnnnnnnnnnntcagtcanaggtgggaaccgaaggacataaagaacaagcgtttccctgggactccctctgggctctctgttccacctgcgctaccgaaactgtcgctttcc

SEQ ID NO: 132088 - DNA, 1041 bp, Homo Sapiens
  misc_feature (839)..(839): n is a, c, g, or t
  misc_feature (920)..(982): n is a, c, g, or t
tttttttgtctgaggggcattttttattataaatttaatatggttgattaatgaaaaatgacaatgaagtaccaagaaaatgtttgtcaatataaaaattttagcagcatttccatagtttcaggctccaacattagtcgtacttcctccctcccgctatcaaaaaaagaagagactccaatgggatggagtagagcctgggggtgtccagctttgtgtgggcctcagagaaatactccatccagcatccaggattctccctccctctcatccctgaagtgctagaatgtcaaagcacagaaaaagcctcctttgtgctgacattggagacaaggatccgttcttcaggctgcagggagaattgggatagaaactgactctggacttgacatgtagtgctcagccacacgccctcaccaacacctgtgcattctctactctgatgacaaggaaaggccactgcaaggtgggtgggatctggggtgtggtggcggtggcactgctggtgggagccacggcgtggcgcatgctgggtgacggtgtcaccgccacacactgctctggggcaggcgtgatcagtgagggtgggagacagacaatgtgaaaacgtaacactggccaatgattcccctgcttctttggtactttccaaaattctctgatcaaaaaagtataagggaagcacaccattaaaaaattacagttttacgtatttacaaaagcaatgatgatatattacacaacaatcaatacacagtatatgaacaaatcttcagtgaaagcacttgtgagctcccgtcccgctgtcatcccacagcacgcgacctctgcagggtcanggttgcctgttctgaagctcaattaccttacagtatattagaagggcaaaacatcatttggaaaaaaatcctcccgtgcgnnnnnnnnnnnnnnnnnnnnnnnnnnnnnnnnnnnnnnnnnnnnnnnnnnnnnnnnnnnnnnntcctgtgtgaattgtatcgctcacatccaacacatagagcgggagataagtgtaagctg

SEQ ID NO: 132089 - DNA, 902 bp, Homo Sapiens
ttttaaagaccgcttttggccagggtggccctttttatttgctaaattctgtactttaccaacagaaaaaaggagcacaacaaacatgcacatgttactgacttctgcattctcgtcgcattgcacacatacatttcacctgctgtctgcagtgtgcacacactgtcaacactttacagtagttcatggatcctccgtgttcatgcacatcccattttcagtgtggctgtgaccttcctccaggtcacctactgtagagctcgctaagccattcccctctgcaccggcattgggcttgaagtgaactcaacaccattgctcccatgattccttttctctcaaggattattctgggaaagtgggctctccaagccacccagtgtgtagagtccttgatcattctcatcatacatttatgtcctgctctccagaaacactgaatcagtcagactgtagagtgtcaccagtttccctctagccttgcaagtgctgggtgtatttatgtgtacgtgtgtatatatagagagagaccctgtgtgtgtgtgtttagcaggtgtgtaggtaattcccccattacagatgagaaaacttaggaccgaagggatgaagtcacttttcccagggttgctcagccagcaagtggcagcccccagtctagaggtcacatcccctaagcctcagtcagtgttctgttagacaaaccaccctggctctgatggttgcttctagacttgtagacaacaggctcttcctacttctctcatcccttgtccgtggcggaaaacagaaacagaacttgtcccctcacggtttccatgtcatgcagaccaggttctcggcttcacctggggccttccgcaaagctatgagatccagggcctgaggagttcctcaggagacat

SEQ ID NO: 132090 - DNA, 429 bp, Homo Sapiens
tttttgaagtctctcaacatttcatttttaatttttctaatagtacattctttaaaagaagttaacgacttcaattccaaatataaggattaaataatgcaatgaaaagctgtcattttcagtgaagctattgcctaattaccctggaaaaaagtattcttatgactgaactgatgcaaaaatcccttagaaaagcttcatttgttgcctgtaaagagtcttcttaaggtcacttttacttctagactgcccccttgtttccagtgaaagagttttgcttggtaatggcttgtggttccacagtgttttgtgtatgaaaagcgtagactaagagatactactgaagtcgctcaaattgtagattctgccatgaaaggaagtcccaacactgtaacatttccccttaatcttcagcaagacacataaaaa

SEQ ID NO: 132091 - DNA, 1391 bp, Homo Sapiens
  misc_feature (1202)..(1212): n is a, c, g, or t
aaggggtgcacttttattcaactggtaaagtttatttcataagtataagtaattttaagccttttactaaactgtaaatttcaatccattaaaaactactaccggagcagttttgaggtattactgttaatttagtatagaaatgttactgtattttgatgtggtatgaaatgcagccgccatgcctttcatgaaacggtgctatcgtggtgctgactacagacatgtcctatggctttcaggaaattattgtgcatgtgcattaacagattttccaaacattaatgacaatttgattggttagtcatttgtaagcataccaaaataataaagtatagcccacgtatgagccaaacacactgagacatttgaggcatacaatgctaccctccagtctactttcgtcagaaaccaaacctactcactcaaatcatttacaaggaaaactagtgcagaaagcaccccaaaaatgttgcctgtcagcaggttaattttcttctaactttaaaagaagtagatattttttcttttaaaattcatttataaaaataaattttagtttgagaccctaggtaccaaattgtggcttaatttactcaagatggatgtactacaaagttatgaaaaatgtagctgaaaacccatgagctccagctcatttctgcagcgtggccaacagctgccactgtacactgtcacaacccttctcataggtaaccaaaatacgctcaacgtcttgacaaacttttagccttcctttgtcctgaaactcccacacaactttaattcttagacctccattataaaactattagtaaccataatacattcaagatagagaatgaagacctgtcatccactcaggagacactgaaccagggcactgggacaacacggccactcaggggaaatagtcacccttgtgggtgtacagctcttcagatgttttgcactagaatgcaggcaaaaagtcccttatgtaatttttatctccaagcaacaacatttaaaaatcagttgaagagtgtcagcaggtgcttctaggttctgtgctgtgagcccccaggtcgtggagtgtagggctctggatctctctgtacacgggatagaaacacagtcacgtggaaatgccaatatgacttactgcttagggctgtgctgacatcggcatctctgttagactgattctcgtaggagaagcnnnnnnnnnnngccttagtcaggagattattcgaggaacagtaaagaactgaactaaggaagtagctactggcttccaaagccacacacacacaaaagtaagtttcaaactgttgtcctctctcagtgcaaacgagcaattggcggacctgtcacgtttcatcaatcgatacgaacacagcattcagtct

SEQ ID NO: 132092 - DNA, 734 bp, Homo Sapiens
  misc_feature (237)..(245): n is a, c, g, or t
tttttttgtttaaataactcattaaagtttattacattaaaaccatatatcacttttatattgtatttgccatttctgaacaatacaaagtagaggcaaatagtaacacttaataaaaatgttgcttccccattcctttccctaagacccagccctccctcaaatattccctcccacccctaacagaactctgtccttaataaaacacttaaatacatcataaatagtaaattatgnnnnnnnnntagcaagaattctttccttcttgtaaaaaacatggcagcaaagacaggcagccagaaactggctgggggtgtctaatatagacagttatttggggtatgggctaacatattatcaaggcagggtgggatagagaagggatagaacaggaattcaacaatctgcctgagataccaggcccccttcttcccctgacaagagtggaaggatcagatggaaaaccacaactcttgtagacggggaggagagggcatatgtagcccccatttccaacttccctgcatgaagacaggggggtaggacatatggcacagcaatgacctcaccaaggcaagaatctgctgtctccccatgagtttaagaaaatatttgctggcctcacagatatggactgtctgttaaacagacagaagtgtcccctctttaccttagctccacaaacaggagaacactgttggaaaagatgagaagagcaaaaaatctcctctgga

SEQ ID NO: 132093 - DNA, 1033 bp, Homo Sapiens
  misc_feature (49)..(63): n is a, c, g, or t
  misc_feature (65)..(73): n is a, c, g, or t
  misc_feature (136)..(136): n is a, c, g, or t
  misc_feature (188)..(188): n is a, c, g, or t
  misc_feature (604)..(626): n is a, c, g, or t
gcttatcttcaaggcttggggggcggggtcctgcaaagagaacgggggnnnnnnnnnnnnnnnannnnnnnnncccgagtcttctcccttgggcccttgcccaagggacattgggggctgagttctggcccacagnttagcctgtccccttaatgtcccatgggatctttcggtacccatcaaaaaangtgccctgaaaaggggatggaccgcttgtttgcttttacaagtgactgattaattaaaaaacataaaaaagggtctaacaacctctagtattcaacacttgcagttttaaaaagatcaactcagactaaacgctagcacaatcatgcatgccccgtggtgccgcggcaccccagaggctctcagggtcagcaggaagtcctttccttgtcatgtcaaaccaaaacagcggcccgcaggtcggggggcacaggcttcagggctgctccactccagggaggctccggccactttctccacaaccatttggcattgctttcccactgccttcattttcttgttcaaatcgtctttaaaattcttcttcagttaactgtacagtaccccactggggctggagcctgaggctagagccacnnnnnnnnnnnnnnnnnnnnnnncatgtacagctttcttttaagaatgcattctctcttgctgagggcaagggtggacaccgctggcctccagtccctctggtcactgcccgtcactcatggcccagatagatccaggccactgcgggccagaggagccctgccacagacctcaaggcccaagcagagtgcagcagaattttttcccctaaacacaaaaacagtccccagatgtcccactgctctggaggggccaggacactgctgagatgccacactggaagccgctggggcagggacagagagagtggagagagaggagtgctcaggggccgccctcaggggctccagggtggggagctcagcctacccttgaagacagctgccagggccggacgcgtgggtcgacgatatcccgggaattccggacc

SEQ ID NO: 132094 - DNA, 659 bp, Homo Sapiens
ttttttaatttgtaaaggaaagaagtttaattggctcatggaaggcaggctgtacaggaagcatgatgctggcatctgctcagcttctggggaggcctcgggaaacttacaatcatggctgaagacaaattgcatcatatagccggggcaggagcaaaagagagagggaggaggtgccacatatttttcaatgaccagatttcttaagaactcaccttattaccacggggacattacaaagtggatggtactaaaccattcataagaaatccacccccatgatccagtcacctcccaccagtccccacctccaacattggggattacaattcaacatgagatttgggtggggacacagatccaagtcatatggataaccaatctctcattgttgctgctgcctcctgctctgctgggcttccttcttcatacccctgcctagtccctccatgttaacatagcaagtccaggtggcccccagaggacatcccacaccaggctgctttggtgctctttagccagactccaacaagacagcttgcatgccttctcttcactgctgtattgtctcgacaaacacaccttcaacaaagtacatttaaaaatacattgtctttttgctccatgtaaacctctgtgaggtaattaaggattactag

SEQ ID NO: 132095 - DNA, 842 bp, Homo Sapiens
gttctttaatctgcgtgattgctttattgtacaaaaagtttccagtaacagtaaattggttttaaaaaaggacaaaaaagtcattttggatagaagtgcttcactaattgctttatttaagcatacaagaaaaaaagttttatctgaccaattacgttggaagggttttattacctttaagaagccattagctaggataaaacactgaaagcacttgtgtcaaaacaaataaataatgtaaataacgctctctcaattagcagagaaaacagtgaatccgttaaatcagagacacacatcacttcacaagcatggcccagccagcaccaccacccccaaaacgaacaaaacaagagacagcagttttcagttacaatcttgggaaagatcaggagctttggaaaacgcgtggtaaacatgtctgtttctccttctacctccactcaacctgagctgcacccggacactttaaaggaggcatgtgtccagaggctgcatccagggatgcccagagggagcctgccctgctaggcctcctctcagagggcgcatcccaggcagaggagactggcctgggtgatcgttacctccacggcccagtagagtgtggaaaaacatgaggtgcccacagacaatggctgccagcgagtaaagggaaagaaaccctgaggtaccatgattcttttctcttacttcctcaaatgctactgatctctccccaagtacaggctcaacagaaaaatacagtggtttgaggaccccaagaagtcagcacacaggccaggggccagctccaggctgggtctgtctctcccaccttgggaaacccagcgctaaaacaa

SEQ ID NO: 132096 - DNA, 2360 bp, Homo Sapiens
  misc_feature (61)..(84): n is a, c, g, or t
  misc_feature (150)..(158): n is a, c, g, or t
  misc_feature (2242)..(2315): n is a, c, g, or t
gtgccaagctaaaattaaccctcaactaaagggaataagcttgcggccgcatacgcggtcnnnnnnnnnnnnnnnnnnnnnnnnaggttttccaaacagctttcaatgataaagttcaataaataaagtacagcactttaattgcagggnnnnnnnnntgccagaatttagaggtaaaacagtacaggggccaagaccaaaaaattttatttggaacattcagaggctagaaagccactgtcccgttctccagagcctctgagaagttaactgagaaccaattaaagaagggcatctgttcctcctcatcctaccatcacctcagtcagtctgtgacctggtgacagtgactcctctcctcacatccagtcttccctggttggagctcctcaggcccggcaggcagcttacagcttctctggctttgtgattgcttgcccaagaacatacccaaggagaccctgtggtgtaggggtggggctgaagcgcagccacctgacagagctctcctgggaaaatgcctttccaagtagcctctcagagtatgcaaagctctctcctaacaccctagtgtgctctatgaattgatgactcctcttttggagattctgaaggctgaaatcaggtccatatattttctccttaaggggattactgaaggcaaaggcaacacaatttctgcctggttttccaggtaggacttcatcttactgcagaatagtaagaagcagcagcccttggcagaaaccaagcagggcaacagatttcacccgttcccagtcctctcttggtcaggacttcaggcccatcttggccatcatctcttcatacaccgtccacgccattgctgccattagagttctgcggagggctcgggggatgccaccttggaagaagccacgtagtccatagtctttgaaaataagtgtcactgcttggccaatccattgaaacttcagtggataaagctgcatatgagttttgataacatccgcaggttgagttaccagtgaggccagaataccagcaaatatcccacagctgaaatttgtaataggaataagggttgcatccacctggtcatgaggcactatatttttggtctggttgtaaaacatcaggtagattcctgagaagggcgcatctcgaaggagagttgctgtcaggccactgaagaggccccggtgcccctcactgtgatagatgctcctcagggcagcgtagatactctcatagccatatttcccactctcatagcgcgtcttgattacagtgataggtgacatacagacccctgcaacagagcgagagcccacccccagcatgactgactccagggcggttgggggatggcctcgcaagaaatactgcttcaaagagtagagagtgccaaagtagattccaacgccagggacacatctcacaatggaaggggacatccctttccaaaggcccaaaagactctccgtgcgaaccaccttcaagagtacagccaacatcccaacacgtctagacccatgatctgagggctggagggtttgcaggcgtgttttaaggagatccagaggttggaaaaggagggtagagcaggtcccactgatggagccacacaggaaagccttgatcaccggatgtaacataagcgtttccaccgtgtctccgacatcttggggttgcagcagcgacggacgtgagttctgaatcattggagatgaggcccgcgagtcctctgggcccagggtgccgtcgacgggcgcttgggcccagccctggaggccttgaagaaggctagggggtggcgctagccaggcgacgcgctttaagccgcgggctctctgacgtctgcgcctataagcacgcagccgccggggttcggatcctgctagtccaggggctgcgggcgcggaacaatcttgctgcgggaattacgcgccgctcttcacccgcgccgcagactccgcggctctgctctcctgcccatcctgccctgctgcaggcttcagcaccgtaggagatgaggttctgtgtatcccggggtggaggaagcgccggaggaactctgtagaaggggagatttcgcttccgggtgggacgcttgtcacgtgagggtgttctgagtgccacctggtgaaaacgcccagaactgaaggatccgcgcttccttgcacccagaacttaatggagcgtctgcagggaactttgcttttgcgtggaacgtctgaacgtatttacaatccagacnnnnnnnnnnnnnnnnnnnnnnnnnnnnnnnnnnnnnnnnnnnnnnnnnnnnnnnnnnnnnnnnnnnnnnnnnntattaaaacaagcagtgtggaatgctttctccttaaacaggcaaa

SEQ ID NO: 132097 - DNA, 1031 bp, Homo Sapiens
  misc_feature (369)..(386): n is a, c, g, or t
  misc_feature (419)..(973): n is a, c, g, or t
  misc_feature (998)..(998): n is a, c, g, or t
  misc_feature (1000)..(1001): n is a, c, g, or t
ctttctcctttctttcaagtgtcgtgagtcgtcttgattgtatattggaaataactgtgtaacaaatcgtattataaatatttcaattaattttactctgaatttgtttattaaaagacttttgaacatgaaatgattagtattacttgaatgcatccagaggatatttaaaccaaaatgaaaaaccagaaggccatttggtgtcccctctcccaggtgtccccttgtagcatatgcattatgtcatctgaattgaggcctttctgtgaacagcatcataacttctatcatggaaagtgtactatatataatgtttgtgtcatgtatatgcctaaattttaattatctataaataaaacatctgacatnnnnnnnnnnnnnnnnnngcctacagccgcggccctcttgccgaattcttnnnnnnnnnnnnnnnnnnnnnnnnnnnnnnnnnnnnnnnnnnnnnnnnnnnnnnnnnnnnnnnnnnnnnnnnnnnnnnnnnnnnnnnnnnnnnnnnnnnnnnnnnnnnnnnnnnnnnnnnnnnnnnnnnnnnnnnnnnnnnnnnnnnnnnnnnnnnnnnnnnnnnnnnnnnnnnnnnnnnnnnnnnnnnnnnnnnnnnnnnnnnnnnnnnnnnnnnnnnnnnnnnnnnnnnnnnnnnnnnnnnnnnnnnnnnnnnnnnnnnnnnnnnnnnnnnnnnnnnnnnnnnnnnnnnnnnnnnnnnnnnnnnnnnnnnnnnnnnnnnnnnnnnnnnnnnnnnnnnnnnnnnnnnnnnnnnnnnnnnnnnnnnnnnnnnnnnnnnnnnnnnnnnnnnnnnnnnnnnnnnnnnnnnnnnnnnnnnnnnnnnnnnnnnnnnnnnnnnnnnnnnnnnnnnnnnnnnnnnnnnnnnnnnnnnnnnnnnnnnnnnnnnnnnnnnnnnnnnnnnnnnnnnnnnnnnnnnnnnnnnnnnnnnnnnnnnnnnnnnnnnnnnnnnnnnnnntcgtgcgctctctggttcgacctgncnngctacggatactgtccgctttctccttcgg

SEQ ID NO: 132098 - DNA, 995 bp, Homo Sapiens
  misc_feature (754)..(754): n is a, c, g, or t
  misc_feature (801)..(801): n is a, c, g, or t
gttttctttagtctttatttatttcagaacatttccttacatttaagtatgagtcatattaagtttagctgcatttgctcataagtaaattcataattataactttagtcaaatgtatttaaacaaacaaaaaagaaggtttaagtagtacaataatatgctttctctactcagccaggcaacgaagaaataaataggaacaaggaaatgatgtcttctggttatgaattaagttgacataacagtgctacacctcgtccaatccagtgttccttgggttggtcagagggaagagtcatggcaatcacaaaattcgtggaatggccagtggtggataatactcctctccgctcacttgtcttatacaatggagcaacataacttggtcgttttggtatatctgccctcttacagggctttagccacatcacaggcactgtatcataaagaattttgggatgcgattctgcaagtttcttgatctttctattccaggaagctccatccagaaataatccgtgaatgaaaataccatcctcaggaggatgcttgtattctttgtcttccatcacttcatagtcaaacccaagaagatcaataggaattgtgtatttcctggcgtagttctgctgggcaccggtcaggaaggcttgtgtgaagaagaagcagaaagcagaagactggaggaggaccatctcatacattgctgcaagattttagtcttgcaggaagtcatcacatagctgcaagtggnttagagctgggtaggattaccatcgacattctggattttgacatcanatgctgtaccacttctcagattgtaacatgatgcagcagacgtccatcagtggtgcagataatggtactagcacgtggtgtcacatgtagcacagaactctgcgaatctgtctcgaggcaatcgtattgatcgataatcggacagtaactgtctgtggaatgtatcgtcaatcaaaaatacacgagcaaatgac

SEQ ID NO: 132099 - DNA, 647 bp, Homo Sapiens
tgattaaatttttaagctaattttccccatccatttcaaagagtagccatggtctccttgctctcatgccacgctctgagcaccctctacacatagcaacagttgtagaaaaccaaagcatctggtgtgtggagcccaagagccccatcctgctgtcggaaaaaaagaagtcctcatccaatcagcttcctacctagactgggggacctccattttctctgtgctctttaggacccggaagacaaagaaacaacctatggctggctgccaaggaagatctactgaactgaggcaaatctcaacaaagtctttgtgcttcctggcatagaagagtatctgaatatcttcataagcctctgctcacttcttcacccttctgtactctgctgtgttaaaccgtgcagtcctgggaaggcaagggtggtagagaaaggaacaggaagagtctgctcagtcaggtgggctgtgaacttcagtacaggcaggacttaaaagtcctttgcagccccacaaagccagctccttccatgaggggcttcaacctgcccttctttgttatcctggagcaccttccaggggctgaaggacagaaagagcactgacaattcagggccagtcagaaaagactgaggcagacacaagattga

SEQ ID NO: 132100 - DNA, 1233 bp, Homo Sapiens
  misc_feature (1124)..(1158): n is a, c, g, or t
ttttttcacttgtagagcctgtttattgcataactagcaggcacaaattccaaaacgattttacaacacttaaagggcacaataattacaggaatagaatgtacaataaaaagtacagaataatgagtgacagggatcaaacacgttggaataaaaggcatctcagttttcctatgcagcattttcttttctaggaacacgttaccttcaaccaggacaaggaaagaaagaaaactatactattggaaagctcatgggtgccattgaggacaaaaacaggcgagttttgctcttggttctgcaactgaatcacttgagaagccgtgcacagctcccgagttgtgcgtttagaattctgattacatgaaatgctgtgtttgatctttgggcccaattcactgttctttggcaaataagaactatttgcattagaggtacagctgtttccttctgttcagtcaagtgcccagtttcataaagtgcacctctgccctatcagctttgggggaaggtggcatatggggaggaagggatcattgagaatacagggtgaaaaagaacgacgttactgaaggtagacattgctagtgcaaggtacggaatccatgtgcaaaaggtggctggaacaaatgttcagataaggtgcgatttgccaacaggagcagagaactctgacaccagatctcagatgaggccaaggaaatgcgcggggcacatacagagaggacgacctgcagccctccaatggccacgtcattccaccggggaacttgtttggagttttggcaccgtgggctaaccgagcactcttctgacatattcttacaactggaaatgctttgttggtccccatgttccttgactttctctagggccataaaggcaacatcttctattgcaggtcctcaaacattccaaggaaaacactgcttcacctcctgcagacagctcatttcccagaagcctctacagaagcccgtcctccctgggacagcaggggcaggggtttgcaagataaaggagggtcagctaaggacatgaagcctgcagaaaaggctatcagatggcgcctgcccggccgtaatggccgaattcccgggcatatgtccggtaccgtcgactgnnnnnnnnnnnnnnnnnnnnnnnnnnnnnnnnnnncgccgcttcctcgctcactactcgctgcgctcgtcgttcggctctagagctagcgccctatagtgatctatcgat

SEQ ID NO: 132101 - DNA, 1240 bp, Homo Sapiens
aacccaaaagccccttcttgttctgaatgtgaaagctcttcccgttcctgcttactgcagccattctgtgtgtgtggttcagaccctggcctagggccggtgatgtggatgagtgaagggagccaggtacacggcagcagggcagaggagactatggggagcccaccgcctacacagtaggggcagtagcccccagctccacgcctgttgccatgtggaaaagtgggcctagggtggccacagctttgatttttcaagagacaagaaacctagatgttttttggtgccatctctccatttataaatgttggcaaccaatttgaacactttcagagaccatgtgcaggtgagctgtgtcctctaggctgccagctcacagcccccaccccaggccctgtaagctgtgcagtgtgagggcctggcttccccggacacacctggagcagcctctgagtcttacccgtaatggagccggccaaccctgtgtgttatgttgctgtcgctcctgtttttaaccatatgttctgtcccatagcagtcattcacacatgtgaagaagacacaagaatcaaagtacaagttgcctcaatacatgctaataactaagcttctattttcacaggactgatcgatgcacacctttatagcttgaccatatgctgtcatgaaagtagcaccccgacggtgcttgctttactaagtcaccgtgtgtggatgcttttgtcgcattttgcttcactgtgagtagcatgggaaaagggtccacgtctccaaaagactcttccacttgtttgtcccacagccctaagtgccacattgctgttggatgctcccgggatgccttctagaagggggcctcccaccttaagttcaggcgccatctgatagccttttctgcaggcttcatgtccttagctgaccctcctttatcttgcaaacccctgacccctgctgtcccagggaggacgggcttctgtagaggcttctgggaaatgagctgtctgcaggaggtgaagcagtgttttccttggaatgtttgaggacctgcaatagaagatgttgcctttatggccctagagaaagtcaaggaacatgggggaccaacaaagcatttccagttgtaaggactatgtcagaagagtgctccggttaggccacggctgccaaaactccaaacaagttccccggtggaatgacgttggcatgggagggctgcaggtcatcctctctgtatgtgccc

SEQ ID NO: 132102 - DNA, 1481 bp, Homo Sapiens
  misc_feature (483)..(503): n is a, c, g, or t
gagtgtgcttaagtgtattggaaggctaagagctaaggtcatagtgcaatgggagttgatttcagatgtgtagccaatctgaagatgagatccagggtacagccacagaagtagaggaacaagtttaaacagtctgacttgtgatacagcagtgaacagctgaacctaatagggaagacattcaataaacaggtgagctgtatgtttttcctcaatgtttttgtaacccacacttctacttttcatatacctgaaaatctcacatttgcccctccatttacaatttcaaaattaagtatcatgattgaaattaatgaaagcagtagtaattttagaaggaaaaaatttattcagatgatgtgatagccatgtcactgttaagcctgaacttttctttcctgggtggtgtgaaaggtgcaagaaaacacaagctgcttttaataacactcttgcactgctttctccccaaagctagatatatcnnnnnnnnnnnnnnnnnnnnngctttttaaggtgtaaggagcaaatggaatagtggataaagccttttcatctgtttagtcattttacacccaagtttctctggagtatttgcctggaagtttctaatcaaaaccattagactttgagtttcacaaactcctcttgaagctcttccagtgaggcctgcacatcggtatgaaacacattctttccaaaagctaccactggtagattttaagaacaagctcaggagcacatcactcaaaataattccaagtatttcactttttcccttcaaataacactcatgaatctggtccttgaaagactagccaagaaaattagacatttttagcattagtttgctcatacatacatttgctatatttttatggttgtatttttggcaagttttgtttgatgtatttcataatgaacggcgaaattggtgtttgcccattgacatttcagtgtcaatgtattttaagcttcagtgtgttaaaactctgttgaaaattttaacttttgaaatgttcaagtatagattatttttcattgttcttccaaccttggggttgttctgtccacaagttcagcagaatccgtttttctttggcaaccaagaaacttcaatatgtaacagaaaacatggaatggcatttagatcttcaaaaagcagggcaaactggaatggaatgtactgtttctcacagtggtctatgctgacagcaaggctgaagatttccagtaggttatgggtaatcagtgaaagttcatgcttggtggtgacagctgcagtacatcttgaataccagttttcttcaatctttgccaaaaacccaaatttaacacagtttgctgtagtgccattaagatatactcctatacaatttcctccaactcggttcatttgatacagctgcaaaaatactgtctttggtggtcaagtagaaggctcacgaaaacagcacacccacagttttgaaagccttattctg

SEQ ID NO: 132103 - DNA, 1228 bp, Homo Sapiens
  misc_feature (43)..(59): n is a, c, g, or t
  misc_feature (1113)..(1147): n is a, c, g, or t
ccctcactaatagggaataagcttgcggccgcggctgtacgcnnnnnnnnnnnnnnnnngtattcaatatgcttatgttttatttatgtaggtggcatttaaaatacatgatgtgtttagggttacattgtccacagaaagcatcaaataccactcctctccccgccaaaaccaaataaacaaagccaactctttggcaacagttgtgttaaataaaatcccaggtcacacttgtttctggctcccaagcctgggtcactgctacatggattgcgccaaaaaattcccagcttcaacactgctagattaaaattgctggcatttttaaatcacagcaaagcttttcacaatgccctcaagtccaagaggacaaaggagaaagcaacatgaacggcagatcctcatgtgaaagggaaggaaagtcactgggagggagcatgcagggaagaagtcaaggcagccctggaattctactccgtgctcaataaaaacaaaacgtgaagaagcaatacatcatgcaaacgaaataatgaccggaagtgggcgcatctagttagaatgaagtgactttcgtaaggagtcaatgttcgcgaactgaaacatgagttcaacctccttgtgccgtctctgggtgttttgcacgtgtgtaaataccggcccgttttccccagcatggccctaacccatggacactagggagggtgccactgagcaaaaattttttgctaaaaataattagcaaaaatccaagaaaaatatatggaatctagcaaaacctacaccatatttgaagttgaatttgcactacctgcaaaggatgaaaattaaaagagtaaacagaaggaatgattttacatctgatgtgattcacgacagccttctattcgtgtggccggattgctctgaggaaaaggtgccctgacgggcaggattcaatgtgtcacttgcaatattctctaagttacactctactgaattaccttctaattccaaacactacgccgccacagaaagcctcatttcatgaatgttactcagttagccatctgcgccctcctgtaccccggccgtaatggccgaattcccgggcatatgtccggtaccgtcgactgnnnnnnnnnnnnnnnnnnnnnnnnnnnnnnnnnnncggccgcttcctcgctcactactcgctgcgctcgtcgttagatataccgccagcgccctatagtgagtctatacatttttt

SEQ ID NO: 132104 - DNA, 1200 bp, Homo Sapiens
  misc_feature (114)..(114): n is a, c, g, or t
aaaggggagggaactaggaggtagcagcaggtaattaaacaagataaatatacctgatttccaacaccagctacaaagagttgaagatgatacctatgggtcgcgttaacacangggggcaactgccttgatcggtctgccatgggtcatcagactgcttcctaaattgagagaaactgagcaatctctcagccactgctatagtctaacttcttgtttgctgagtaattgtttctaatgtctctgaactcaaagtgaggtgctccaagacgctgtgaacttctgcaaagacacctccttacctactgggatcacgtgacctgacctcactcccagccaggctcccaaagggctcattccagccattccaatctcttcttctttatgcaaacacttttcccccacaacaagccttgtttgttccgataggaatacgtgtacgtcagtgcacttgtccttacgtcagttccttacaccaccaaagcacttcacctttctggaaataaaacttttaagacactactataagtaaaaatgagagtattcactagacttattgctcaggcacatttgagtgggtcccagctgtgtgattaaaaagtcaactgggtggccttttctgggttatcttctgatcatggcctttcaacccaacaagggcccttccctgctcttccaccagtaaaggctcctggcctctcatcaggatctgccccccagagacccccccagacactgcagggcctggtgatgctgtcctctgtaccggaaatggcaggcactgtcagatttccactcttctgcctttaggaaggctgggtgcttcttgctctgacagccagtctggggagatgactcttacgttgcttgagtcttggtggcaggctgctgtccacgggggagaagtctctgctctggactggacagaagagagacttttaccctggggcactcacacggccaagcttctgccaccacttcattagctgtattctccatagtatggtgaaatagcaggtgcgtcttctagtttattcctcctggggacatttcctcaaagcagttttgcgcccccgcaagggaatggtcagcctaagggtaatgtacagcccgtgcttggagaaccatggaagctacacccctacaggtgcatactgttctgcttttccaataaatacgagcggcgatttctgccacaaa

SEQ ID NO: 132105 - DNA, 1902 bp, Homo Sapiens
ttttttttaaccagaatgcttatattttattagtatccaagactggggagagggatggggtgggagagatcaagaattggggagcagatgggaggcgctacctcactcaggagacacgagttcttatccaagttcaaggtgaaagaagtgagggcaggaagagaaatctccctgctagcaacagcgactcagggagaaactctgggcccatagctagctggaggcagggtgacattgctcccaccaatgggccatcttcttagctacacctttgtagctgtggtgccaggcagaagaaccacctggaaactgagctaaggcaggttccttcttccaacagaagacacagctgggcagggactgtgcagactcaacagggccaggccagctagtggccagtcagtgttcatgtctctcaccagtgcctggagggtccccagccaaggaaagaactggtcagttcctgccagcagcttgagctggaatgccctgggagggtcagtagagggtggtcacttgaggagcttcacagagaggcggatgtcaacatcgcagaggaagatgtccatgaggtcatggcctgcctcctgtgctatctgggagatcacgtggcccttcggaccaatcaggagtttcacataagattctttgggcaccagaagcttctgttggataaccagctccccacctggtccttcctcccacactgctgtcttctgctgtacattgtaaggcacctcctggggcaggtgttctaggagcttctctcggataatgttggcacagatctcttctggtgtctggctagtgaggactgcactgtggtactcccagggccctggctgggcctgtgtcagaaggtattgctttagtgttttcacgtcctcctggcttagggctgacaacatgaagatctccttgaagtggggccagccaatcctctgaggatttcccacagattgtgtgtttgggtccttaactgctgggctggggcaatgggtgccagggtgtgagtggaaggcctgcctcatcttgagctttttgccattgaccacaccttcaattgagggctgccgtgagcttccaggaagaactgacttctgctttcaaacaatctaccttgttcatgaccaggacactagggatctgggagtacttggtcaaagcacctgagcaactgggggctgagctggttccgtgtccacttgtctgagacatccacaagaaccacaacaagatcagcagattccatgctcttccatggatcttccaacaaagagagctccaggtgatgcctcttctgtttaccaggactgataatgccaggtgtgtcaagtagaatcacctgggtctccttctctgtgatgacccccagagcttggcagcgagtagtatgcaccttcctggaaacagggaacacctttcggcccagtagctggttggagagtgttgacttccctgcattcggggctcccaggaggaccactcgtaggacccgggaattctcaggcatatcagggtgatggaccaagaggacatcctgctcatctctgttcatggacaccgcggggacgcaaggagtcaccgaactgtcgggctgagagaatccgaggaagtggtccagggcagagccctggccattactgcgagaagccgaggccaagcggggaccagagaaagcggaccccgcgacgcaggacacgcacctccgttggaagcctaagagtgaggaaaaagggatcacccgctccctcgcgacatgagggcccacctgccagactcttaacaccgattgaacaagcctagccccgcgccagctgggggcagccattacagccgcaaggcactgcgggaaccgaccaggacctcgtgccgattcacacccaggcctcgtacctagcg

SEQ ID NO: 132106 - DNA, 785 bp, Homo Sapiens
gtgagcttccaggagtactgacttctgcttcatcctatctaccttgttcatgaccaggacactagggatctgggagtactttggtcaagcacttgagctactgtggcctgagctggttccgtgtccacttgtctgagacatccacaagtacctcttcaagatcagcagattccatgctcttccatggatcttcctactaagagagctccaggtgatgcctcttctgtttaccaggactgataatgccaggtgtgtcaaagtagaatcacctgggtctccttctctgtgatgacccccagagcttggcagcgagtagtatgcaccttcctggaaacagggtacacctttcggcccagtagctggttggagagtgttgacttccctgcattcggggctcccaggaggaccactcgtaggaccacgggaattctcaggcatatcagggtgatggaccaagaggacatcctgctcatctctgttcatggacaccgcggggacgcaaggagtcaccgaactgtcgggctgagagaatccgaggaagtggtccagggcagagccctggccattactgcgagaagccgaggccaagcggggaccagagaaagcggaccccgcgacgcaggacacgcacctccgttggaagcactaagagtgaggaaaaagggatcacccgctccctcgcgacatgagggcccacctgccagactcttaacaccgattgaacaagcctagccccgcgccagctgggcctcgtgccgattacacacccagcctcgtacctagcc

SEQ ID NO: 132107 - DNA, 761 bp, Homo Sapiens
  misc_feature (724)..(724): n is a, c, g, or t
ttacaacaatgcagtcatttatttattgagtatgtgcacattatggtattattactatactgattatatttatcatgtgacttctaattagaaaatgtatccaaaagcaaaacagcagatatacaaaattaaagagacagaagatagacattaacagataaggcaacttatacattgagaatccaaatccaatacatttaaacatttgggaaatgagggggacaaatggaagccagatcaaatttgtgtaaaactattcagtatgtttcccttgcttcatgtctgagaaggctctcccttcaatggggatgacaaactccaaatgccacacaaatgttaacagaatactagattcacactggaacgggggtaaagaagaaattattttctataaaagggctcctaatgtagtactgcttgaaaatggtacatttttgttgtagattattttaaacataatgctatagtaatattttgaagatttgagctgttatttccatttgtttttacactgtgactaaatgattaggttttagttttagactctaaacggaacctgaattaataggaaataaacacggtactatagttgtcctatggtgcccctatgggtgatgggttccaagaaccccctaggatactaaagtccatgatgttcaagtcccttatagaaaatggtgtagtatttgcatataacctgtgcacatcctaccatacactttanatcatctctagattaccctatatagctaatacaatgt

SEQ ID NO: 132108 - DNA, 821 bp, Homo Sapiens
  misc_feature (97)..(159): n is a, c, g, or t
  misc_feature (345)..(417): n is a, c, g, or t
  misc_feature (584)..(600): n is a, c, g, or t
tttgatggtaccgcccctgattattacatagatgaggacgcggactggtgatacgcgctcccctgcgcctgctgcccgcaggcgtgtctgtgcgtgnnnnnnnnnnnnnnnnnnnnnnnnnnnnnnnnnnnnnnnnnnnnnnnnnnnnnnnnnnnnnnntgcgctggcacacatgggtgctgggtgtggccgagcgcctctaacaagtgaaaacacgagtgtgaacctctctcccctgcgtcgccacctctgtaattgatgtacataccgcaaaccgtgtgtgaacctgtcaactctctgtcgtctttggagcgatacagttgtgttgttaatctggtttattannnnnnnnnnnnnnnnnnnnnnnnnnnnnnnnnnnnnnnnnnnnnnnnnnnnnnnnnnnnnnnnnnnnnnnnncccctttctcctcccctcctcctttttatgaaacttgaaaacttgaaggactgctgtgtatttgtaaataacaaaactattgtgcactctgtgcttgtaaatgtccctcgtccaaaccgctactcctggagcccgtctggcagaggatgtggtctgtttttgatgtnnnnnnnnnnnnnnnnntggtgtgaacgtgtgggaccagaccctgtcctgggggtgcgcccaagtcactttaaccacaaaacgccatcgtcgtcagggtaagctctgctctctacaaagactcgcgagccgggccaaggggccttgtcttggctgggtttgtcagaggtcaaaccggctcttttaaacggcctaccagtttttaaattgcattgccgtttctttctttatgaaaaaaa

SEQ ID NO: 132109 - DNA, 535 bp, Homo Sapiens
ccagaacagatgaatttatttgggaggagcagaggattcctatctgggctatgagtgcttggaaggatcccaggcatacacagagggccacagccaaggggaagcttttaaaggacagaagtccatgtaagcagcttttaaacaaggtttgtaagtcacaagctgatcgcaggagttggcgatggttttctggtggagacggccgtggtaggtaagcatctgcagctcatctggaatactacagtcttgaggacgtgctttccatacgccctgtgtctggtctacatgcaggcgtgtcttgtgataaatcctgttacgggcatgtgtgtgtgagggcttctatgtggccccccgactccattttattagagtttggcataagtgactccattttggttccagcaactttcacataaggaaactgaggctcagagaagtcaagggacttgcccccaggtcccactaacactgtgcagtggagtgatgcaaccccagttttcccagtggatggagctgctgtgggtgagtgcagggt

SEQ ID NO: 132110 - DNA, 1007 bp, Homo Sapiens
agccagttattatcttttattctacaaagttggcagagtctgtggtgaaagttgatgccagttctgatgatctctggaaatgttcatggactctttccaggtgcaaagactgacaacactttttacaaaatagtaaatgcaattcctatttcacaagccacaaagatcataaatagtaactccaactctcagtggtgactgtttgttagggttgcagttacttgaataaatttgagataatttcccatgtatgttgaagaatcccctggacagaaatgtcctgagccatggctgaagtctccttctccccacactgaggggactgtcccactgaaacacgttgacacactgttttcggggtctgcagagatgactatttcagaagcaggagaagcacccacactgttgttggctatgacgcagatttggtaggaacacctgtcaaggattagttctgtgctgttggctggtgctggaatggaatggagctctgaactggatggtttgtctaggttttctacaactacattatagaacaggatctttccattggcatgcagttttgataatggcttccagaataaggtcacagtatgatttcctggctccaagctcacaattctccagacatcaggggcctctgagggagcagcttcaagtgtggtgaagttctgaccactccattcactccatttccagaagtggctggcatcagcacaccgtactcgcgccatgtactctgtggcaggttccagttcacttaagaagtactcaccgttcaccttgatggaaacattgtattgcatcatttttccttcaccatggagttcaatctgacacaaatatgtgaaattattccttatggagtgcaccttccaggtcatgatggcatttgtggcatttacattttcaaagttgacactaaaaggattcattaaataaactcgatgagtcaggttaaaaaggatattgacacttctcttccttaagtaattttcagctatgag

SEQ ID NO: 132111 - DNA, 1269 bp, Homo Sapiens
gtgtgagctactgtgctgagcctaaatttaacatatttttgaacaatcatagacatgtcctatttttagcaggagctcaaagaaaatgtttgataaggtacagatttattatattttagtccaacccctatatttagcaaatacaaaaccacagtcatgtttacaatgtaaaaactgtagaatagctctgtatactaaaatattattaataatgcagtttttgagaaccaaaatatcagctggctgactttgcttttatgatgtatattaacatcttttagcatgacaataccactaagagaagttcaccattctttcagtatcttttgatttccagtatgcattactagttggcaaatttattttaatggcagtatggtaagaattcagtccaaagagcaaagattcattttgatgaactatttgatcatacaacatgcagcggcaaattttcaattcataaactatttttatcactcagtgaggattactattatagttggcataatcatgagaactttttcctgcttgattaaaagcatttaccattaccgttagattggctatgacatgcaagaggtccataaccccgccaaggatgtggcattcacctccccagcatgctcagttcgtatattaatggctgccttgattaagcttgaacatgaaacacaacacacttcagaacatgtgtctcaacagagcttcctacaccttccccactagctaatcagacacgggtcatcattgtttggcttgacttctccttccagcagcagattcatcaccgcctttgtcaaatagctgcatgttcctctttttcccaggggaggagtgttgtaaaaggaagtcatgtcatcttgtttttcaatttcctttagccgactctgatctttttgaaattcattaaatgcttctttgaccagtctgtctagatctactttgtcttgaaattctagctcggggtttctttccagtacaatggatacaaccataagtaactctacaacgatctgtctgtactgtggctggtcaatatttcccaacgtgtcttcaacaaggagagagaaattcatctcatacatggtcatatctgacagggttggttgctgaggcaaatgcttcccagcaacaatgatcccattgggcgtgcgctccagaatctgccacactcggtcatagaacccggtgggagttctattcaaagacccatcgatctgaccgcctgttcagccaacatcttccatcagagagagactcaggtaccga

SEQ ID NO: 132112 - DNA, 2527 bp, Homo Sapiens
  misc_feature (1223)..(1232): n is a, c, g, or t
  misc_feature (2309)..(2341): n is a, c, g, or t
agaccgcagggggtaagaagccctcggggcgtgtgctgggcgccaccagcccagcacacgtaccctagatcgtgggcggggggtggggcctcacgcggacccggcagcggagtgcggggggttatagaaaagaggcgatagtgtgcgcgcccccgaaggtatcgtgggcgcccgcgaggcatttctttgtgatttagatcctgccaccccgggcactgtatgtgtctcacaccaccgtcgggggccgcgcacgactgtttgatctcttcgttcgctcccaccaatcatgggactccatcccgcgggcgagggtttgtgtaggtatactgcgcgtcatcgggacgcgatatatcccgcgacacggtttgtcctcgtgaattaacgccacggccgccccagtattcagaggggggagggtgctaccacggctccgtggcgggctgcgtaagccagaaccttcttatgcagaaaagaagaggtgggtcgctcagcagcggcctccgttgtactccatatcatcgattgctccgcggaccgccggcgcggcggttcagactgtatagatgatgggaggagtctcggcggttgaggcagcgcccgcgctgaggtaatgggcgcccgcccataatgacccctcggagagggtgcctgctttgggggttggtttgtggagaaacacccttggtttgcccccccgggggggcgttgtttttgtgggggggaatacccccagcccccttgcgatatcgcccagggtttttcctggggaaaaacaatataccgccaggttccggggcgcctgtggggggcgggcggcgccaaaagagggttttggatggatttttgttggggccagggggccccccccatgtcgtgtggttggggtttatgggcatgcaaggttaggtctttctcgtgggttgtggtagccatgtttttgtgttctatgttgggtgggagggaggtagggtttgtgttgtttgtgtgtgtgggtgataaaagtaaccactgtaaatttattatgcattaggaagcttaacctaaaaaccaatagcatagtaaaaagatatgttatctctgttcatagcagaacaggtttcaaaatatattttcttttaaatgtattcagtcagtacacaatcctttataaaagttgtatatatttttttctgtcaataccttcattacatttataaatacaagatttacacagcaccccatcnnnnnnnnnnttaaaaccctttacaaatatctacatatatttcatacctataaaactttcaaaggggtgctctgttaaaggtgggccctagttaatggtccatttactggtgcagcaaaatacatataaatctgtaaagttttctttgtccataaaacatctcaaaaaatagcaagacacttatcgtgaaactcagcttcataaaaccttattttagaaaggaacttaatgtgcgtattcccatgcgattcaaaagttaaacagattgaaataaagatgaattgaaaacaaatgcatactcagagcagttaaggcaggagtgtgatggatgagaaaaactttgagaagcaggacatggaagacatgggaagaagcaaatcataataatgcctttgagtctgaacttggatataaacttcactcgtatccagttactaactctcatcctacttaggaatttccaaattgttaataactttcttagaagcagcctacaatctctatgttgccaccagaatgcttgagttgtttttttcttctgtaaaatcaccttggacccaaccaggacaccaggtccaggaatctgagttgttgagttttacatgatttaagtttgtaatgaaaatttctttcatctagtaaaggtaattactattcaatattattatgtccagaagtgtatatatgctgagtttcattctagctaagaatagaaagtagaataaaaggagactaggtttttatttgacctttgaacaaagacagtagatccctgatactgagtgactctttaagagtggccactcatcaacacctatgggctgattcagagaaacaggaaggtagaaattaagaagagattctttacctgaaatcttgccagagatggcagtcccgctactgttctgtgccttctgctgaaaagggcatggaaagattgctgccactcttactctatagtcattacaggaaagccatcctttctaccagagagatgactttttctatttgagtttcaccttgggagttgcacattatttgcaaggaagtatttcaaatcttatcttgttctaatgtataaacaggnnnnnnnnnnnnnnnnnnnnnnnnnnnnnnnnncaggaggaggatgagcagaatgatggcggtggtatttatcaaacttggccctgaaggatgccgctagcgtctcccatccagcaccatgaagtcaccaggggtgtggctccctccatggctctcagagatggcgtatgcagaatcccactttctgccgagtttacagctcagtgcactgattccccc

SEQ ID NO: 132113 - DNA, 1096 bp, Homo Sapiens
  misc_feature (233)..(242): n is a, c, g, or t
  misc_feature (882)..(882): n is a, c, g, or t
  misc_feature (888)..(888): n is a, c, g, or t
  misc_feature (892)..(892): n is a, c, g, or t
  misc_feature (928)..(928): n is a, c, g, or t
  misc_feature (971)..(972): n is a, c, g, or t
  misc_feature (1016)..(1016): n is a, c, g, or t
ggtttttagggttttctgaaatttcctttcagatactctagctcacacatcagaagagcatgtgcaggaagagagatgaaataatggtacatgttgatggttactggagctggatgctgggtacatggaggttcactctaccattttatttttgtatttgaaagttttcatgataaaaagtttttaaaaagagaaagggtaccttgcgtccaaacaagtctgtatttaactgnnnnnnnnnntaattgcattcctaactggccttgaatagaagggaataaatgtcctgggagatagatggcatgtttgttgaaagaatgaagggtgaagagataggatcaatcaggcacccccaggacaaaaggaaaacttatacagcaagtaaagacatgtagctatcttgggctgaaaggtaagggaattaattggtcaagtccaggctcaactctggcccccaactcccaagtccatggtctcaactcatttcccacaaagccttcctggagctagcaagagaaggtgttcccacctgagactattccattttgcctgaacagcactatgaacaagacccaaaggcagagctatgcacggaggggcaggcctgggatgaggtaggcttctgtcctaagtttctcaacagcctcaagacatcaactggggaaaggaactttctctggtgaccctgtacttaaccagtaaagcttcaatcatcttaaatgatgtaacaaaatgtgcatatgtaagtttttacaccataccctaaatacaaggacctcaggatcctgaggagtatggggagattcacccagaaaatactcctttgggcagcacagtgcaaggcctgggtcactgggtgctcctgcattcaaagccaaggangactanctangtgctctgcactactctctccaaagggagagcacanggaaacagtgcctgtaccttggctaaaaggaggctgggaatanngcaacagacagcagacacatcctcacttgcgtacccgtctaganaagacagacattaaaaatctggcagtgtgaactggaatactcccgcgatctgccgagcatctaagagcatatccacatca

SEQ ID NO: 132114 - DNA, 1089 bp, Homo Sapiens
  misc_feature (207)..(215): n is a, c, g, or t
ccagagtggactttttatttcacgatgaccatgtggaaaagttgggggaaagagacccaagtctgtctgtctccttggttggggcccactggattttcatacatggttcacacaaccataagcccccactggctaatgtcacaagagttctgagtgttgggatatgaggaaagaataacagtgggaaagtgttcggggcagatgtgnnnnnnnnnaagggggaaagaaagaaaagatttcccctccccaaatggtaccctgggggcagcttgtttgttcatgtgacattgattggtactacttctgttctgattctgcacacttgtgactggaaggagcctggttaagagctggaagtgtattttgctctggtttggggtcttgccctcttccaagagaccagcaagtctgtgccaatgtctgtgtgctcccagcagaccagcaagactgtgccagtgtctgtccagccactatgggccagagccctgcccgtgatgaggcttttcccagggcccagggactttgctctgtggttaccaacttcttttcttcagtggggagggaggctggggccttcccgagagacctaaaagattgcccactcttggcggcaagtgcaggtagttgctggcctccgaccatctgcttcgcctgcttcaccaggcccggggattggctaagaggccctggggtctgctcagcccctgcagaagctcttcctgaggcctgagttgttggctcatataaaaaggccttggcaggaggctgagaaagaagtctggcctgggtgagtgatttaacagcttgccaggggtcctctgaaggggctgctgctttcccagatgtctgaagaggatctgacacacagcctttctcaacagctctcggcatatgccccagacctttgctggcaggccatgaacttgactccaacactggcatcttctcatcagcctgtggtgtgacctgatgaggtgaagctgcccgctccttctggcgaggagttaggtctatgagatccatcaccaaagcagctctaatttttgactgagcctcggccgattaaacacgcaggcctcgtacctagcc

SEQ ID NO: 132115 - DNA, 1159 bp, Homo Sapiens
  misc_feature (257)..(266): n is a, c, g, or t
  misc_feature (857)..(867): n is a, c, g, or t
gggactaatatttcaggccatttccggtgaaagaaacttagttttacaagaaaaaccatttgctactgagtgcttaaactaattttagtgtttaatgttacatgcttaaatttttttcagttttaacagtggcatatttaggcatggaaatattattatgaaatttattttcaggatctgctataaggttgaaatttagcccagctctaggcattttacaaattatttttcaagcagtcattcttgattgtttgacnnnnnnnnnnaaattaaagattgggaatgtatgtgagagtatgcatatgtatgggtgtgtgtgtgtgcgcgcaatcaaactgtggtgtaaatagattctcagtgaattctggtattcagactctattccactagtgaaagaaccattttttaaacttcccttgccttttttatttatttaattttcttggtttggagatgtcagtcccaaacaccagagtctgtacttttctataacacagctcagattaaggtagggcatatgccaaggaggttctcacctccctaaagaagggacttgaattttagggactttaattcacccctccttcaatacaactttcccccttcttgtttgcacatgccaagataactgcttttatgcaggctgtacccccttgaaaaatcctttctacagtgctgctcacaaaagagcccaagttcgcctcctacctgcattgctgacttgaattcacagtcgccgagtctacctagctttcttggaagcagtctagcaaaatttctatttgtacgttcactaattatctacaaggacaaaatcagttgtatttacaaaactctacttcagtgtttgttttagnnnnnnnnnnnactgaaacttgtttttgtgaatactctgtgcttagaattaaatatcactttcttatgaacaacataacttcttcagattgtgtatatgaaaacattagcaagtcttgttttttctatgaagcaaacacaattggtgacaaaggttgtcaatcatttcttcaaaattataatgcagttctaatggtcagcatattttgatattaaatttaaagatcacctctctgcatttgtttttaaattatgctaatacaccacacattatgttggtatgttttgttctgtactttcttta

SEQ ID NO: 132116 - DNA, 895 bp, Homo Sapiens
ttttttgtacgaaactgagatttttactgacatgcagatgtgctttagagttaatgtttctacaaaaagtttctataaacaatagaaaatttctagcatgaagtcacaggatgttaaaaatattacaatgcaataaatacaactacatcctccacagccccaaccagacaggaataggcagctatcaggtttggagggaaacactcttgagatcgccttcacgatccacagaaacccagagcaccacacaggaagagggagcaacacaagactcccaacttctgcttccccagctttgcttcttctcaatctgaccctgcctgtggcccgcaccagctaaaaactgtagcttcagtccacttcggctctcggggaaaccctcttgtcagtggactggatggacaacaggtctgtttttgtgcagagcacatggacacactggtttctgtatggattaactctgccttacggccagtaataacctcagggccaggtcccgtatccatgtcctctctttacagggcctttcagtgacctctagaatggactcacagtacaggttgtgatgtgaaggcatgtattcttttggaaatggcctttgagaaaagtaaccagggacctgaaagaccatgagattgtggaaggcacctggacttagtcctaggagaagaccagcggctttgctagcttgctcatcacagatgtagcctagttggtctgtattatccttggatgacaacggtgtcatgtgacactatctagggtactgtggctcttgtgcctgagtggaccttgaggctggggaggccagactgaggggtcattcatggaagggcaagatgtgtgaactctaaaggggatgttagcactaaagacttcccagccctggtccttg

SEQ ID NO: 132117 - DNA, 1066 bp, Homo Sapiens
  misc_feature (949)..(949): n is a, c, g, or t
tttttttgggataaaatttttgaatttatgttcaacatgtttcctgcagatttagtggaggaaaaatccacacatacccccatcccaatcccccagattttcttcaacatgccgcttctgttcttggaagagttaactgcctcgattctgcataagagtcccaaacactgagaactagggtgtcttccccttcctttccttccaaaaaggccagcagcctcaagcaagccaaagtcctttcctcttgaatgcgtagtcttgtgaactccactgtcttcacaaactcagcagctggtggaagctctctgaagaactgagacaggaggtggcactgctctgacaccatcctttgaaggtgacagagcatctcagggcttgggggacgccagccggactttgagaggagacagaagaggtgcttgcagaggtatttcacaaagatcagggtctcggcccaaaagttgacttctgctttttcaaacaggtagtcttcttccacctgatgcatgctctccacacaggccacgaggtcatcactctctcccaacagccatcccagcaggatgggcagtccaggggccaactggtcccactgctggagcagatcacacaggacggccagggccagggccagagcgatggaggcatccacctggcagaaggcaaactctgcaaagacaggagaaaggtgagcaatgaatatactgctcagggccgaccccagggcagcctgcaggaccctgggaacaataaaggcctcaggtaaaatcgctgccaccagcctggcagggaagctggtagggtgggctcactggagacgattaatcaccttctgaatcctgctatttatactgttagaatgagtcataggcctgaacccactgtttccatgccccctaactcagtgtggacagaagcagttccatctgcaggattagagagttatctnccctctgctcctcaagtgtcaccagaaggatcaggaaggcttccctgtccagtgtctcctctgcacatctgcctggatttgactggtttgcactttccttggaaagcagatctcttg

SEQ ID NO: 132118 - DNA, 1398 bp, Homo Sapiens
  misc_feature (59)..(92): n is a, c, g, or t
tgcgatgctcaaaattaaccctcactacaagggaataagcttgcggccgcctgctaggnnnnnnnnnnnnnnnnnnnnnnnnnnnnnnnnnnggcagctcactccaggtttatttcagggcagtttgggggtgggggacaaagacccccctccagctcctaaactgggtcacttttctcccaggtgaaggggaccatcctcatgggatcctatcgatgtgagagctttgtgtccaccaggtgtggctgggtgcaccaaggtgaagggtttgagggctgcacagggacccccagcactgggagtttggcctcctccctcagactggatggtttcccagggttggaaaggggcaggtctcccctctcagcttgggacttctcagagggaggagctgagtgtctcctccctcagacccgcagcccctcaaggtgctgcgatctgtgccaccctctttgaccggtccctctgccctcagactagcggaagcaaattacacctgaaagtggaggagcgggtctctttctttcttagacccagggcatttggcaaagtcttagaagcagaaagaatcagcaggggtcccatttcatccccaaaagctttagaccccaaaggcagaaacatttctaaaggaagatagaaacggaaacgaaaaacccaacagtcccaaatgtgcccatggtgggattgttggcagatgagctgtggttcttggatcctggacctaggacccatttcctagggtgggggcttggcgatggtcttggcagttcccacgagggtcagggcagggcagggggtgggcgccccatcccgaggctcagtcatcctcctcactggcgtagatgcgggattcccagcgctctgccatggcgttcttgtgacgggtcacccgtatggcttccaggacctctgagttgataccgtccgaggggttgatgccagcgtaccattgctccttctttctctgcccgggaggagcactgtccactggatcttccactgtccacgccacgtttgagtgtaggtggatggggctgaagaagggagactcagacaccgagtaactgcccgtgatgccggatgcctgggaggagctcctggagttctggtcagagttctcatctggcgttggggagaagacctctgggaagagagcatttctccgctcctctgccacctcttgctcccggcgcaggacactctccctctccctttccagcagatcagatgactgggacttctgcagcctcagtgcaggggccccagccacctcccagccccagacatgggggacttgggcctgctgaggctcgtctggggccctgaaccgcagaggacgcaggcggaagtactcccaccgcacgacactcctgttggcttgcgggcatccccgag

SEQ ID NO: 132119 - DNA, 477 bp, Homo Sapiens
aaaagctccaagtcattagctttatttttactgaattcagcatgggatgacaaaaatgcattatatcactaccatccattattacatgtagacatttatccttgtattctttatatgtccattttctacattaaatctgttaatcaatactaatttaaattacatgatttcctactaaaaatatgcagttcatataagcaagggcaaataaatcctccttaaaacattttattcctttataattgagaacttaacagtcttaatggctagttcttaaaaaatgtttataggattaagtttatttaagagagcagacaaacaaaacatattgtaaaactagtattttccagaagcaatttccattctcttcctttcttcctgcaaactggtgttttatctttacaagttctctgtcattccataagaaagctgaacagtggttaaaacatccagtttgcttgaattcctgagtgattc

SEQ ID NO: 132120 - DNA, 1801 bp, Homo Sapiens
  misc_feature (63)..(63): n is a, c, g, or t
  misc_feature (333)..(345): n is a, c, g, or t
  misc_feature (380)..(390): n is a, c, g, or t
  misc_feature (527)..(527): n is a, c, g, or t
  misc_feature (535)..(538): n is a, c, g, or t
  misc_feature (544)..(544): n is a, c, g, or t
  misc_feature (548)..(638): n is a, c, g, or t
ccccccaccgccgtgtatccgtctccggggcgcgaatattctgtatattcctcacaggggcanaacaaagtcgcggttatagcacgggcgtgttccacatgtagggggcggagcacctggtcccagttttattatttggggttttctcattttccagaggaaagagcgcccgagaagcgagctcttaaaacaatttttcttccgaaaatattttcccacagggctcgcggcgcgttaaattttctcttatatgagggctcccccccgcgggcctcccctcttgggataaagagtcccggaaaaacggcccctcgagaaaaccctccagtttgnnnnnnnnnnnnnagaaaacgatatcccgctgccctccccgggggggnnnnnnnnnnngggggaggatacccaggcctttagtttctttcccggtttctctcttggggcacccggctacgaaccaaatttcgttttaccctatttggggccgggggccccaaaagaaatggttttgaaaagtttttcgttggggnggtggttnnnncccaantttnnnnnnnnnnnnnnnnnnnnnnnnnnnnnnnnnnnnnnnnnnnnnnnnnnnnnnnnnnnnnnnnnnnnnnnnnnnnnnnnnnnnnnnnnnngagatttaccaaaaactgtttattgcgacttccactggaagctgttaataagccacatggcagccaagagccaggtgtgacctagatcagctggatgcaagtgcctgtcccttcatccacacaacctgctgctcggggaccctgctaggatgcgcttgctggcaaactggctaaaacccaacagggagaaatgatgctactgctcatcatttccacctccccacatcccatgtccaagacaatacaggaaaatgccacaagtacccctccaaaataaacccgcctgcgtctgtctgtcctactgaggagccaggagtgtcctacggctctgcagcaaaccagagacccagcaccagcgaggcaccagtcccttgctcgctgttccagtgacctcccctgcagagaccccagcctcaccggtgtactcagtcagctccacaatgcaggaaaagtgggaagccacactcaaggaagcgcagggtttctgattggagctgtagttggtcccaggggacctggcagagccccaacagctgtagccctcatcaactcttctggaagacacggtgcaggctttgggccaggatgtctgtctcctcgtagccttcacagctttgctgccagctctctggcacctgatccatcccatagtaggcaccagcaatggccccagccatggtggcaatggtgtctgtgtccccaccaagtgagatggaataaatgagagtcctttggaggctattgaaggcagaagggatctcagggtctggctccatgcagcgtaggaagcagtagatggcggtgggtaccgactcaaaggcagcaatgccattccctagctcagacaccacttcctccctggtcaccgatgcctggtctagaagctctccaatcttcttcaggcggctggagtatggacgctcctccatgcccaactcctggcatccaagacggactgggcatcaccctccagatcctccatgtggcccaggagttgcttgagaaagtgctcgctggaagactcgccctgcaaggccaggtgcacagccagggcctgcaggatcgacgcgtggcgacgcgtggcgacgcgtggatcgacgatatcccgggaatccgaccgtaccagcctgctttttgtaacaactggtttatattcacatgcc

SEQ ID NO: 132121 - DNA, 1082 bp, Homo Sapiens
  misc_feature (67)..(76): n is a, c, g, or t
  misc_feature (218)..(218): n is a, c, g, or t
  misc_feature (237)..(237): n is a, c, g, or t
cccaaatagtaggggcccccaccaaatgggccccaaacccatggggggccaatggggttctggggtnnnnnnnnnnaagggaagatgggaaataaagtggggagttccctgtggagggctattgaagggcagaaggggattttcaggggtttgggctcccatgcagggttagggaagccagtagatggggggtgggttcccgactcaaaagggcagcnaatgccatttccctaggtncaggacaccactttcctcccttggtccaccgatgccctgttctagaagctctccaatcttcttcaggcgggctggagtatggacgctcctccatgccccaactccctggcatccaagacggactggggcatcaccctccagatcccctccatgtggcccaggagttgcttgagaaagtgctcgctggaagactcgccctgcaaggccaggtgcacagccagggcctgcaggatggcgccattgtaacccagggaggaggcgtgtgtcagctgggccgagagccgggcaaacttctgcacatcctggacactgctataggccagggagatgccagccacccgcatggcacctccattgccataggagcctttcccgttaaactgggcccgggcaggctcaaagacatcgcgacatttggggttcaggagcttcttgaagacagtgactactccagcaccatagcccctgtcagggtctttcttgtactcctgagcaaatctgtgagccatgtccacctcgtcaaaggcctccttggctagcagggactgcaccagggccctggccatggctgtgtcatctgtgtagtacaaggcttctgtccgctcactcccgggcgtgccggggtccggctccagactctggacatgacgcaggactgacgtcaggtcgacggtgtcgtgggcctcgtagaaggagcccacgcagtccccgagcagcgcgccagccaggcagcctcggaagcgcgagagggagcgggccgcgccagcccctccacctgccgctgccgccatcgccgctgcggccatccgcgcgcagactgctcgccatcccgggaattccggacc

SEQ ID NO: 132122 - DNA, 1094 bp, Homo Sapiens
tgttctccctggtaagccctttaacaaattttggtgccccagttttttggccccctgattccattcccaatggtagggccccagcaatgggcccccagccatggttggccaatggtgttctgtgtcccccaccaagtgaggatggaataaatgagagtccttggagggctattgaaaggcagaagggatctcagggtctggctccatgcagcgtaggaagcagtagatggcggtgggtaccgactcaaagggcagcaatgccattccctagctcagacaccacttcctcccctggtcaccgatgcctggtctagaagctctccaatcttcttcaggcggctggagtatggacgctcctccatgcccaactccctggcatccaagacggactgggcatcaccctccagatcctccatgtggcccaggagttgcttgagaaagtgctcgctggaagactcgccctgcaaggccaggtgcacagccagggcctgcaggatggcgccattgtaacccagggaggaggcgtgtgtcagctgggccgagagccgggcaaacttctgcacatcctggacactgctataggccagggagatgccagccacccgcatggcacctccattgccataggagcctttcccgttaaactgggcccgggcaggctcaaagacatcgcgacatttggggttcaggagcttcttgaagacagtgactactccagcaccatagcccctgtcagggtctttcttgtactcctgagcaaatctgtgagccatgtccacctcgtcaaaggcctccttggctagcagggactgcaccagggccctggccatggctgtgtcatctgtgtagtacaaggcttctgtccgctcactcccgggcgtgccggggtccggctccagactctggacatgacgcaggactgacgtcaggtcgacggtgtcgtgggcctcgtagaaggagcccacgcagtccccgagcagcgcgccagccaggcagcctcggaagcgcgagagggagcgggccgcgccagcccctccacctgccgctgccgccatcgccgctgcggccatcgcaggaattccggaccggtccac

SEQ ID NO: 132123 - DNA, 894 bp, Homo Sapiens
  misc_feature (124)..(137): n is a, c, g, or t
gtgtgtttcgaatcaaaagcagggtttatttttctatcaaatccccaatccatgttccagccaatggatgaagggtgaatcaagccccacatagactcttggtaaaaacaattctaactttctnnnnnnnnnnnnnngccaacacacttttttctttcttttcaaaaagctcccaggcgtttgggaacagctgaaacaaattcatatcctgactaggtctgttttctcttaggtatttggatggtccctctctgctgcgacttctgcacagatgaggcactgataatggcctgcaggtcactcacaatcctagctccacatcactccatggtttgataacctagaaccacgttatgatttccatttataatgccctaagaacagctgaaaagatctgtattaaattctgcaaatctttattgagtgccaactatttgctgggcacaggctaggcactgattctgctggttctgagaaacataaatggtaccatagggaggtgtttcctcctaagtggcaggaggatgtttgctgggagttaagtgaaccaattcctcctctgcttacaccacgtgggggtaggtccagaactcaggccttgggaacatatgctgtgctctcttctacaggcgctgtgtggaagaaccaatagcagttgttaaatagctgtggaatttcctccacaatccacatagtgatgtgtctccaaggagctctgggtcatgaggccaatgtatgaaatcttcactgaagttcgcatgaagatcactatgttgtgcaccaggatctcaggtaccgtgcagaagaagtacacataggaaaacggtcctcccatctcggccttcccggtaaaattcaccagttgctcactccgaggtggaataagggagacgt

SEQ ID NO: 132124 - DNA, 1096 bp, Homo Sapiens
ccttctcttcctactgaaatttatccactttatccactgggccgcacccgtctgtgtctaaacaagtacaaggggtttcccaaggcgggaattttttggagttagtcgcattcctcgtcgcttacacacttgggtagtcccagactcagccctggggaacaatccgtgtgctctttcaacagccctgtgtgggagaaaccatagccaggttgtaaataaactggtggatgtgccctgccgccaattccacatagtgaatgtgtctccaaggagcttctgggtcatgaaggccccatggtattgaaatcttcactgaagttcggcatgaagatcactatgttgtgcaccaggattctcaggtacccgtgcagaagaagtacacataggaaaacggtctccccatctcggccttcccggtaaaattcaccagttgctcactccgaggtggaataagggagacgttagtagtcacatatgtactgaccactgtgttcatgtactgaatctggctggacaggctggtcactgccaccgtgtagaagttggagttcctgattttcagggtggccatgatggtgagaattacaagggagtcttgcttattaaatgtgactttcaccactttgatgccgtcatcatccacaaggactgaatgcggaaacaggaagaaaaccaccaaaccagatgccaggagacaaagcaggatggacaggaggacatattgcttagttcgctgagggcgcaatctctgatcactgtgtgggatcaaagccaccaactcatttacttgctctgttggaatgtagcctgtcccctggcacgtgagacaggtgatgctatctctcccggtgaattccacatatgggaactgagcaatggcttcttcctgctctcgttcagccagcaaaccgtccctgtcatcttcttgctttcgcctgcaggaggaggggcgagcagcagcggaatgctgagaccccatggccgtgatatgccactggtgtcatgtccagcctcttcggtcggcggagcggcacgcactcagcgcccccggccgtaatggccgaattcccgggcatatgtccggtaccgtcgactg

SEQ ID NO: 132125 - DNA, 1212 bp, Homo Sapiens
  misc_feature (202)..(202): n is a, c, g, or t
gtttttgtgccaaaaatttttttattggagggtgcccccatctatttgtggcgggggcccccacggtttaggcccacggatttttggcgtggtttttgaggaaacccataaaatgggttccacttaggggagggttgtttccttcctaaagtggcagggaaggatttttgctgggagtttaagtgaacccaattcctccctntggctacccccacgtgggggttagttccagaactccaggccctggggaacatatgctgtgctctcttctacaggcgctgtgtggaagaaccaatagcagttgttaaatagctgtggatttcctccacaatccacatagtgatgtgtctccaaggagctctgggtcatgaggccaatgtatgaaatcttcactgaagttcgcatgaagatcactatgttgtgcaccaggatctcaggtaccgtgcagaagaagtacacataggaaaacggtcctcccatctcggccttcccggtaaaattcaccagttgctcactccgaggtggaataagggagacgttagtagtcacatatgtactgaccactgtgttcatgtactgaatctggctggacaggctggtcactgccaccgtgtagaagttggagttcctgattttcagggtggccatgatggtgagaattacaagggagtcttgcttattaaatgtgactttcaccactttgatgccgtcatcatccacaaggactgaatgcggaaacaggaagaaaaccaccaaaccagatgccaggagacaaagcaggatggacaggaggacatattgcttagttcgctgagggcgcaatctctgatcactgtgtgggatcaaagccaccaactcatttacttgctctgttggaatgtagcctgtcccctggcacgtgagacaggtgatgctatctctcccggtgaattccacatatgggaactgagcaatggcttcttcctgctctcgttcagccagcaaaccgtccctgtcatcttcttgctttcgcctgcaggaggaggggcgagcagcagcggaatgctgagaccccatggccgtgatatgccactggtgtcatgtcctgcagggcacgaactcccggcagctcctctccggccgctcccccgaccacctgccagcttgaggacttacccctcgtgccgaattcgccacccaggcctcgctaccttaaaccgttagagttactgg

SEQ ID NO: 132126 - DNA, 1473 bp, Homo Sapiens
  misc_feature (1221)..(1249): n is a, c, g, or t
  misc_feature (1298)..(1377): n is a, c, g, or t
  misc_feature (1396)..(1396): n is a, c, g, or t
  misc_feature (1443)..(1443): n is a, c, g, or t
acagttaaacatatttaatagaaatattaaaataatcattacacttcctctcattgcagaaaccatgaaagaatatgccttttgtaatcaaagtaattttttatcatgcaaaaaattattttgttatgacattcgtaagcagagactatatttcaaaacaagtttatacagacttcaaaaggtctaaagtcaaagagaaagtgaaatatatttaaatatgattagttacatcgtatgcagctggcatactcatattcacagtttataaagtaaaaaaactaaactcttcatgtcagctctgaaatagatgcattttcattaatacattcactagttaggtctgttcttctaagacaggaggaaagatgagatatatgagctattttttaaagaacaaactcaacatatcagcagcaaatttcagttaaactgaattggaaaccaatgttctgtgtaaccaaagtgcaaagccagttctccagctcagaaaattaaattaagagtataaactgaaggcttaagagaacttcagagagcatactgtgtgattaacacataaatattacaaattatccaatttttgatttaagaacaacacagtttggatctagtcattaaaacatatgcagaggtgtcaaaggcaagtaacactaccacctaaggttattcggaggaactgtgaagatgtagcacggacctctaaggtgtctaaaatcccttctgatggaaaggttatggaacactatctgccaaaaacactgaaagcaccacttttatatttagatccaatgctgagtgatatagtcactgttgggataggtttttatttgggaaaatggagaggattctcaaaacagattcatggcttgcatgcagtgacaccctatcaagagcctggaaagacaccatgaaatcacctcaactcaagtggtgggcccacctactcatagtcagtgttacactagccagctctagggctctgacaacataatgagttttgaggtagtatactttaaagaaaaaaagaagagtttattttaaagcaaataactaaactgtattttaacttagcacaattaactgcagcatatttacttcatagccccttaacatgtcacttttaccaacaaagctttttccttcatattctaatcacaaaaatttctcaacaatttgtaacaatctgtaactctgaccttgcaataaatagtcataaaacgnnnnnnnnnnnnnnnnnnnnnnnnnnnnngagacaaggtctcgctctgttccccgagctggagtgcagtgggagtcannnnnnnnnnnnnnnnnnnnnnnnnnnnnnnnnnnnnnnnnnnnnnnnnnnnnnnnnnnnnnnnnnnnnnnnnnnnnnnncttgaaacattatttttanagcctaaattccagttggtatggtaccaaaatttagtttaacttcanaattcacagtactgccgagaaatgggcggg

SEQ ID NO: 132127 - DNA, 1299 bp, Homo Sapiens
  misc_feature (1183)..(1217): n is a, c, g, or t
  misc_feature (1221)..(1258): n is a, c, g, or t
caacgtaaacagttacttttattttgagtaaaaatacacattcatatcattttcccttatatccctcaaatcttaaatgtgttcaatatgtctagaagatatctgtggtctagctagccgagacattttaaaaagacagctgctcctgacttatatagcacttacatatttaaatttacaaagccaaagcaacattttaaaggggtttgactgacgataggttgatgcatccacagattcatttgttcccgatctggcaatacaggaccatagaaaacaccaaacccagtatctcaataactgccagtccaaatgatattccaataactataatcaaattttttgccaagaagtcttttatgaaagaaatacaggtctctttgtaaacttgttttccattatagctttggcatggtctctgcttatctagacaggcacataattcaggatagtgttgaaaattatttccccaatcagcagctccattgaccaaaccgcagcatttaaactcttcttgaaacacaattatggcttcctggaattgtttttcactttcccctgtggcgctcaaaagctttgtgttttcatagagagtttcattcacaatgcgatcagacttagatttgaaaacagctcctaggatacctgtcgccacctgcaggagcaggatcagaagcaagcctatgaaaaacaacagaagcatgcagcgactttcttttatagcaccgcagcatcccaggaagcccagaatcatgatgatggcacctacagcaatcaatatgtccacagcaacgtaggagctagagcctacatcttcagaaccaaaaattgcttgagagtcattgcttactcgtacccatattgctaatgctaggatcaagataccacatagccagaacaagaagttgaaggtaaacatagaatattttatacaggcactcacacctgccatttcggaaaaggattaggaatccagatgccgtgaatttaactattcgttacaggcttgtcctgcaatatgctctggagcaacttgcctgcagagatttctgtatccacggacatttaaatatcgcaaaggctatctccaggcaagtatgttcctttgcttgtcatagctcctggggcactccccggccgtaatggccgaattcccgggcatatgtccggtaccgtcgactgnnnnnnnnnnnnnnnnnnnnnnnnnnnnnnnnnnncggnnnnnnnnnnnnnnnnnnnnnnnnnnnnnnnnnnnnnntgctcggagagtagcgccctatagataatgccaaagttctt

SEQ ID NO: 132128 - DNA, 976 bp, Homo Sapiens
  misc_feature (683)..(683): n is a, c, g, or t
  misc_feature (737)..(737): n is a, c, g, or t
  misc_feature (766)..(766): n is a, c, g, or t
  misc_feature (778)..(778): n is a, c, g, or t
  misc_feature (809)..(809): n is a, c, g, or t
  misc_feature (874)..(874): n is a, c, g, or t
  misc_feature (882)..(882): n is a, c, g, or t
  misc_feature (913)..(913): n is a, c, g, or t
ttttttttatcaaaagctctgtttaatgatcagacggaatggcagcaaggccacacggacagacggagccaaggacaggaccgccgcctctgaacccctccccactggtcaaacgtccaacaccaaaaaagagacgtccccaccccgtccccatgtacaaaatggcttcagtgaaggcgccattactccctgggaagctggtattttttgtaagggatcagggctcacccctgccaccctctgtccggaacagacccgtgagagcgcagcgctcagcagtccccgtgtgcagctggggacgactgacttgacagaaacagattctggactcgagtctggaggccgcactcaacagggcgggtggcgggcgggagctggggcccaggcaccacagacagccagggtgcgggctctgtctctgcggccacagggagcgctgcttcggaagtgaccacgtgcagcgaggggaggatgccggggcctggggccacgcctcggtcagttcccgcacggacgtctctgccctggagtcaggaggaccccatcagtgagtagaccatgccagtggcagatgtcctcgtgggttccagaagctcctagctgctgggtccagagggttaagaacccaggcaccaatgccgctgccacagggaagaacgaggcccaagccctctcagcagaanagaacacggggccacacgggaagcgaggttgggtgccgggagctacaagactcncacgacccagtcctcccctacaggctcanggaccctgaggnctgaccagctgctggcgcaccctgctgtcanagggatctgagaacgtcacccacaggtgcacagcagactctagattgcgacatttataatgggangatgtgangcatgcagactctggctaggaggcaggctancaggagactgtcactatgctctgcgatctggctcaagcaatctaatgactataatcgacagta

SEQ ID NO: 132129 - DNA, 828 bp, Homo Sapiens
  misc_feature (223)..(231): n is a, c, g, or t
cagttcaagaaatttatattcaaaaattttcttaagaatacacatgattttacaagatcattcatcatagcaccaagcctaatattccttaatagaaaacagtcaaataacaaatactccagttaattcccacaggtataaattattcaaatagccatttatatcttaatttacagtaatcaataaataagacggcacattcatatattgtttataaagatcnnnnnnnnnacaaagctacaggctatgtatatcctaaatagccaaaaaataatccttgttactacaaaataccatttcattttcctcaatagttttcttagagctctcagtaaaaactttcagacatagtcaattaagccctgcacaataagggaaccttcaatctgctcaatagaccagactccccccaaaataaaacaatgatcaccacccactacaatatggtctgaacaatctcctgtctccaagtttagttaagtctgtcctgaggatgtacagtagggaacgaccatttttccgtgttcacaatttgtctttggcggatagtatcagcaccactgtgagtgacataggcagcatcttatggtgcaatttcaagggcagagggcaggtgtcccctgcaccacattccctccccacagctaccgcccctaccccagggacattctacacaaacacaccagcatttggcttaagggatccttgttggaatgcaaacggctccgattctgagtagaatttcagaagcctttttgagtcgttactcggggaaggggaaaagatgagggatgggaagatctagtcctgtacagctatttattcccc

SEQ ID NO: 132130 - DNA, 1049 bp, Homo Sapiens
  misc_feature (625)..(625): n is a, c, g, or t
  misc_feature (634)..(669): n is a, c, g, or t
  misc_feature (762)..(762): n is a, c, g, or t
  misc_feature (780)..(781): n is a, c, g, or t
  misc_feature (809)..(809): n is a, c, g, or t
  misc_feature (817)..(817): n is a, c, g, or t
  misc_feature (825)..(826): n is a, c, g, or t
  misc_feature (838)..(839): n is a, c, g, or t
  misc_feature (849)..(849): n is a, c, g, or t
  misc_feature (866)..(866): n is a, c, g, or t
  misc_feature (871)..(871): n is a, c, g, or t
  misc_feature (881)..(881): n is a, c, g, or t
  misc_feature (893)..(894): n is a, c, g, or t
  misc_feature (920)..(920): n is a, c, g, or t
  misc_feature (926)..(926): n is a, c, g, or t
  misc_feature (930)..(930): n is a, c, g, or t
  misc_feature (936)..(936): n is a, c, g, or t
  misc_feature (955)..(955): n is a, c, g, or t
  misc_feature (963)..(963): n is a, c, g, or t
  misc_feature (1004)..(1004): n is a, c, g, or t
  misc_feature (1006)..(1008): n is a, c, g, or t
  misc_feature (1014)..(1014): n is a, c, g, or t
  misc_feature (1017)..(1017): n is a, c, g, or t
gtcttttggttcccaggtttattgacaattactcatctatttttgactccccgagtcccagctcccaaactcgctctccctactccaggcttcacggtagtcccagaatgtaggaagtgggacaggatagactttaacatcacccaggcctctggtttccaaagcattttttttctttaatgcagtaaaaccattcctttaaaacccaaaatctctcatggaacccctacgtatcaaatatataaagcaggagctgcccttgttcagggataatatgtggggcttatggctctaagaaacacagtttgacattcactgctctccttacttcagttacctcatggtatagataaatgggctgggcccagagaggggccatgacctgtcctgggacacgcagccactgaagcctttagtccagtgctccttccacagcaccacactggattctggagtctttccagccagggcagaggaagctgcaacagtgccacgataagagtttctgggtcttctggtacctaccctctcagactgctggtcctagggtcatgtgaggggctggctggagggtggactggaagtgcatgggggttgggtggggaagccaggtgtccttgttggnaaggtcagnnnnnnnnnnnnnnnnnnnnnnnnnnnnnnnnnnnnaaagggatttcccaagcctgcaagtgttcctctcctttcttccaagaataggggtctgagctccctggagaagtgttccctctcaggacctcnttgcctggggacggtctnntaggggggcgcggaagggcgccaagggntcctctcntcgtgcanngtgcttgcttgnnaaaagaggtntattaatgactctgggntgggnggtgttctgnttcactgtcacnntgtgtgtgagagaggggaaagtgttntgtaancaangagggntccttcttatacggctccnaaagcgcncaccctcttcccccaaaccggaagatttttagaaaaggagncnnntgtgtntcnaccgtgtgaaaaagagggtgctctccccacaa

SEQ ID NO: 132131 - DNA, 1063 bp, Homo Sapiens
gcaggagactggagttttattggtactcaaatcagtctcccagagcattcaaggattgaagtgtttaagggttacttggtgtgccaggggcagccaggtgactcaggagtgctgactggtccggtgggagattaagtcatagggagtgcaagctgttgtcttgcactgagtcagttcctggatgggggccacaagatcagatgagccagtttatcaatttgggcggtgccaggtgatccatcaagtgcagggtctgtaagagaaagtgctcctaaccgaaattagccgggaagcctctcaggttttaagtaaagaaaacctgtctttgactacaaagccacgttccatgtttctttcttctttctttaactcttacaggcatgactatggtcagtgagccaattctagtccattgcctgtttttgtgcagagagcaagctaagaatagatttgcattttgaaatggttgaaaaaaatcaaaataagactattttgtgatatgtagaaatcatatgaaatccagatttcagggcccatacatagttttattggaacagtcacactcgtttattgattggctgtggctgctttcattctacaaaggcagaggtgaacagctgggacacagatggcctgagaagcctaaaatattcactatctggccctttacagaacaagtttgcagacttccagcttaatgtgtcaaagatttttacaaagtccaattacacaaagccaccactagtgggaggataaattggtgcatcctcttctgaaggcaatcacaattttaaatgctgagatgctctgactcagcatttaggaatgtaacctacagattcctttgcacatgttcacggggatttccatgaggatatttcttggtacaccatcctttgtaatatcaaaggcctcaggggatctgcccacctcagcctcccaaagtgttgggattacaagcatgagccactgctcccggctatcaaaggcattaaacaagacatatttctatcagtaggggaatagtaaactaaatagtaatcatccgtacaacttaaaagcc

SEQ ID NO: 132132 - DNA, 738 bp, Homo Sapiens
  misc_feature (674)..(674): n is a, c, g, or t
gtatctcattgtttatatttttattttcagaaaaacagagttcacttgaatacaattctcactagttaaatcacaattcaccttatagttaattaacttatgttcaaagatagtcctttcctgctatataatttcattttcttaaaaagcaaaacactttcagtagaaaaaatttacatatgaaagtcaaaaacaattatttcagcaaaaatggaaatcaaccaccgtatcttttcttgagttcttcgacagaactatccttcaatcctgacttgtctatgtgattaaataatgcacgtgcaatctttttctctgtttctgacataaacatcactgccatatcaaacctttttagttcagaaagtctttgtaagatttcaaagatgagtaatggcttttctttctcaatgtaaaagtcatgcagaattttaacgatctggttgaatacatctggatccagatttttctgaaacaacttaggatacaaagatggttcaatttgctttaaatactgatacaacatatctggagaacttttcaattgtctgaaatcagattcgagctggaacgagtttgcaggaattggaggaagaacagttgtggcaaactgagcaggtttttgttctatctctatgggattttctcgctgtaagactgacataatcctgcttcanactggcttgaggttgcagggatgaagtatcactgacttcttctattttcatacttttgctcttg

SEQ ID NO: 132133 - DNA, 674 bp, Homo Sapiens
  misc_feature (633)..(633): n is a, c, g, or t
  misc_feature (653)..(653): n is a, c, g, or t
ttttttactgggaaggctagttgtaaacataaacattctcactgaactactggccccccaaaacctaacctatctcacaatcaataatcatcttttgactataaaatcataaaaacttgtactctgtggctcttttgtctcgatgatttttcagagaaaaaaattagctgtgttaagtagtttcactgatttatccatcttgaatagctgccagttctggaacttcatacatcctcagaacgtcttcatagagcaaataattatgtaggcttctgggaagtggcagctgactaatataactgtcagaccgtagacgttctgattttagactggaccgaatttccaaacgacaaagatgggtcagggatggaacagtggcaatatgttgctgtagaatccaagcgtttgaggcacgagcagagagcatcctttcaacagctggtgcaagtgtcttccaattagtaaactccaaagtgaagataagggtgtcaatgctgactgagtcaatccaagaattgtacagtataatcagtgggtcaaatccagcaaccagaagatgtggcaacactccttatattttgcttgtgctttaattgcatgatttacaaattcatatatatggttccatggtcncaatgagcacctttcctcanaaagtagcgaatatcgaaact

SEQ ID NO: 132134 - DNA, 765 bp, Homo Sapiens
  misc_feature (611)..(611): n is a, c, g, or t
  misc_feature (684)..(684): n is a, c, g, or t
  misc_feature (741)..(741): n is a, c, g, or t
ggttcggatgtgggtacaaatgtgagttttatttgcattctaacccaagcacagatcccacatacagacttctcgtccgcactatggtacagtaacaagtgcaaaatatgctttatttcaggtacaaaaacatggcagtaggacaactttgagctcaacgcccacctccccaggacctctcacacccacctgacccatccaagggccacaccaccccgacagatactcccaccacctttagaaaagagtcacccaatctggagaaaggtgtggaggttacatctttagaaagaaatcattttaaatacatgaacattagagaacacagtaaccgtgcttccacccagcacggggaggctgcagagaggcaccccaaacagtccccttctcttctgtggttaaccaagcaagccccgcaaagcttttcccagcagagcacacccagccagcaatgaggcctcaggacagagccagcactgtgacaaaagaacttgtcccacctatctgagagcatgagatctgcaagtgggatccggactggacaccaggaagctcaacctggctcgggccatcagtagctgtgggaccctggcccccatctaacctcccangttgacttccctgaaaactgggctagtgggggccccccattgctttagggaggatcgagtgagaagctgacanatgcgcagaacacaagctagctgttagcccagctgctatcactactgttaccacgangaaggactgcagtggctgtgtctg

SEQ ID NO: 132135 - DNA, 636 bp, Homo Sapiens
gcattgtttgtattacagaagttagaaacaaacacctgggatcaattgtaaacataatcctgaattacagtattttccataggacaaaacacagcaagacattttctatttagacaggcaactttttgatatagagcttatttatactgaagaatctggaacaaaacacaggacacagtactaatctgtcaaatatactatgaaatgcatagtctccacttaaaatgctgaatgacacacacgttttgcaagcattactgctttccacaaaaactgctgaataggagttccgtccctgccaagatcagtgtttaagagatactttatgatgctgataagtattattggtggtggtggtgttcagaaagtttgtcactcatgcagatgtctgaaatcttgttccgaatccatggaacatagggtggaggccagctcccccttttttagatgatcacatagttctgagcagagatgtggtcctcaccctgcagttcctgcaggagctgctgctgctgggatggctgctggacagaggcctccatggagcccgctgtgctggtgtcatcagaaagagacgtaaaggaaacccgggatgagagctgctcaacggtcagagttgccaaagctgagctctgg

SEQ ID NO: 132136 - DNA, 1056 bp, Homo Sapiens
  misc_feature (58)..(81): n is a, c, g, or t
gtgccatgctcgaattaccctcactaaagggaaaaacttgcggccgcggctgtatgcnnnnnnnnnnnnnnnnnnnnnnnngacctttagaaaatatttttattttcttaacacacagaggtaacaatgacatttgcccactagacacagtagttcaagacatatcagaaatggatcacaattcacatgttacaatattcatcaatatgaccagtctcatgttttcccaattatctttgaaaacttattaaaataccacagcatactaaactggtaaattcatttatcatgttaaagagtaattttgattttgattagtgaaaaaccaaggcatagtccattgttgaaatacaataccttatccagcatcactcaagtatgaagcattctaccgaaacgtttagtcaaatgacacctgttaaaaatctaattctgtattttaactaccatagaggaaataatgtttaacatgccttcttaaactttaaaatataccacgcagaatataacaatgttctttcattaatcttcctcattagaaatatgaaccacttagttttctagtgcaacacaatatcctaaaaatttaccaacgtgggtatctgccttactagagataaccccaaatggctacattaaaaaaattgtgaacttttaatttttttggtcacatttaactgtcagcgattacttcttgctttgattaaatatgctggttttctgttacctttcctacctccctgagcatcattggttcggtcattgatcagtccacgtatcctttgcgaccgtatggtctctcaggggattgcttccttttttccgaaagttcagggatggttttgtttgtcagggtggtgtgaccactatgtacattcgcatcattgttatgttttaaagcactggtcgattcggtaaactgcgtagtgtgggggtttgttcattgaggttggtccgcgtgtgtgtacttgtgcctttttcttccgcacgttgtcccgctgcattctgcgctaggggttttgcactggtcgggttgtgtgttggtagtgtgtcttg

SEQ ID NO: 132137 - DNA, 2256 bp, Homo Sapiens
ttttacagtttaattatgatcaacttttattgattttacataaatagcttatagaatgcctttacaaactatgtttttgcaatatatttgttacaacacacatttccttatgaatgtatttgttaaatctttttgcagaggaagtagggaaaagtgaggggagaagaggaggaataagattttagaactaatcgtcagcaatgggcctaggtatttggcaattatttcctttacaaaaaaattacaggtttgtaacttcaaacatcaaaagtgtagtgcatcaatttaactaaaaaatcagtagtgcctaatatattatctgggcatcaaatttctttttttaaatatatccagattcacatatttttactcttattaaataatggttttaaataataatcatcacaatgtttagctacataatcccagatctggattaaatcatggtgatatcgatatttttaaattccaatttatttgttaatcagtaaaatgtaataggtgatagtgtgtccagagaatgagcctcctatgtgtaggaagacgatagtcttattacaccctgctatcaatttaggtcatttacatagctgctaatgtatcagaatttttttccacactgatgtagtactttattcaagtcaaaacaagttatcattatcataccaacgttgaagaattaaccattcctgaaacaagaaacaatctttacattagtatttcttggttatggtgcttagtcttggtattattaagcacaatgattcttaataaacatgggtggatgaaggcaaatgcatatagcctagtcccctcaataatttattctccatcttatttaaaattgttgttgaggctatacaaactacagatctgctgctagaaagatacaagttgtcccccgaacaacatctggcattttaagcataagattaaagtcctggtgttcacagcatcttcttctgacctaccactaggatcattcctcagcagtgcccacgatgctgatttccaaatgataccatttactatgtatcttgactgtatggatattattttttccttattaaaaaaaagaaatacgatgatatttccttctttgtccttacttaagaataactgggcaataatctattcagtctttgtaaactctccattgaataatttttcattcttacagccatttcctgaatggctgctgcgctttccctctgtcatctccttcacataactgagcggtcccttcccctcaaaggatgaaggatttttgaatgagccgccaatcctatcccacaaagtgaaatattgtccataattatagtcaaagaacatatggtggtctgtatgatgagctgagccattaataaatggctgtaagatttgggggacacgaaaatcaccgtcatgaatggaaattgtccagatattaaccaagatgtacagacttaaataaaccaccttgtgtaatggaaagataaaagggtatatatggtaaggtagactctgaagaaagccatcaatagggtgaaaagcatgacttgcaaatggagtaggaatcttccaaatatggtgaggtttatgtaggcgcttatataccagtctatgatgaaggcctctgtgaatccagtagatgaacatgtcagtgaaaaagaggaaagatattatactaacgacaagttccaacaatccatatggaaactctcctaggtcatcatgtaatttgctgtaacctcttatctccagcaagaacagtgcaacagtaagaatacttatccatggcaatgcctggacagtaaacttaatctctcgacggacttgattctttaaaaattgtggatgtttcattaatgcatgatcgaagacaaaataatagctcagtgttgcacagaagaaataaaggatgtaagcaccacatttgttacactcagaagactaatagcttgtcggaagatgtcatcttctggccatgtggctggatacacgtatggtgtaaaaaaatagtaatctgcaacacggagtacaagatccatcacttagcccctgccagcctctcctctcactcggcgcaggactcggatccgtatgctaccgcgatcctaccatccgcccacgcctagcacccgagggcactcgctaaccaccgcggcgcggagaaaagccgtgctgcgaggacaccttccgcctcgcccacccgagtcccaggcgctgaagtctctcctcgtgccgattcaacacccggcctcgctacctagccta

SEQ ID NO: 132138 - DNA, 2060 bp, Homo Sapiens
  misc_feature (64)..(64): n is a, c, g, or t
atatgtcgacatgccgcgtggtcgggtacccggggaatacatgcccagcgcattgagatgactngggtatcgatatactgtcaggcagaacatgaaatttagcaagtacatattcgacagatttgacggaagacaccgcatttagggggcgtgcgaggagcgaatgagtgaataaatgtgcggcaaaattagtatggaggaggtgttggagggggtgagagagagacaaattcgcgtcactgatactacaacagattccggaggtggggagagatattagggggggttacacctagtgatgtgagccagtgtgattagcagggacacaagagagagtatgccgcggagagtcattgtgctatcgtagaggcatcaagaggagggagaaacagtgtgtctagaacagcggtagatgaatatttattgcttgatttcaacaacgcaattacacctgaatgtgtgggcgcggcggtatataggaaaaagctatggtgtcacgtaaggaaggaggtgacgactccattcagcagacgggaacctggcgttggtgtggggtgatcatcgagatttgggtagagagcggttttggtggagaaggcgggaggaggcgcgggcgataatatatgccaaggagtgggtatgagtcgagtatgaagggggggcgggtaggcgaatagtgagagctcgcgcgtggaatggctgatcgggatatgaaatggggaggtgggagattgtggggagagcggcaaccccaatcagatacatgcgcaggtgtatacaaagggggaatcgttgccgaagagcgctaaaggccatgatatggcgttgcgacacgtatccctgcacagcgcaaagactttttctgaagtactttagcttcaacagtgcgtcggtcacacaaggcacgatcagggtacagagtgtctccaaggttgcaggatgtgcgaacggtgaactctggcaaatcgctccgctgccgcctagcgtccttattccggtagggcgagggttggacgtagtacttgaggagcctggggactcgtgggtcttgtcacgtggtctgtgttttgaggatccgttcgccttgtgtgcttgtaatacgatctgtactatctgtggttgttcatttgccatttattgttctgcaaagacacctcatgagcaccaggtggcgatgtcctttcacggagcaacaccaaagacttcaaaaacattccagttacaaacagaacaattcacttaggacattcacctgcctctcccagaacccccaatctaatgccggggaccacagagaaggaaaggggtcaggggtcctttcttgtaccagtgagccttcccccagttttctcatgcacacaacagtgcaataccaagacgagtacttttgaccaagtataaaaccacagagaagaccaaaatgtacaaaaatgggaagagaatgaaaacacaaaggcacacgcagccacaaatacacaattaaccttttaggggatgagcatctgacgaggtttgtctccaatccaatttgtcatccctggagactctggaagggagaaactaggctgctggtgctaagaccatgaaagggaaggcatggaatcccctacttgggccaggagagcagagcagagcttctagtgggaaaacactctgtgtcaaggtagtagatgcacagggctcagctggcagggttctcactgaaatctagactgcacctttccaggttggcacaagacaaagggcagaggaatgctccccgccttgccgggcacagtgttagaaaggaaattcaagatccctactgcccagaaagccacacaagaacagcacgaggatgaggtagccctactgggcatctgcagagaggacaagaaagggggcacagacacaatcaaaagcccaggggaaaaggcttgaaggtatgaagtcgacctctccaagtggtattccacaggcacagcggctccctttccatcttgagtcttcttccttctgctcctggccacccccttccccacctataccttcttctccctgatgtggggaaactgatctct

SEQ ID NO: 132139 - DNA, 1161 bp, Homo Sapiens
  misc_feature (1143)..(1143): n is a, c, g, or t
ttttaaggaataaggtgaatttttattaagtgaaaaaaatcaataacaatataggaatgatcacatctatacaaatacattgctacatttctacatataaaatgtataggaaaaagtctgaaagaatgcacaccaaattattctgtttttaggaaaagcagtaggattggtcagggcatggaatgtcggctaagtgaagtgagatttaaaatttttattctacatgattttctagtgttgggaatttttgacagtgagcatacatgcacttattacttgcataattctgaaaactattttaaaaacaacagaaaatatatgaaagtctattggtgtatacagcattaatagtagtgaaagtttaacagaaaagatctgaaaatctcccaaagttatatagaaacagatctagctgacacactgtgtacctagaaatgattttggatctcttcacagagacccctatcccaccaacctccaatcctcccaccatacattgatccctttctatctgcttggatcattagctgtaaatttaacttcgaaaaacaaagtacgtttaatcattgtaccctgagatctaacattcagagagtttcttcaggtgcaaatacatcccattcttgggcttgaggattaaatggttggggaaagtaagaggcctggtggggtctggagtcactctgaagtggagcagaatcaaggcaatggttacctttaactcaatcatggcaaactcctgcccaatgcagttccttgatccagctgagaatggtaagtaggcataggggtgtctctgatcagaattctcctgagagaacctcaaggggtcaaagacctttgggtttttccagacagcagggttgtggtgaagaccccaaatactaagaaccacggtgatccctgcaggcaatgtgcatccatctgggaaggtaagtggcttgctgagatctctggaaatggacgggactgcaggaatcaatcggcacgtctccttgatgcacattgtggtgtacgacatctcacccagctggtcccaagtgatagaagacccatcccccaggatgcccctgacctcctcccggcatctctcttgatgctcagggttcagagccaggcagtaaaggatccaggatcctaacncctccgaccgtaccagcc

SEQ ID NO: 132140 - DNA, 1038 bp, Homo Sapiens
  misc_feature (692)..(692): n is a, c, g, or t
  misc_feature (696)..(696): n is a, c, g, or t
  misc_feature (703)..(703): n is a, c, g, or t
  misc_feature (725)..(725): n is a, c, g, or t
  misc_feature (750)..(750): n is a, c, g, or t
  misc_feature (764)..(764): n is a, c, g, or t
  misc_feature (768)..(768): n is a, c, g, or t
  misc_feature (808)..(808): n is a, c, g, or t
  misc_feature (863)..(863): n is a, c, g, or t
  misc_feature (896)..(896): n is a, c, g, or t
  misc_feature (936)..(936): n is a, c, g, or t
  misc_feature (944)..(944): n is a, c, g, or t
  misc_feature (986)..(986): n is a, c, g, or t
agcccaggtcaacacgcttttattgccacttctggctcccctcgtcccagcaagattcctacctcttaccctgtaggaatactgagctccgatgcaggggaatggggtgggggtgttaccacttctcctctgcacactgccaagttaaagaaaaccctgcttgctggagagggagggccagacagggaggaattcaagggcatgtatggctcagtcccacttctgactgcagagtatagggaccagggttccaaactttttttcgaagtaagggaggtggggaagaatttggctgctgttgtaccccgtgtcctagctgccatgtttccatggaaatgaaggcggggcaggatgtagctcactctgactacctgggaggatggcaggacaggcatttggtaaacatatctccctccactcctacctagcacatacggctgtccccagccgacccccaggctctctcctcactgcctgctccactcccttcccttctggagctggtatcatgccaagtggagtccaggcagggctgccagtgctactctccacaggcaggtctcactggcacgttaggatctaagtatgtccgccaagctcaggagcatccctgctagagctggtggtggcagtgcctcggtgaaaaggcagcagcagtacccccaactctctgtgcaactgctgtttcccanacanaactganaacataaacccaaacacttaangggtatcactcctggcacaatgctnagggctgggatggngganaggaggcgcatcctcctgagactggagcacctgtgcaccntgcttctgccatctggagtttgcttcttccactgggctgtcactggggggctggnatccaatctccatttggtgctgctttcagaccnactgctgttcgtttatgaggcttgccagtttcatggtgangaggtgangatggatctcagtacatgggtcacccggtgctgctgttgtanagctgtactgatctgatcttgatctgatcacaaggatcgggaagcagattcc

SEQ ID NO: 132141 - DNA, 1036 bp, Homo Sapiens
  misc_feature (814)..(873): n is a, c, g, or t
tttagggatgcacaagtctttattcctgctggcagaggaggtggtcctgtggctggcggagtgggcacctcaggctggcagctctcacctcttgctggccggcagcttcagccacttgggcaccttgcccaggctcctcttcacgggctgggccgtccctgggatgggctcaggggggaccagcgccccctcctcagcagctggctcagacttaggtgcagggtcaggggctggcaatggggaaggggacccggcggccctggacatgtacctggccaccagcacatcggccgcagatggggagatggcatgctccagcaggccaggctccaggtagacacctgccggctcctcggctcccaagtgcaccagagcggccgggaagaggttcgcctgaaagagggtctgcgtgtggtcgtccaggactgtttttggaggggtgatgaacaggtaaaatgacagctcggggttccccaggtggctcctcacgaagtctcgcaagtcccccactgtctcgctggggcggaagaagccctgtaggacgtagcggtcggggaacaggaccctcagagccacctttgggtagcgctccagcttctcctttatctgcgcctccctgaaggccttggtcaccaagggggcttcttccaggcgcttccgctcactcttgagctgggccaagcgtcttctcacgtcgtccaccgtcagctcaaagaactcatcaggcagctccgctggccaggcctgcagccgctcctccaggtcggggtggcacaccaccggctcccggtccacgggctcccggtccacgggnnnnnnnnnnnnnnnnnnnnnnnnnnnnnnnnnnnnnnnnnnnnnnnnnnnnnnnnnnnngggatcctggcccgacttggacttctttggcttggaggggcctccagggctggagagggacttcggcaacttagctgaagatgatgtcagaggcctcgtgggcccaggagggccccccagtctctccctcgtgccgaattcgccacccaggcctcgcttcctt

SEQ ID NO: 132142 - DNA, 905 bp, Homo Sapiens
  misc_feature (39)..(39): n is a, c, g, or t
  misc_feature (57)..(57): n is a, c, g, or t
  misc_feature (91)..(91): n is a, c, g, or t
  misc_feature (123)..(123): n is a, c, g, or t
  misc_feature (125)..(125): n is a, c, g, or t
  misc_feature (198)..(198): n is a, c, g, or t
  misc_feature (207)..(207): n is a, c, g, or t
  misc_feature (247)..(247): n is a, c, g, or t
ccagtgtctagtgtggaccagaggagccagagctggtcntgggcacttatccctgtnggcctcagttctctcccccacacagttatctccngtcacatgtgccgggtgacgtgcacgtctccntntgccctagcaggagatgcatgatgacagccagtgtgatgtgtctgaaagtgtccagggcaaagcgtaggagangggtggatntgtgcagggtgcagctctggagaagaagctgaatcactcntgtcccattccctaggccctgagcaagtcaggctcctggctctgggtgtgctccccccaaacgaagtactgacttcagcctgtgaggggagggttgagggaggctctggaaagcccagccacacctgagtccctggcagtagccttggggcagagggcacccgcagagtcccagagatgatgtgggcagtgggcagagagagccttggcgcctctgtttgccaccacttccccaggaaggagggacagcatttctctggctggttccactaaatgtgccagcccaaatgcagggcatgggctctggttctgccgggagcctgtgacacccccaggaagggggtggaactgaggaagagcgaggatatgcaggcactcatgcttaccgggactggggcagctcactaggattctatcctttccaatcggcatcagccagctcttgtcccctgataagtgaggacagcctgaccctggcctcaaatgcagccatccctgagttcatgcgatgctgacgggaccccagcacacttccctgcctcctttgagatctgcgagcccttgctgcagttcagattcaacaaggccctctgcccaccctctcactaggcctcacccaacaccagtggaactggagcctctggctgggcacagtggct

SEQ ID NO: 132143 - DNA, 748 bp, Homo Sapiens
tttttcaaactgtcattttcttttaatttttaatcagtctgtgtcaagaagaaacaggacttgatcaagcttccagccctcaccactctatcagcatagcaattttaaggatcagagctttgtttacatttgtctaaaaccaagagaaggaaaggaatcaactccacagatcaacatgtatttgaagagacacttcaggacactttgggaaattttttaatcaatcagtttcttaggaacaacacccagtgggcatgatgagaccctcaaagtaggaatgcaggaatgataggcaggtgaggtggctgagctatctgggctgggaggccagcctcctggaatcttaggacaaataaaagggggaaaaatccaacctcacacttcttttgaaggtcggatatgtttacagaaacaatttctgttttggaaaataaatgtatggttcaatttggggctgggggaacaatgacaattgtcaactagagagaggctcatgattctgagataaatgttaagtggagtctttttaaaatgctgaaacaaaacattaccttggttactgtctccatcatgagatgtatttgaacacattctgaccatgtgtaaaaaccaccagatttacccaatgccatggatccatgtgccacaccatgaatacaaacactgatgatatgttaccagaagacagcacagagttcatgagctctactttgtgaagaaatttccagaaagcagagtctgcccatct

SEQ ID NO: 132144 - DNA, 1461 bp, Homo Sapiens
  misc_feature (1155)..(1155): n is a, c, g, or t
ctgtctgcttttattttattctttgatttaagatttctatgagcagagtacctggctaaaaatttgaaaatcacagcactagttaatttccattacattacagttacagttctaacattttacccacaatttaattccatagataggagagaagataaggaaggggaaaacaggcaattttctaaggcttttccgattcaccaaatactcccccacttgacgcttgaaatctccaatttgtttctttggctcaaaatgtttcccctcactttaaatgcaagatgatgtcatttcaccctagccagttcctaggaagatgtctcattggtaaataagtagatctttaacaaattttgcaaacccattgatttgggcaagtattgacagaacttgataagacatttaattgaggcactttctacttgaagcattgcctcctataccctgatacaacaatgaacacaattacccaatatgactgattatgattactttcggcacaaaatcactgtctacttgacttcataaccaaaacagagcttttaatgggccataaattgaaagggaaatgtctgccacttggaatctccgggcatttatcttcctcctcttgctttcagtttcttacctggtcaggcacatgcgcacaaagtctgctgcattttctgagaagtggtctggtaaaggaggcatcagccctcggtgtgctccgatgtaaaacatggcggccatcctgtccatggaagccagtggaggcttccctgtagccatctcaaacacagtacaaccaatgctccagatatctgatttccgtccatagccagactcattgatgacttctggggccatccaatatggagtcccatgcatggacttaagcatgtcactgtgggtgccatttaaacctgcccaggccaaacgcctggcacagccaaagtcaatcagctttattattccagttggcatgagcataacattatttcctttgatatcgcgatgtaccacacagttctcatggagataagcaacaccttgaagtatttgtttcgtatatttacagaacaccatctcaggcaatggcccaaaacggtttataatactagagattgagccaccaggaacaaactccatgaaaatgctcacagtgttctcttngcaagcatgtccccaaataggccacaatgttgacatgtttcagtgctttgagcaaatctacttcttcctgtagtttccggtattccttttcagcagctaatttattagaggtatccaaagccacctgttttacagctattagctgtccttgactagtgagaccacagtatacctagaagcaaatcaataataccttgttattaaattaatgacataacttattcacaaaatgcctcaggtgacacttgactttcccttctctttctaaacccttgtctttctctaagttgatacctcccttcctaa

SEQ ID NO: 132145 - DNA, 858 bp, Homo Sapiens
  misc_feature (186)..(225): n is a, c, g, or t
  misc_feature (670)..(670): n is a, c, g, or t
gtaatagtggaatatctcctcagtcgtcttgtttcgctgccccggggttctctctttcggtacatcctttgtgtgcccacgactgtttgccctgttatcgtcttctgggggccgcccgcgctccctctactgtgtgtctcttaaactctttttctgggggccccagttgcgtgtcgcctacaacannnnnnnnnnnnnnnnnnnnnnnnnnnnnnnnnnnnnnnnaccatgtattttaaactaactacattaaaattgacaggacacggcccaaaaatcaaaagaaaatgtcatataaaaccctagagaatgtagttcctggacacatcaagacttgtaaacactgaaatagttttttgttgttattaagaacatgttttctgatactatgagtaataatgtctgacacttgaggaggctaatatgtaactgccactttcagttaatgactccataggatctgcttaaactgggttagactgaattttcagtggggaaacaaagatcccttagccatcattccccacaattaagcaagggagcatctgcagtggaactgggaagaaagtcttgatgtatattcagtgacttctctccaagaaggagtgcttcaggagctggagagcagaaggtcgctcatgctggtccctggtcaggcacatgcgcacanagtctgctgcattttctgagaagtggtctggtaaaggaggcatcagccctcggtgtgctccgatgtaaaacatggcggccatcctgtccatggaagccagtggaggcttccctgtagccatctcaaacacagtacaaccccggccgtaatggccgaattcccgggcatatgtccggtaccgtcgactg

SEQ ID NO: 132146 - DNA, 2433 bp, Homo Sapiens
  misc_feature (781)..(781): n is a, c, g, or t
ctggcggcggcaaggggacagcactgagctctgccgcctggctctagccgcctgcctggcccccgccgggactcttgcccaccctcagccatggctccgatatctctgtcgtggctgctccgcttggccaccttctgccatctgactgtcctgctggctggacagcaccacggtgtgacgaaatgcaacatcacgtgcagcaagatgacatcaaagatacctgtagctttgctcatccactatcaacagaaccaggcatcatgcggcaaacgcgcaatcatcttggagacgagacagcacaggctgttctgtgccgacccgaaggagcaatgggtcaaggacgcgatgcagcatctggaccgccaggctgctgccctaactcgaaatggcggcaccttcgagaagcagatcggcgaggtgaagcccaggaccacccctgccgccgggggaatggacgagtctgtggtcctggagcccgaagccacaggcgaaagcagtagcctggagccgactccttcttcccaggaagcacagagggccctggggacctccccagagctgccgacgggcgtgactggttcctcagggaccaggctccccccgacgccaaaggctcaggatggagggcctgtgggcacggagcttttccgagtgcctcccgtctccactgccgccacgtggcagagttctgctccccaccaacctgggcccagcctctgggctgagggcaaagacctctggagggcccgtccacccaggacccctccacccaggcctccantgcgtcctccccagccccagaggagaatgctccgtctgaaggccagcgtgtgtggggtcagggacagagccccaggccagagaactctctggagcgggaggagatgggtcccgtgccagcgcacacggatgccttccaggactgggggcctggcagcatggcccacgtctctgtggtccctgtctcctcagaagggacccccagcagggagccagtggcttcaggcagctggacccctaaggctgaggaacccatccatgccaccatggacccccagaggctgggcgtccttatcactcctgtccctgacgcccaggctgccacccggaggcaggcggtggggctgctggccttccttggcctcctcttctgcctgggggtggccatgttcacctaccagagcctccagggctgccctcgaaagatggcaggagagatggcggagggccttcgctacatcccccggagctgtggtagtaattcatatgtcctggtgcccgtgtgaactcctctggcctgtgtctagttgtttgattcagacagctgcctgggatccctcatcctcatacccacccccacccaagggcctggcctgagctgggatgattggaggggggaggtgggatcctccaggtgcacaagctccaagctcccaggcattccccaggaggccagccttgaccattctccaccttccagggacagagggggtggcctcccaactcaccccagccccaaaactctcctctgctgctggctggttagaggttctctttgacgccatcccagccccaaatgaacaattatttattaaatgcccagccccttctgacccatgctgccctgtgagtactacagtcctcccatcgtcacacatgagcatcaggccaggcctctctgcccactccctgcaacctgattgtgtctcttggtcctgctgcagttgccagtcaccccggccacctgcggtgctatctcccccagtgcccatcctctgtacagagcccacgcccccactggatgacatgtcgtatttcttgcatgaggctagtgtggtgtttcctggcacatgtcttccagtgatggctctgcccttggttagagcagttgtggcaaggggagataagggtatctggtgactttcctctttggtctacagctgtgctgaggtctgaatggctgggttcttgatcctaggttccaccatcaagccaccaacatagctcccatctgtgaataggaaacgaggtgaggtacaggaagtacctgatcccacctgacaacgactcattgacctgagggccctatcgtctccaggccccctggatgcaggcctcgacagtcgcgttaccagcgagagcgaccttagacagatccctgcccagtggagctaacttgatctattggcaccctgaggcccagagggcctgcaaggggagtgaagttgatagcacagacccatgaccatgtgcgggcccgccaaatggacaagtgggcagaggcagagaccaatcgccgtgaagggccccggggccaaggccattacgtgcacgtggagcgaccgggcccaggggcctctggcgtcgccgtcaagcgcggctaaagaggggacggcggaggggcctccaagggaggggatggtccacacggaa

SEQ ID NO: 132147 - DNA, 573 bp, Homo Sapiens
  misc_feature (370)..(487): n is a, c, g, or t
ctgtcttgagtggggacaacgtcccccactgctgccctagagctggggagacgctgggaaaggttcaacctccacacactaaaatcattttggctcctggggcaagctttgggaatgaatgtggaagatgcctatattctgagagacaggacagtttcccaggaagatgggcagagactttagtggcgattacctccagcacagagacgtgccaggcggtgtttgcgctcggggcgagatgctgcccttctttgcacgaagcctggcctcttgcttggcgtgataaccctgtcatcttcccaaagctcatttatgagccaccagaggctcctaccccaaagattttcacagaaacttgaggccaggtgcnnnnnnnnnnnnnnnnnnnnnnnnnnnnnnnnnnnnnnnnnnnnnnnnnnnnnnnnnnnnnnnnnnnnnnnnnnnnnnnnnnnnnnnnnnnnnnnnnnnnnnnnnnnnnnnnnnnnnnaagatttaaaaaaattagccaggcacggtggcacacacttgtagccccagctactagggaggctgaggagggaggatctcttgtgc

SEQ ID NO: 132148 - DNA, 1353 bp, Homo Sapiens
ctcgtgcagagccagatactttattcatcacttgggcgatttgaaactgccaactccctccctccctttcccacccttgattttaaagtgacataagaatggggataagtctgaactctttcaccttttaaatgccatattattgcccacagttgccaaatacaaaatatcaagtcctctgctgaagaagactgaggtcccatcgtttcctgtgtcgcaggtcacttcttcaccaggtggctgactgcatcattgtgaggcagagccatgctgtgcaagtgtcataagtcatcccactttcaactctcaggaacactcgcagccagtgccacgctgtcctcgccatccaatattgatagccaccccagttcctgccagccagcctggcacacataaccataggatcccctctggtcatgggtcaccatgccttttcttaaactgcgcttctagtgacatggccttaaacgatggggtccccaaatgtacagtgctcctcgatggcaaggttgtatctggcgcccttcccatccttataggtgctggtcacgatcctcagccagcctctctcgccccatggttcaccccatgaattccggacaatccagtactcagtcccatcactgatgccccacccagccacggaaacgacatggtttatatatgtggtgtcctggtattcggcatagatgcctccggtgtagttagccagtctttctgttgccattattccacagctgatgggaccatttgcgtagatttctgccatcatcttctccctcccagagagggagccgtagtctcccaccctccagagggtgtagttccggatggcgtggcactctttgaattcattgcatgtcccacattggttaaacttgtcacactcctggtccttggcctggtagttgttgcaggtctcgtcagggatgccgtgctggtgggcgtagtcccacacggacaggtcattacccccttcacaggagccagcgttaccgcagtcgatgacgttctgcacggacaggagggtggagggccacgctcccttcctcttgatgttgatccgatccgccatagcgctggtgctggcgtgggcccagcaggagccgcagtattgggggatgtgctggttccgggtgatgctggcatagttgacaccatccacattgcgccagtcccagctcttgggcagatccgctggggacaggtactcatgaggccgggggtatgtgctgcgccccagcggagccagcccgtccccccgcagaggccggtagcaggtctgtccccggcggaagtagaggccgccctgcgccgcgcccgccagcagcacgagcagcagaagcggccgca

SEQ ID NO: 132149 - DNA, 1875 bp, Homo Sapiens
  misc_feature (1861)..(1861): n is a, c, g, or t
atgatacgatcgagctcggtaccgaacgggtgatgcggttgctgagtgagaaggacgtggaccccgtacgcaccacgtccaaatgacattgtgggagatcgttcacggtgcatgggcgattgaagccgggcggaaggccctggagcgggagctgtaccacgtcatctcctttgatggctcctatgtcaattaccgacacttggctctcttgtgtgataccatgacctgtcgtggccacttgatggccatcacctgacacggagtcaaccgccaggacacaggaccactcatgaagtgttcctttgaggaaacggtggacgtgcttatggaagcagccgcacacggtgagagtgaccccatgaagggggtctctgagaatatcatgctgggccagctggctccggccggcactggctgctttgacctcctgcttgatgcagagaagtgcaagtatggcatggagatccccaccaatatccccggcctgggggctgctggacccaccggcatgttctttggttcagcacccagtcccatgggtggaatctctcctgccatgacaccttggaaccagggtgcaacccctgcctatggcgcctggtcccccagtgttgggagtggaatgaccccaggggcagccggcttctctcccagtgctgcgtcagatgccagcggcttcagcccaggttactcccctgcctggtctcccacaccgggctccccggggtccccaggtccctcaagcccctacatcccttcaccaggtggtgccatgtctcccagctactcgccaacgtcacctgcctacgagccccgctctcctgggggctacacacccccgagtccctcttattcccccacttcaccctcctactcccgtacctctccatcctattctccaaccagtcccaactatagtcccacatcacccagctattcgccaacgtcacccagctactcaccgacctctcccaggtactcacccacctctcccagctactcgcccactctcccagctactcgcccacctctcccagctactcacccacttcccctagctactcgcccacttcccctagctactcgccaacgtctcccagctactcgccgacatctcccagctactcgccaacttcacccagctattctcccacttctcccagctactcacctacctctccaagctattcacccacctcccccagctactcacccacttccccaagttactcacccaccagcccgaactattctccaaccagtcccaattacaccccaacatcacccagctacagcccgacatcacccagctattcacctactagtcccaactacacacctaccagccctaactacagcccaacctctccaagctactctccaacatcacccagctattccccgacctcaccaagttactccccttccagcccacgatacacaccacagtctccaacctataccccaagctcacccagctacagccccagctctgcccagctacagcccaacctcacccaagtacaccccgagcagtccgtcctacagtcccatcactgatgccccacccagccacggcaacgacatggtttatatatctggtgtcctgctacttcggcatagaagcctccggtgctaattagccagtctctctgttgccagtattccacacctgatgggaccaattgcctagaattctgccactcatcattctcccgtccgcgagaagggagcacgtagtctcccaccctcccgagggtgtagttccaggatggcgtggcactctttgaattccttgcatgtcccacaattggttaaaccatgtcacactcctggtccttggcctggtagtgtgcaaganctcgtcagtccgct

SEQ ID NO: 132150 - DNA, 623 bp, Homo Sapiens
ggtgctcaaagaggacacagaatcgtgaggactagacacaatcatggactgtgacacccttgcacccatgcctgcccccccgcctcccgacgcaagcagtaccgcagctggggcctcatactcacgtccagcagcccccaggccggggatattggtggggatctccatgccatacttgcacttctctgcatcaagcaggaggtcaaagcagccagtgccggccggagccagctggcccagcatgatattctcagagacccccttcatggggtcactctcaccgtgtgcggctgcttccataagcacgtccaccgtttcctcaaaggaacacttcatgagtggtcctgtgtcctggcggttgactccgtgtcgggtgatggccatcaagtggccacgacaggtcatggtatcacacaagagagccaagtgtcggtaattgacataggagccatcaaaggagatgacgtggtacagctcccgctccagggccttccgcacggcttcaatgcccagcaccgtgaagatctccacaatgtcattggacgtggtgcgtacggggtccacgtccttctcactcagcaaccgcatcacccgttcggtaccgactcgattcgatcatgtta

SEQ ID NO: 132151 - DNA, 1316 bp, Homo Sapiens
  misc_feature (1298)..(1298): n is a, c, g, or t
tggcttgcaaattttttaatcaatgtattaaaacatgacagtacattttctgttaattcctgctggtgtcttagaaaagctcttatggaaagaaaaagatatgcttcacaggtaatggatacaatgagtgatttgggaagatggtaactaaaaactagtctttattaggatccaaaatcatgactgtaatgaagtacggatatccctaatctattcccaagtccttgaaatggcatgtcaggattttacctttgtttcccttttcttttcagcaagcaaaatactagcatagtcctcctgagtattcatcttcctcttcatcagcagccgtggcagtgacaccatcaggcttggcctgtggtgttgcaggtgatttcttcttgattccccctcctggaaccaccaaactcaggcccagcttagcataatcattgtccatgtacttgaaaagcggtgagttgcagacatctgacacctgatcttggtcttgctggtcataaccttcaagaagctgttccagggcagcacagtcttcactgccattgaacccagggatgctatagctctcccggacacatctttctgcagctacatagtcatttctgtgtagatgaactaagacttgagcaattgttttcttataacaagttggataattctcaatttccttataaatatttttttctttctgaatagagagtgccgcctcatcaaacctacgtcctcgtactagtagtctggaggcttttcctagtaattcaactgcctgtcgtaagcgttcttcattttcaaacacattagctgtctgttgatataactgtacagccttctctggatcaacattttctataagctttccagctcgctccaaagccatggctgctgtgtctggggtgccgttttctagatacatcatgctggccttctcaattagctgaacggcctctggtagtttctgcatctccttcaacatcattccagcttgctcataagctttggcagcatgaaaaagagccctattattttcatgggcaacagcttccctcaggcaggcatcttttgcttgctcaaactgtttggcatttttaaaagcaacagctgcttttccatattcagaagcggcactgtcataatctggcttccattttaaaaaaccagttttcaggtatttctctgctttggcgaggtgttccagcccctcgtttatcttctgagccgccatctccacagtcaggtctctgacgtggagagagggtgaccctgcctcttcctctcgtgccgattcacacaccccagcnctcgctacctagccctta

SEQ ID NO: 132152 - DNA, 690 bp, Homo Sapiens
  misc_feature (608)..(608): n is a, c, g, or t
catctcaaaatttctataaatctctaatgttatttaggttttttaaggttttggaagtaacagagggatacatacagcaagatccacttacatagttttaaaacatgcaaaacaagattatatatcgtccatatgtaattatatctgtggtaaaatataaagatatgcattttggggacatagtcaccagattattagtagctcaaggaaaggcaggaggaagagtgctctgggtggggggaggttcacagggtgcttggactgtacctatgatttcttcaaataaaaatttcaagcaagtataaaatatggatatagaatgtaaagatttggcaaagctggctggtggtatccaatgttccttatcaccatctctgtacttctctgaatgctttaaataggtcacaatcattgtaagaggactggttgagagcagcaagtcccctgtctccacactccaagaatgaggggactagaccctcgcttattcctcaggttcctctaggcacctggaccagctgcatgtatgccttgtacaggttcccccggcagactgggctggggtcattcagcaggaaggacagggcaaggacgatgtcgtgctctanaaaggcgtatctgcccacgctatggcttgccgtgatgtggagcactcggtggtctttatgcgcccatactgttgctatcttc

SEQ ID NO: 132153 - DNA, 1177 bp, Homo Sapiens
tttttaaagagacttagcacatttattcactcacagaggtgaatgaagggctcagggtttgaactcgatgacactgatggcgatccgggctgcccgctgtaaggcttcggccacttgaggcttttcgtaagtctccacctccatggcacggaaagtgggcacgtgcgtctgcagggccttgcggccctcgggggcctctgccagcatggtaagggccttggtggcattcaggcgcgctatggtcatgggggagtgcagcagctccaggagcaggccgatggcttgtgcctccagggccgcatacttcccttcagtgatcactgtggcgaacatcagggcaccggcagcgttagacttcacatgctccactgggtctttcagcagatggaccaggatggggatgacgtcaaaatgacacacctgtttcttgccctctcgagatatgctgacattaaggagcgcacgggcggccttgctgcggatgttctggttggcgctgaggagcttctgcttcaggacaagcaccacattgctgcccagggcctcggtggcatcctcctgcaggcagaggaccagtgtgtccaggatgaactcctggaactcctcctcctccacctccacctgcagcttccataccagtgaggaaatcagacctttgctgatgatctcttgggcccctctaggcacctggaccagctgcatgtatgccttgtacaggttcccccggcagactgggctggggtcattcagcaggaaggacagggcaaggacgatgtcgtgctctagaaaggcgtatctgcccacgctatggcttgccgtgatgtggagcacctcggtggtctttatgcgcaccatactgttgctatccttcagcaaagctttcaggttctccatacagcctatgttcatggccttgtagatacactcggggtcatgcatgaggtcacacaaggccatgagggctttctgcctcgtctggaggtcctctgactgcagctcctccttcagcttgggcagggcccgatggccataggcagtggtaatctgggtggcattgatgttaatgggaagctccaaggagttctgggaatgggccatctttccccaactacagaggcctttccaaatgaagctctgcagaaaccactcactgcctccgcagccctttctgcttcca

SEQ ID NO: 132154 - DNA, 1367 bp, Homo Sapiens
  misc_feature (21)..(21): n is a, c, g, or t
  misc_feature (586)..(596): n is a, c, g, or t
atgaggggctgattcatgtcntgggcatgacagagcgggaggcacaaggtttcatcacactattcacaatggcgagcaagttaaaacggatttcccatttaatttaattttcagacttcagttgaccatgagtaaccgaaaccacagaaagtgaagctggggatatttcagaaattcttttctaatcagaaattctaatcaaacataagtttccaactatgtgttctcttggtcctcagaagtgtttgaatagaaaagtaacaactaacttcccatctttctggtggaagagttaattctgcctggagggttctgcctgggagacatgacagcatgtgtgtgactcctgtgtctgtttctgtggggtcatccctttcgtttcattttgccagggcctggctcaggattttttatggcagtgcctgtgaagacaagcctggccctccatccagtcacacaggaaatccacagagagcatgctgagagcagccagcggctgggctgccatcaggcctggtttatgatgccacaagtgaatggcacgtttgttcctctttatctctgagcattgaaggacttttggttnnnnnnnnnnnttaagttcagagtaatccttttcatggaagaatcttcaggtcaccaaagaattgaaattttaagccccagattgtactgagctgtacctgtgggaaaaggaatggccagggtattgatgatggaaaagattcaaatgaggagttagaaggcaagccctctgtgggcagccgtcttccagaaacctcgaacttatgtctgtctccacctgagaaaggagaagaaaagctggtggtgacccctggtcctgctgggccatgccatggctctgaagatgccccgtgttcttaggaggtgctcacccctggcacctaaagacatttccttctggttgttgctctttaaaaacaaaataagcccctgaacgtgcttgcaggccagtttgtgtgcctgcacttgacgaattaccttgaccaacaggccaaaggcacagagctccaaggcatcatctttccttaaaatcctgagtgtttattaaaaagggacatggtctctaggtatcttattacatttgtatttcttacatttgaaatatcctaaccgcttccttcggtttcttcttaagaacatttacatctaattatttttcgtgcaagtcttgtaggacccacatgttttcctagctttggaaatcgatttttttcattcctcttatgaggatttccctatgtcagtaaacattaactttctatttcttccatttttgctcatttgaaacccctgctgcttctagatctatttctttgcacttgtataactttgaaataaattcc

SEQ ID NO: 132155 - DNA, 1162 bp, Homo Sapiens
  misc_feature (514)..(514): n is a, c, g, or t
aatataaaaatttggggacaggtagaggcaggggcacatgcaggggatggcaaagctcttccttgtcctcaggcctctgcccccagcctgcagagggagaccgggaggtcagaggagcaggccgaggagaggcctgccccagggatccagcctatcctctctgagagtcaggagccaggtcctcctttgcttccaggctccctgccctgagccagcgggccgcatggagtccgtggggaggctgccaccctgccttcactctgaggttgggccgaacagcagatggcagcacacctggcaacgctgagttctagggctggtactcagacccctgtgccttcttcctgggtccactggactgtgccagagccatggcagccaataagcaccatctccaggctgtgggggtcccagggcaaggccaggccccctgaccctggtgggggctctccagtgctggtagcctcagcctggctcacaggctctgcgggcccagtcctatccccttcctcanaaggaggaggggaggcaggggtgctgggctcagagcagaggtctcctgaggcagggggctctgagtctgaggtggaggtccagaaagctgtggctcgaggccagggggagctctgagacgctgggggaccccagggccagggtgccatgaggggaggaggccccggacgagggtggggccaagtcccactcaagacagagccagctgggggctgcaggcagtaggaggatgccccagtgtccacacacagaggctgcagaagcccggaggtgctggctgggcacggcccctctcccgatgcccgagggcacggaccctccctgtggggcgccaggacaagctgcacagcctggcgaagtgactgcagtccttcccgcatctgcagcacctgctctgacagctctgtcaccgcctgccgaagcttgtccagtgtgtctgtgttccttgcctcgctgggcccatggggaacagtgagcaggccgctctctggtccaggggaggggctgctgctacattccgggccagactggcccacgcggaaagagaacttgggctggtccgagccacagccgtcttcaatgccatctactaccctggggctcagatctgggggcacattccatgcctcgtgccgattaatcaccgggg

SEQ ID NO: 132156 - DNA, 900 bp, Homo Sapiens
tttttatcttcaaatttaaatttattaagacattcagctatgtctgtcagtctacatccaaatttgctactaaaaataaaataaagtcacatcccacattaggaataccgaggtctgaaaaacactttttgagccaagcctattgtataaataaatgactagtttcttttcatatcaaaattcccataaaaaattacattcccccctccccagttctacctgtagccatgatgaatgtaaaaatttaaatatgacacatccttgtcaaagaaaaggtgcaaagtctattaacagctttaaaagtggcatttgcagagtgtgatcatacagttatgtactcattcccaaagtgcaaatattgccataatttaacactgttttgattcagttgcaagaattaaacattacacaggattgaaaagtacacccagggcctctatcagtgccctaaagcccttcccactttggtctccttcactaaagcagactccaaagtgttcatcagagttttagtttacttcacacagccagcgaagtatacaacatatttaacaaaagtttcatatacatcaaaatattgaagactccgtcataaagttcaagagtctcagattacatgaatgcacccgcaaggcccaagtgcccacccaccccttccctaaagcacatacaaagtatgagcgtgcttcaatctttgaatacaatcaatgcttcttcatctttgatttcatttcagtgctgtacaagactcaataatcacctgactgagctccaattaactgaggagaaacggggtggaggagagggctggttgctattcagacttgataatgagattgatctgtcccatggagagtgaaagttcagttccacttctgcctccttctttccatgctgtcc

SEQ ID NO: 132157 - DNA, 987 bp, Homo Sapiens
  misc_feature (116)..(116): n is a, c, g, or t
  misc_feature (178)..(179): n is a, c, g, or t
  misc_feature (183)..(183): n is a, c, g, or t
  misc_feature (194)..(194): n is a, c, g, or t
  misc_feature (239)..(239): n is a, c, g, or t
  misc_feature (856)..(856): n is a, c, g, or t
  misc_feature (869)..(869): n is a, c, g, or t
tgactgatcgatttatcgactcatttaggatttgcctcgagccaggaatcgcacgaggtgctttgataccgaagcgcaactgtctcagctggctacagggatgaaaggatattatncagcccaggatgagcagagtgagtcgtgctacggtggtgatgcacccatgccacagcgtctnntgcntctggagagcntgaagagccggtggtgcccagccaccaaccggggcatgacccggnccatgaccatgcccccagtgtcacccgtcggggctgaggggcctgttgtctccgcagcaaagacggcagagaacgagagcgagaaaaacgcttcagcttctttaagaagaacaagtagttgggggcaaggtcccaggccaactccctccctccgttcaggaaactgccagggacagtcgacagggaccgccctcttgtcaggacaactgcctgttgctagggtctgttgccaaggtcaacccatcaccaggaactgtcactggggacgagtccatgttcccaagggcagcccttctcttttgctgtttaattccagactggtggtgggacccaggtaaccccctctcccacccccgccgacttttcccctttccccagcctcgtgcctctgtccctcaccacggtgtggacagtgccgcaccctcaacataggccatgtggggagtggctgcccctgcctcagggtcattctcctgccatgcgagggcactcgccttctgccttttggttcctcacccctcagaccagccaggaacctctcagagctgaagcaggccctgggggcagaagtgccagatgacagtcagaggcgcaggagccctccctccccacccccnaccctgtaactcncagctgccactccatctccaagctgctctccaatggcttccaaggtgtgttgttcggggacagccaccgccttgagtctggccaaggaggtgattaaacagctcagcttctctcaccc

SEQ ID NO: 132158 - DNA, 1562 bp, Homo Sapiens
  misc_feature (386)..(394): n is a, c, g, or t
  misc_feature (673)..(727): n is a, c, g, or t
  misc_feature (1420)..(1420): n is a, c, g, or t
  misc_feature (1481)..(1481): n is a, c, g, or t
gaaggacccaaaggcatttaattattgaacacataaaaggaagtatatttaaaaaaaattggtcaaactgtcctgttagttatcattttaaaggaatttacagggctgttatagatgattcttttggaatatttcagtttatagcaaatgcctaaactggtttcttcattgcacagtattttctcttaaaatgggtgctttaaaacaattacatacagattaaaaatcatttctttgcttaattaaaacgttaatactcttagacaacacagatctgaaatggtgaaaccagcaattccccccaccccaccttacaacaaattaaattgagacaaaattacaaacacatttcactacatgattattattaataaaaatcagtttcnnnnnnnnnataaagttgcccaaaatgcaagggatgtgcataggtttacaacttagtcataatagcattttattcttattcccctgggtgtgccccatgaacggaatgtagaatgtactttgctgtagattacagattgttttgtccaacacagacacaccgacagcataaacgctcgcgactgtccacatgcattaagagtcaagacccaacttcaaatctctaaaaggtttacagggtgcttcaaagagacagtatcacattatctggatgttacataaaggactnnnnnnnnnnnnnnnnnnnnnnnnnnnnnnnnnnnnnnnnnnnnnnnnnnnnnnntttatgactgttttgtaatcactacactaattatttcaaataaataaaggaaagaaagatatcccaatattgcgatccatgaaatgcaggactctaaacaaagaatgtagtgtgtccacccccagtcaaggtaacagaatcattgtttattattattaaaatagattatagaaagcagcatctattttgtgcagtttttaggggccttggaaataaaaagctatgatttccagaaatataacattccaaaggattgaataatacatacatttaaagatacattttattaaagtttaggagaactgattaaaaaagatactgtctctttaaattagtgtgtaattgtttttctcctcctatctattcggacatgacaataattataaatgtaggtcacactacaactaggtagtctctagggaccatgacctgctgacacaaggccgataacaaagaggcttttccacaaatgaggtgctcccagttatgctcagatatctggggagaggcctaatagacccaggagacagggacccactgtggggctgtgcacacgagctcaacagcttcctccagatgtctgattgtctcatcaatttcattgttgataattgtgagatcgaagtagtgtgcatatgttctctgtaagatgtcagactccttctgcagacgctgaagagattcatcctcatnttaaacctggagtaataattggtgcagcaatgaaaacaacaaaaggagcaaacctctgagntctcaggaccctcagtgcctgaggcctcacgtccagtattgcaatcagccccctgctcgtgatcttcccgatggtctccag

SEQ ID NO: 132159 - DNA, 1172 bp, Homo Sapiens
  misc_feature (285)..(301): n is a, c, g, or t
tgaattatgacagaaatctttattaaaatgtgtctttcagtaatatgtttagcattcaatatacacacatacatatgtacactctttgacacgcctcatggattgctgccatcagtttaactaataaattaaaactaaaaagagggatgtgaggggaggggaactaacggcaaacttttcatgttttatctggtaagaaattgtgaatttctcagaatttccctgggcaaaaacctgtgaccagagaatctgtgaaataaaatacataaatctctaccccttggnnnnnnnnnnnnnnnnnttccaaaagatgcagttacaagtgtgcttctcagaacaggagcattcattccacttcatactctggcttctccaccttctggcttcaagacagtttgtccctcggctagggcagagaggttcatatgggcacttgggctcggtgcaccttgggctctgggggtcgaggggcaggctgcattatgggagagggggagccacactcatctgaggtgatgtctggcacatcgtctgactgtgcatcagaactctctaggtcactgcggatgctttcaggctgggccaggctgatgtcccaaggtttgctggccaggcagtctttctgttcacagctttggtgtctgcaggggggattctcttcactgcctccggcaccactaccttcttcttcattctctgccatctgagcatgaacatggagcgagtcctccgtgctgcttccactcaccagctgatagtggcttggtttggcttcaatgtccacttggatttccatattgttgcattctctgtcctgtgggttgtaggaactgattatggaaccggccatagcacgagtgcttgcgttgtcactaattgcaccaagactggctgtgtctttggggaaaatttccttttggacatcggcttgaacttctaacctgctatattttcccttgccactggagagaatgccgccactcagcgtgccccctgagagggctgcaaagctggccgtttcgctgtaaggaccttgcataacactaagtccatctgtagggcttccactagtgctcaatacactagtcaggccttcaatgctgctttccccaatgctgggattcttgagggctctccaggcatctgccactgtgattggagcatcacccgtt

SEQ ID NO: 132160 - DNA, 717 bp, Homo Sapiens
  misc_feature (599)..(599): n is a, c, g, or t
acataaaaatggtcattttatttcaatccagacagctcagcattgtacaaatgatggcagaaagatccatttgttcagactcagcttgctttgtttttaatacatcgtcattcttcttgatgacataaataatggctccttcctgaaaggacagctcatcttccttgtcttttgtatagtcataaattgccacaaccttttccaagtaagaacgtggagcccacggtgggtcctcttcagcataaggatcactatactcaaccacagcagcttcctcctcttcgtaatcttctggaggaggaggaggtgggggagactcatcaaagactggttcttccacaggtggcggtggaggtggtgtatctgaaatattttcttggactctggccacaaatcccattaaaggtaactgaggaggtacctgtaagatgggagggaggaggaggagcaagagatactggatttctgctataaaaaggtcctccattcatctgattctgaaggcttgtttgtgaagtaatggaaggagggcgtctatagggcaacgagccccctattgttgggggagtatggcgagaggcaggcctattcatgctgtngaactgacaggatgacctggaaagacactgggaggagatggagtaggaaacagcattggaaccccacactaccactttcactggtctctcgactgctggctcgactacttgggtggct

SEQ ID NO: 132161 - DNA, 1442 bp, Homo Sapiens
  misc_feature (456)..(465): n is a, c, g, or t
aagtgctggaggagaaatgcagaatttttccagtgtccccagaggaaaaaaaagcccatcctgaaataaattgtaaaaatggttaaagtggtggtatttaaaatgttggttccttcctcttcataacaagtggaagaaaaggagggggctagggtacccactgggccatgaggttaaccctttagcacaggcaatgaagaacatccaatgccacagattctgcaggaggagaaatcccaagggtatacagtattcttgagaaagatcccagatttttctgaatcagtcttaatctgattttgttttggctacacagttatgctgttatacctttgacatacataaaaatggtcattttatttcaatccagacagctcagcattgtacaaatgatggcagaaagatccatttgttcagactcagcttgctttgtttttaatactggggaataaaccnnnnnnnnnngtgtaatttttatcatttgtatccttcattctactttactggagtggaatccccagggccttcagataatctgggaagacctgactattcctgtgaggcaagcacagccctgctgagctttactcagaataatgcatgatagactcaacgtaattcccaggaaaaagcccagtcactccattcataactccctcataccaaccatcgtcattcttcttgatgacataaataatggctccttcctgaaaggacagctcatcttccttgtcttttgtatagtcataaattgccacaaccttttccaagtaagaacgtggagcccacggtgggtcctcttcagcataaggatcactatactcaaccacagcagcttcctcctcttcgtactcttctggaggaggaggacgtgggcgatactcatcaaagactgtttcttccacaggtggcggtggaggtggtgtatctgaaactggattctggctataaacaggtgctccattcatctgattctgaaggcttgtttgtgaagtaatggaatgagggcgtctatagggcaacgagcctcctattgttgggggagtatggcgagaggcaggcctattcatgctgtagaactgtacaggatgccctggaaagcccctgggaggagatggagtaggaccagcattaggaccccccccattcccacttccactgttttctggactgctgctccgactacttgggtggctccctccactactcccattgctgctgtaagttcgatttctttgattcacagaagctgtcctcacagggctctgctgcgagggagccatattacgggttgggctaggtacgtaatcatttggtaccactggaggacgcactggctccagtgtgcgatagggggagtgccgcccaaagtgtccctttccctgacatagggggcggacgcgtgggtcgacgatatcccgggaattccggaccggtaccac

SEQ ID NO: 132162 - DNA, 1342 bp, Homo Sapiens
  misc_feature (198)..(207): n is a, c, g, or t
  misc_feature (646)..(660): n is a, c, g, or t
actaattcacctaagtctttatttatttggctctaggaagaatttgcatgaaaatgagcctgtatggcaggtacagaatgtactgtaacagcaccagagaggtacatcctctctcctctacagagcctcaatgtttaatacatacatgtgactttagtcataaaaccacatagtccaggaaaaaaggagccctttagnnnnnnnnnntcagtttagaatgactttcaaattgaccattccttttcaaatacttaaattcaaataacagatacattcagaggcccaaatgttggcatagaataaaatcatgttcatttatttttttctgcatcttagaattagaaggcataaaattaaatatgttgaatgtaataaattcatccatacaagtgcaagtctccagatataatgcattttatggcagatttattattttaaaaatgtaccagtaaatcaaaaaagagggagtatgtccatttaacttttattgaagtgtatgtaggaggtcttcagaaatcaaatgtgagcatgaagatatggccaaacataaaatctatcaaattcagtgaaaagttgctgactttaaatagtagttgtaagaatgaccaatatatattctttgttaacaacccctcactctatagtnnnnnnnnnnnnnnntaaaataaacattcagtaaacattctttcctaaggtagtttcccttatatagcagtgatttatccatttctttgtatacacaaatttgttgaacataccaatcagtggttctcacaattgaaaaataaaagcacaaaaaagtttacactcctgtacaggtaaataaaagatcaccttgaattaaactggatctccttaagggcatagtatagtttcagtttcattacctattacataattagtttcttacatacaaatattgacatatttggcttgtgcttcgaagcctttgtgtctatgaagtccacatcaatgcagctcataactggaagtcactggggagttctttgctgctgctgggtttaacctgatcatgcattagagtctcctcagcacctgttgtggctctgcacacctctggggcatcgttcagtgtcaggatccaagccttcagggcagggaagtttcagcaccttttcgcggagctgaagcattgtgactcttgagagctgctgcatggtgagacatagtcctgcctacccgcttatccctggctgtactgctggatatccgcaatccactcctcacattgggccattatctcaactcttttcaagtaaaaatgtttgtgtattacctctttaaaacatggtgaagggtttctgaattgttctagcattgc

SEQ ID NO: 132163 - DNA, 1723 bp, Homo Sapiens
tttgggtggtgaccctgtttccatctactgtttattggacacctacagtagccaagccctgggcggacctgcttatacttatgtaatcgccagcctcacaataaccaggggaggtaggtgttctgaccatggcggacacagtgcgtcccggctggagctactcggcgctgtggacgcgctggtgctgaatgagcttggtgctctggtggaagcggcggccacagtcctggcaggcgaagggcttctctcgtcggtgggtgcgcagatgctgcgtgagcgtgggccgctggcggaaggccttgccacactcagggcatgcgtagggccgttcacccgtgtggatgcgccggtgctgggtgaggttggcgtgctgccgaaagctctggccgcactcggggcaggcgaagggccgttcgcccgtgtggatgcgctggtgctcggtgagccgcgagacctgcgtgaagcccaggccgcactcaccgcagtggtagggcttttcgccggtgtgtgtcctctgatgacgcgtgagcttgaggcgctggctgaagcgctggccacactcggggcaggcaaagggtttctcgcccgtgtgtacgcggagatgctgcgtgagcgtaggccgctggcggaaggccttgccacactcggcgcaggcgaagggccgctccccggtgtggatgcgccggtgctgcgtcaggttggagcgctgccggaagctctggccgcactcggcacaggcgaagggccgctcgccactgtgcacgcgccggtgctgcagcagcactgagcggcggccgaagcgctcgccgcactcgacgcagccaaaggacttgtcgcccgtgtgtaccgcctggtgctccagcagcacggcgcgccgcgcgaagctctcgcggcactcgctgcacggaaaggggccgggaggctcgggcgcaccaggaggggccgggggcttagcgccagggcccgggggatcgccgtggatgcgctggtgctgcagcagattggagcgctgccggaagctctggccgcactcagcgcaacggaaaggctgttcgcccgtgtgcactctccgatgctcttccaggcgcgcgctgcgcacgaagccctggccacagtcgccgcacacgaacggccgctcctcggtgtgcgtaagctggtggcgcagcaggtgcgagctgcggctgaagctgcggccgcactcgctgcacacgaatggtcgctcacccgtgtggatcttctggtgcctcagcaggttgctgcgttggctgaacaccttgccacatacatcgcaacggccgcccctaaccaccccgcccccagtgctggggcggccccggctccggcccctgggggagcgccagcgggtggtgatcagagcagggcccacaccccggcagggatcctcgtccgtggggtcctgttcactcctcagatcgctggggagcagaagcgcatgcgaaagccaccttcgcgggagggtgattggatctggccagaaaggcagccatgccgaggtcccaggggacgtggaggtgagggcttacactacctggacctgcggagatgctgcctagctgcagcgcgaaccctgcatacacaaggggaccattcattcatgacagaatgcccaccgtgccgggacccacttcatccctggggacacagtgtgaactacaaggaccttgaactgaccaaagaggcagacggaacgaccaaattcagg

SEQ ID NO: 132164 - DNA, 2516 bp, Homo Sapiens
ccaaaaaacaggcaccagagctcagctgcagactagaaacaacaaaaagtctggaatccaacaaaacaaaacatcaggaaattcctaggtgttcagaaagcaaaaggagagttaccattctaaaggatgaggaagcccagtaatctcccacaatcccaactgctacatctccaagagctccctagctacctgtcatacacgaggtctgggaatacctgctagatgaatgaacaaagaacaaggcacgcacaagagtatgacggttttgtggcagaagcagcctcctaagccacatttgggcagcagtattgttgacagcaggaatggccagaattattcagctcagagggtttttccaatgtgagtaggtaagcagattattttgcactggcttaacatttttagttacttgttccttaaattagatcatgagccatatggaaaaaccaggcgggcttaattgagcctgttggctgctcaagactggtcaggtggaactcacttcaagggtgacaggggctcagtaactggctggtacaaatggaactaatggcatttgcactgacatgaagtccccaactgcagccccaggtctatagagtttcaacaactttattggccaaatgcttctcctatgtttacaacttagtgtgagcctgctcactggcttctccttctaagcccctaagcgggcagcaaactttagtacaggcctggagatggggtaggggttaatgagtgagttggaaacctgctgatgctccacaattggacagcaggacagcaaatcttctacttcttattgccgaaaactgcagaaagacacgaacaggatggagacaggaccgagagtgcatctctgccactggtcccagtttccagtttctggtgcatccaacagagtataccctttgtattcttgcttcagggattgggtgatactatgtcagcctacgcattttgcagaagtacatggggccaaaattggccatgaggtttggtattaccagctccccaacctgacaggatgagaagaaacaaaatgtgtccatgaaaacccttcggaagtgagtcagatcttccacctgtacctggatgctgtattgattggccaggagctcaatggcaccttgcaccacatactcgttctgtaagtgtgagagtgagcaggtagaatagacaacatggcctcctggtttggtggcaaggagtccagccgcaagaagctgcacttgcagcacaggcaatatctgtcgctccttcttccttgaccgcttaaaggatgttgttctcctcctcatgaagggagtggcggtctgtggtacagggcacatccaccagcacccggtcataggtgtccccctccagttctccccatttcctgccatcccatgaggtaactcgaacttgatttccatccctgatctcttcaggcacatagctgtgaaggatcttctgtagtctggctattcgggacggggagagatcattggcagcaagattgcggcaacagccagtctgaagcaacgctagtgtctttcccccaggagctgcacataggtcaagcacgatgtccccaggctgcaggccgagggccagaacaggcagcaaggaggcagcatccatcaggtagtactccatgacacccaggctgccaggtctggcaggagggaagcgactgatatcccctctgtcaaaagtgaagcatcgaaggttcggactgcaggcccaggaggcaggggatggggctgcagattggccaccctcagactgcagttcccagtgggagatggcttcattcacaaaatccttggcactcagctgctccagcttagcacttacatgatcccaggcagcaaagttattgaccagtgcaccatacttctgctctgagaggagactgacacggattgatggccaaagatctccaaactgcacactgtaagccatgtcaaaattctgcaaagccagtcgaacagcagggaatttgggctctgtggcagcccatttcttcttatatcgatgtctccgcgggaccgtcgcgaggtccacacgcttcagcagctcccggacacccctcagtgtcagcgcagccatatcggcgtgctccacggggtaattccgaccggaaccgcgacaggagactcgcgtgttccggggaggtggtgagcgccacccggcgggacacgagcgaaaaaagggaaaggaaatacatctgacgctctcccaggactccgcgcgcctctacagactccgcccagccaggagtcccctgaaggctgctggaaaaagagcaacctggcagcccggaataatgactctgcctggatgcttagagcagtgcgagggactcccagaagcccctagcccacttgggggaccagggaggattaggagttggtggttgagtaccgaaagagttagctaggcgaaaaggggcgggaagggcctcctaggccgaaattgcatggaggaagatccttaggtagaggaaaatgagaccaggcttgtagcag

SEQ ID NO: 132165 - DNA, 874 bp, Homo Sapiens
ggccatgccctggatcttttcagggcacatagctgtgaaggatcttctgtagtctggctattcgggacggggagagatcattgcaggcaagattgcggcaacagccagtctgaagcaacgctagtgtctgttcccccaggagctgcacattaggtgcaagcacgatgtccccaggctgcagggccgagggccagaacaggcagcaaggaggcagcatccatcaggtagtactccatgacacccaggctgccaggtctggcaggagggaagcgactgatatcccctctgtcaaaagtgaagcatcgaaggttcggactgcaggcccaggaggcaggggatggggctgcagattggccaccctcagactgcagttcccagtgggagatggcttcattcacaaagtccttggcactcagctgctccagcttagcacttacatgatcccaggcagcaaagttattgaccagtgcaccatacttctgctctgagaggagactgacacggattgatggccaaagatctccaaactgcacactgtaagtcatgtcaaaattctgcaaagccagtcgaacagcagggaatttgggctctgtggcagccttttgccagggtttgggccggcagtatggacagggtggtcgctgtaacctttcccggtcgccagaggcagctcgaggttgaggaaggggctgaatcctttcctgcaaggcggcggagacccaggagtgcaggcaaggtcgctatggtattttccgaggggtgagggcgaccgggccatttcttcttatatcgatgtctccgcgggaccgtcgcgaagtccacacgcttcagcagctcccggacacccctcagtgtcagcgcagccatatcggcg

SEQ ID NO: 132166 - DNA, 646 bp, Homo Sapiens
  misc_feature (281)..(322): n is a, c, g, or t
cggttttaacattttattggggtaaatgattttaaaggtaataacaatagtgtcaaaactactacaatatctttccacagccataccttacagacccacataaaccttctcatattttttctttttgctcatatttaatattgtaaagccatacatgtcatataaaatgcccatttccaatagtttcttcaaactattaagcaattaaatgtggaaggaaggagggcctagttatactggaaggggtttcaggtaatctgtgatgtcttacggtaatcaannnnnnnnnnnnnnnnnnnnnnnnnnnnnnnnnnnnnnnnnnggtagctttttgctcattacaagtctcaccattgtatcaccaagaactcattatgctggtgacagattcaaagtaattttggggaacatataaaacactaaaataacttagaaactagatccaaatatttcaaaagtaatcaactttgatatacaaaagtagtcagaggtggttacaaaagtttgtttgctcagtgcgtctatgtaccagcgcagttactgggtagagcacaataaaaggttcattttcttctgaaatagcaataaaaaacaaggaaaacatatatttgtatataaaggatcaatgctggtcttaacctcgtgc

SEQ ID NO: 132167 - DNA, 1407 bp, Homo Sapiens
agttccaataaagctttatttgtgaattctgataattttcacgtcatgaaatattagtctttgatttcttttcccaaccatttaaaaatgcggaaaccattcttagcttacagggtatataaaaacaggcagcaggctggatttggcccacatgctgtagattgccaacccatgctacaaaatataccttaaaagcctgtcacctcaaaatttcaaatcactgcttcccaaagacttaaagtgattattcaaatcttcctcagtaacttcttttagatcagctggtttccattttggactctggtctttatcaattaaaacatacaagcttgacttagccgatactccatagttagtacttcttgcaaggtctttgaagacccctccatgagttgccttagtgtgatctttagagatgttggagacattttattaattaccttcaattgctctagggcaaaagatgaaccatcttgctgtaagttttcaataatttcttccacagtattggctgaaaaacaactgtttattttgtccatgtgttcctcaagtataaaagacttgtctcgatcaatcttagactctgtatggtaattttctaagacagatgcaatattttcttttgaaggagatttcaaggctaacaaatcttcctctaacatggccaacttttcagaatctacaaagtgtgtagcaattcctgctctgtacacatctcttccttttagtctgaatcctgttaatgcaaggaagtaaccaagttttccttggagtcgtggcaagaaataacctccacccacatcagggaacagtcctattgcagtttctggcatagcaaaaagacacttttctgtagccactcgaaattgcccatggactgagagaccaactcccccacccattgtaattccatgaataagtgcaacataaggtttctggcaagaaccaacagcattattcagcatatattcttctctgaagaaaactggagctatcttctgttttgccttttcagcttccgagatcactctgatatcacccccggcacagaaagcctttcctcctgctccctttataatgatcaggaaagtttcaggatcttgttcccacttctttagctgtggataaatctgccgaatcatattaagagtcagtgcattgaggaactttggtctgtttagtgttatgactcccgtgcaaccttttttttccaatagcacctcttctgctgcatctgtgtgcttggacattctcaaatggtgcagtatggtattagtccttttgaatgcattaaacctcgacatgagcctccacatctcgcgctgccccatcgccaaacactccgaagctaaagcagcagagcgagaatctcccggaccgttccagcgcctcgcgtgagcccccccc

SEQ ID NO: 132168 - DNA, 756 bp, Homo Sapiens
gttttaattgataaagaccagagtccaaaattgaaaccagctgatctaaaagaagttactgaggaagatttgaataatcactttaagtctttgggaatcagtgatttgaaattttgaggtgacaggcttttaagaccgcctatgggcagcatccagagcggaccagctccctgtgctggaggactccagtgtgaggcctgctgcttcctttctacattggcctgaaaccagcccaactcagtggtcataatcttctgggcctaccgaagagcaaaagcctacttctagttcttccagttgccagttcaagggctttatctgtcacttcctttgggaacaggtagagtgctttgatttagaatgatggcaataaatgagaaaccaatttgaaattggatgtgagagtcttttgtcctttattgtgttgttcctgaacttgtagctaaggagggtagagtagagagagggatatataaccttatccaaggaaatagattagtaatacttcatccccgccacactttaatttgcacatatttctagagtataggacatcaaaaatacctagatattaaaatatttatgttgttaaccttcagctggtttagccgtatctattaaggatagaaaacaactgttcttcagttacttatcacatctgcttactaatttatgttatgtttatcatctcttcccatctaatagatgaaacaggcagataggtctggctcttccacttgctgacccagagttcac

SEQ ID NO: 132169 - DNA, 690 bp, Homo Sapiens
ttttccaaaacaattttcagggtctttattttttatattgtatacctaagttgatttcatcaacatacaagccaaacgaagatcccatttcaattagatataccactcaagagaatctccaaagatcttcacatttttccatcttctaaaacaaggattgacaaacttttttctgacaaaaaccagacagtaaataattaggctttgtaggctttaccatctctattgcaactactcatttcaaagcagccacagataatatataaacagatgagtatagctagttccaataaagctttatttgtgaattctgataattttcacgtcatgaattattagtctttgatttcttttcccaaccatttaaaaatgcggaaaccattcttagcttacagggtatataaaaacaggcagcaggctggatttggcccacatgctgtagattgccaacccatgctacaaaatataccttaaaagcctgtcacctcaaaatttcaaatcactgcttcccaaagacttaaagtgattattcaaatcttcctcagtaacttcttttagatcagctggtttccattttggactctggtctttatcaattaaaacagctctaacgccttcatgaaagtcatgacctctcatacaagcttgacttagccgatactccatagttagtacttcttgcaaggcttt

SEQ ID NO: 132170 - DNA, 723 bp, Homo Sapiens
  misc_feature (601)..(601): n is a, c, g, or t
ggggttcaggaagatatttattatttaggtgcaccggcccagtactcagcccaaaggactgagcccagaacaaagagttaagttaccttttaagcattttgtagggtgggtggagatctgtgcagggggaagcatattacagaagcgagaaacaaagacagttatttaattaattgagaaatgcattacagcatttcttacttttcaaggaaaaacatgttttacaacttgagtttatctgtctagtgaccttgcagctgcacagctagagaaacagggtcttcacaatgtctgggaaaggaggagagataaggctcactagccacagaaaaacaggcagttaatttttaaaggactccaactctttctctttctcagggggaattgggttttcttacatacaactgagtttctccttacacattctttaatttcttttaattcctattccaataccataaaagcatgtaaggacaggtctagagttagttaaagacaggtggaggtggtgatagagaggacagggttacattggtaagggtgacagttagaaggggaagtccttttagtgaaatagatgagaggttttagatctgcacanacctttttcatggaagtccaactttgctcctgggtagtttaaaggacgtagtcccatgtaccacaaggttgccaggctataggagcagaaatcagcgtcttggctgcaggtgatcacaacga

SEQ ID NO: 132171 - DNA, 326 bp, Homo Sapiens
tttttggggttgaagaggatttatttaattatttaggtgcaccgccccagttgattgtaacatccaaaggactgagccccgaacaaggagtccggttaccttttaagcatttagtgggatggggggagatttgtgcagggggaagcatattacagaaacgagaaacaaagacagttatttaagacatgcattacattatttctaacttttcaaggaacagcatgttttatgacttgagattatctgtttagtgaccttgcagctgcacagctagagaaacagagttcacaatgcctgggaaagggagagataaggctcactagcca

SEQ ID NO: 132172 - DNA, 1674 bp, Homo Sapiens
  misc_feature (1255)..(1267): n is a, c, g, or t
  misc_feature (1375)..(1388): n is a, c, g, or t
ggagtttggcgtgaccatggggaagcaaaagaaaacaaggaagtatgcgaccatgaagcgaatgcttagtctcagagatcagaggcttaaagaaaaggatagattaaaacctaaaaagaaagaaaagaaggatcccagcgcattaaaggaaagagaagttccccgaacacccttcctgcttatttttccaagtataatacacagctgggcccaccttaccacatcctcgttgataccaactttatcaacttttccataacagccaaactggacttagtgcagtcaatgatggactgtctgtatgccaagtgtatcccatgtataaccgattgtgtaatggctgaaattgagaaattggggcagaagtatcgagtggctctaaggattgccaaggatccaagatttgaacgattaccatgtacacacaaaggaacctatgcagatgactgcttagtacagagagtaactcagcataagtgttacattgtggccacagttgaccgggacctgaaaagaagaatccgtaagattcctggagttcctatcatgtacatttctaaccgatagatacaacattgaacggatgccagatgattatggagcccctcgattttaattcttccaagacacgagttcctctgcctttcttcgaccaactttctcttagtgccagttcattacacaaaatgtagcgggatttttaaggaatcagagagactgatggagttcaggggagatatcatcatttaggtgcaccagcccagtcagattaacatccaaagggactgaaccctgaacagagttaagttaccttttaagcatttgtggggccgcgggggtggggggaatctgtgcagggggaagcatattacagaagcaagaaagacagttattcaattaactgagacatgcattacatcatttcttacttttcaaggaaaatcatgttttacgacttgagtttatctgtctagttaccttgcagctgcacagctagagaaacagggtatttacaatgcctgggaaaggaggagagataaggctcactagccacagaaaaacaggcagttaatttttaaaggactccagctctttctctttctcacggggaatggattttcttacatgcaactgaatttctgcttacacatttttaaatttcttttaattgcttttccaatgcaatagcatgaattattattctgttgacctattgccttactatgagctgagggtagttcaatatgctcactcnnnnnnnnnnnnnctctggagatgaagtttggctctgtccaccaggcggagtgccccgggggaacgaaaagcaccaaacacctcagaaaaccacaaagacagccagtatgaaggaggtcannnnnnnnnnnnnncgaacgaagacaggacacccgacagccccacgaacccacagaacgaaggaggagacaaatcgacccaacacgacacaacaatgaagacaaacgaaggagaaagcgacagccaaaacgaacgacacacacgaacacaaacaggaaggtgaaaacatgaaacaacaagaacacacgtaagagaggaaaaacacacaccaagacaggagccaaccgaggaagaaagacatacaagaaaacaacaggaacaaagcgcagacaaccaaagagggaaaaggaaaaaagaaga

SEQ ID NO: 132173 - DNA, 810 bp, Homo Sapiens
  misc_feature (72)..(80): n is a, c, g, or t
  misc_feature (222)..(222): n is a, c, g, or t
  misc_feature (229)..(229): n is a, c, g, or t
  misc_feature (232)..(252): n is a, c, g, or t
  misc_feature (254)..(257): n is a, c, g, or t
  misc_feature (263)..(263): n is a, c, g, or t
  misc_feature (646)..(653): n is a, c, g, or t
gctcccacatttgcggaattgttttccagaaacccttttgggtttgccccccccgggccgtttttttaattnnnnnnnnnattcccaagcccccttggttcaggcccccgggttctcccttagggaaccaggttttggccccaggttcccctttcccttatggggcccccgggcgccaaaacgaaatggttttggaaagcttcttcgaggggcggagccggnccgacanggnnnnnnnnnnnnnnnnnnnnntnnnnttttanggagggaattatttaattatttagatgcaccaaaccagtcagattaacatttaaaggacacagccctgaaccagagttaagctaccttttaagcattttgtggggcgagggggagatctgtgcagggggaagcctattatagaaacagagaagcaaagacagttatttaactgagacatgcattatattactttttactttttaaggaacaacatgttttatgacttgagattatctgtctagtgaccttacagctgcacagctagagaaacagtcttcacaatgcctgggaaagggagagagaaggctcactagccacagaaaaacaggcagttgattttaaaggactccagctctttctcttcttcagggggaattggtgnnnnnnnntttccaaacatataactgagtttttgctcacacattctttaatttcttttaatttctgttccatttcccccctttggtgcttttcataacaaaggtgttaatagaaagcaccactatttgccacctcttcacagagctgagctctttcttctactcc

SEQ ID NO: 132174 - DNA, 534 bp, Homo Sapiens
ggatctagaggatccctagggacgacgagtctcacgactgagagtcctttaaaattaactgcctgtttttcccactgtggctagtgagccttatctctccacttcccaggcattgtgaagaccctgtttctctagctgtgcagctgcaaggtcactagacagataatctcaagtcgtaaagcatgttgttccttaaaaagtaagaaatgatgtaatgcatgtcttaactgaataactgtctttgtttcttgcttctgtaatacgcttccccctgcacagatctacccccaccccacgaaatgcttaaaaggtagcttgactttttgttcaaggctcagtcctttggatgttaatctgactgggttgatgcacctaaacaattaaataattccacctcaacccctccggtctctctgattccttaattatcccgctgcagtgtctctactaaaaatgcaaaaaattagccaggcatggtggcacgtgctgtagtcccagccacttgggaggctgaggcggggaatagtttgaccc

SEQ ID NO: 132175 - DNA, 1090 bp, Homo Sapiens
  misc_feature (693)..(927): n is a, c, g, or t
  misc_feature (931)..(944): n is a, c, g, or t
tttttttaatgaaaagatgtttgatgtttatttccaccttgcactcaggtctgagccacaagtacattaagacattgaatggtatcacccagggaatacgtaaccagacaacacacaagactgagatgcacaagtggtggtggtggtaattcacgcagaaggaaccagacagtaaaacaaaaattgcccaacacaccaaatgatcaaatccgccacctctaggataggcaaacttgattgctgggttaagaaccctagaggtctgttaaggtgggcagagaaggggttctcagcttagactgtcctgacatctaactgccagcaagcactgtacatataatttcctgagaaaccaagtccttagtgggaagggtatccctttgaccagatcttatggcttaaattggtcaggtttgcaaaacctcaaagcctccataaccaaagctagggagaggctctatatgctacaagcagtacctcctcactgcaggtagtctgcgccttaaccctctgcagggagactgactgtagcaccaagtacctggctttttagactctacataggaattccaccataattaagatgtataaacttgacctacagcctaaagcccaatatgcttccctcaagaacatcaacagtgttcaagcttagctttgttacagaaaatgaggtagggtgcggtggctcannnnnnnnnnnnnnnnnnnnnnnnnnnnnnnnnnnnnnnnnnnnnnnnnnnnnnnnnnnnnnnnnnnnnnnnnnnnnnnnnnnnnnnnnnnnnnnnnnnnnnnnnnnnnnnnnnnnnnnnnnnnnnnnnnnnnnnnnnnnnnnnnnnnnnnnnnnnnnnnnnnnnnnnnnnnnnnnnnnnnnnnnnnnnnnnnnnnnnnnnnnnnnnnnnnnnnnnnnnnnnnnnnnnnnnnnnngggnnnnnnnnnnnnnngaaccgcaacagatgtctcaatttttgacattagtcatcttgaagaacacctctaaatgcatgaactcactgcagactgacccaacctcttaattctggctccttgcttttcctgcctctgcctaccttggagacacaagatctgt

SEQ ID NO: 132176 - DNA, 991 bp, Homo Sapiens
ggacaatgcttttaatggcaagtcatcacagcaggtctgcggaggtgcagggcagcgctcaggccttgctcagtttcttcttgatgaagtagctcaccagccgctgcggcctctgctggtactcgctgagcacattgcgagggctgctgatctggtccccttccaggcggttcaggagggtgacacacaccacggccgcttggaggccgcaggcgctgcacatggcggcaaacaccgaggactccatctcgatattgcggacgccggctgcataggctgcctccagatacgcctgcttgtccttctccgtgtaggagcagagagccccatccagacggccttgcccttcatagaagtccaaggtgcacatggtgttccccaccactgtggtgaactcgctcagctctgcagaacacagcaacagctcctgcaccagcttcttgttaaggtccgttttccggatgacccgcttccccaggacaatctgctcaaactctgccttgaagcaggtatccactgcctgctctgttatgaccacagtgccgggctccagacttgtgactttcagctttctctgcattggctcccgtggccgccattccgccaactgaggcaggacccgtcagaggagagcggctggaggcggacagacgtctgcagtgggaggcgctccaggcgttccaggcagtgtcctgccggcgagtcacccgcgaccgcgagtcacctcaccaagccctgaattgggacaggagacgagacgtgtcgacgagctgcggagttcctcgcttctctgggcccactcggcctgcgcagagagccgctacacccgcggcgccatcctcgcactgcgacaccggcgacaaacgcaatgctccagggccggacgaagggacggctctcgggaggctcgcagacggcggggcgcgggtctgtgcgccggagcactcgaatgagcctcgtgccgaaatcgccacccaggcctcgctaccta

SEQ ID NO: 132177 - DNA, 1408 bp, Homo Sapiens
tctgtggaagtgcagggcggccctcacgccttgctcagtttcttcttgatgaagtagctcaccagccgctgcggcctctgctggtactcgctgagcacattgcgagggctgctgatctggtccccttccaggcggttcaggagggtgacacacaccacggccgcttggaggccgcaggcgctgcacatggcggcaaacaccgaggactccatctcgatattgcggacgccggctgcataggctgcctccagatacgcctgcttgtccttctccgtgtaggagcagagagccccatccagacggccttgcccttcatagaagtccaaggtgcacatggtgttccccaccactgtggtgaactcgctcagctctgcagaacacagcaacagctgctgcaccagcttcttgttaaggtccgttttccggatgacccgcttgcccaggacaatctgctcaaactctgccttgaagcaggtatccactgcctgctctgttatgaccacagtgccgggctccagacctatcccaccagaagtgccaatgcggatgatagtgacgttggagcaccgggcatagtacagcagctttatgagctcatgcaacatgattgagatagaaggaatgccccataccatgactgacagacagcaaccggtcctactttatacatggcatagcggtcagttcccgcacagatgttgggatagtctctacctgggcagtcaaggcccagctctgcaccaacgcacctgatgaaggctttcatccgggaggggcttccaccaacacacacaaacttcacatctccaaacaaggctgggaaattgtgtctgctagtggtgagattgaaatgatagagaatatcttctttcatttttgctatgtttggatttaaaagtctgacggggcaatcattgtgactttcagctttctctgcattggctcccgtggccgccattccgccaactgaggcaggacccgtcagaggagagcggctggaggcggacagacgtctgcagtgggaggcgctccaggcgttccaggcagtgtcctgccggcgagtcacccgcgaccgcgagtcacctcaccaagccctgaattgggacaggagacgagacgtgtcgacgagctgcggagttcctcgcttctctgggcccactcggcctgcgcagagagccgctacacccgcggcgccatcctcgcactgcgacaccggcgacaaacgcaatgctccagggccggacgaagggacggctctcgggaggctcgcggacggcggggcgcgggtctgtgcgccggagcactcgaatgagggaaccacttgcgagcgacgcgtgggtcgacatatcccgggattccggaccgtaccagcctgcttttttgtacacactgttctatattactatgc

SEQ ID NO: 132178 - DNA, 629 bp, Homo Sapiens
  misc_feature (188)..(212): n is a, c, g, or t
tttgaatatttcctacttttatttgacaataacaaattgtatataaaaaggaagaaggaaggcggggaggccctggatctccccttctctgtttccccaagcatccccctctaggccccagcaggcaccacccccttcctgccttgtggtggggtggggattgacaggcatgaaaatggtgtgatttnnnnnnnnnnnnnnnnnnnnnnnnntgaggtgttgggggtcaaggatggagggggtcaaggagtagagagagggccttccctcatcccccatcagtggcaccctgagaggggtcttaagagggttatgagggtccacagatgtgcctcagcctatgagacggtagaagatccagcatccaaaagtgacccagtgactggcccagctgagctctgaccacttgtggacagtgtatgccatgccgtagccctgctcctctgtggtgtcatccacatcgacatcaaacagggagcccaggtaggccaggtggaagatggccagagctccacagagcaagtttaaggctcgcacccccagggcccaagcgatgctggtgccaacagtctggcgggcacctttgacaagacacaggccatcgcgatccgagccaggcgcttccggag

SEQ ID NO: 132179 - DNA, 961 bp, Homo Sapiens
tttttcccttcagaggaaggctttattgtaacataaaatacacaactttgtgactgtaactctgcataggatatatttcttttttttgaggcagagtcaaatttgaggccccaaattgtacacaatacttttttttggtggctaaataactaatctgccttgacactaaaatatgtatctgaaataatttcaccaagttttaaaaagaaaaattataaaaagtatactttcattttaagttatattcgattttagtctccccctaccccctagaaaaaacctgcacatctcacacacggagctgaaacttttgaggacttgtgtgtgtctgggagtgggtgagaggctgatggggtcgagacacaccactacctttatcttgtggtttgcaggaacaaggaggagagagaagatagaacgcagagagcgagcacacctttcatcaaaaatctccactctctaggcacagcctcggtaacaccgaggacagctcacaactggacaagcagggaaaccccagctcagggaagccacactcatcagctctcttcctccccaacccagtgccaactgcaaagtgagccaggacggcctggctgctctgtcctcagcaggccctggggtgggtccactcccaacctgaaagtgtatcaagtctgaccccccaaccagggttgctggaacagagagcgaggtctcagaggcaggtgctggtgaagcatctctgggagacgggcagggagtgactctacgagcctggatccctgagcaggcaggctctccttctcacccttccccgatgcacccatcctcatggttggaattttcatcaaatcttgaggggtagggaggggctgagtgggatgcgggtagcctgctcctcagaggcagagagactctactgcctggcatagaaaaataaatcagtgtatgaaaccaagccaaggcaaacggcagcttt

SEQ ID NO: 132180 - DNA, 880 bp, Homo Sapiens
  misc_feature (221)..(271): n is a, c, g, or t
ggctggaggacgtggattggaacagcgttgcccgccggtatcccaacctcttcaccagaaagaacaccgagttcgggtgtgccggaagagcgtggaccgtagctgccccctggtggccctgtcggtgcagaacacggcggagagcagattcggcttccgcttcctcagctgcctgccggtcaccgcggacacctgccgcggcgcctaggggcggaggagtnnnnnnnnnnnnnnnnnnnnnnnnnnnnnnnnnnnnnnnnnnnnnnnnnnntgtgtccgctgcatcatttattgaaccaacgtggcctacaaagtaaaccgcatttctgtacacctgagagctggaaatgttggtttgggttccggggcgtcctgcgccaagaggaggggacgggccgccctatcgcagtgcgggaaccctacagatcccccggagacgggaggcctggaccgcacccccggcggcctcaggcgagcagctgggaccttgggccactgcggcctaggaggtggctcttaccctggggccggcaagggagtggtggactcgcagctccagcccctgcccctcggccatgcccaattctagcaggagaggcctctcacaggcctgctcgggtgaccaccccccacccccgtgcccgcgggaaagcctggccctaaggaagggctggggagccggaccctccctccccaggccaaacccagttgggggcctaaactgggttccagcctctgctgcctccctggctggtcccagtcccccactcccctccaccaagagggtcctccccagggccaggcactccttccaccccccaacacacccgcccaggtattctgtgctctgtgaccacatatgtgggcaagtcgtggcccc

SEQ ID NO: 132181 - DNA, 1076 bp, Homo Sapiens
  misc_feature (489)..(503): n is a, c, g, or t
  misc_feature (675)..(683): n is a, c, g, or t
tgcggctgcgcgagggggtaggtgggcggtgacatctacgatcttctgcggtatgcgcaatgaatgggaaagcggcgcctcaccgtgtatgtgcgccccgggctgctcgatagcggggatagcgtgtgacccgcaggacataatagtggatgctacgaaggctcgttagggagccctgagtgtgtgatataggtgggcgggtgtgggccggattaacctaggaaggggcgggggcaccggcattcatgagaggctgcgcaggcggtgttccacgttcttgaaagaggttcactctgcctacggcccgaacggctgtgtggcgcccggccatccatcacaccggtatcgaccggggagaaaactaagcgtcgccaacacctcctctcttgaatcgagcatgcggtgggcccgggcgtgcgaaaagcacgcgccactgatacacgtagcaaagatgcttctcgttgcgtttataaaattgcgcgggcatannnnnnnnnnnnnnnagtactggttagaaacagatgcattccgaagggtgggtggggcgatatcggaaggcgagaataaaattattaagatcgggctccccacactccgggggggagaggtccggcctctcttctcaatttagtataacctggccggccccgaatatttatttttttgtgggacaannnnnnnnntttgtttggccccaccaaagggccccggccccaggaaaaattcccgggaaggggaaggcttgggccccaggtttaaattggctggaggaaattttcattcaggggggcttaaccagccatgaaaaggctttccaaatttatgtaatattttgattcatggcacatttatgggtctagtccatcctaagaacattataaagagacatttccttggatctgtctgtgtttctgaaactgattcaataccagatagaagttcgcagaggtaagctgaatgatggactgggatttttagggtcttcaatgtgtataacttcacaaaaaatatgcacagagtatggaaaaagtaggtttgattggaaaaaatctatacgacgaggaaacagcctgtca

SEQ ID NO: 132182 - DNA, 775 bp, Homo Sapiens
  misc_feature (31)..(31): n is a, c, g, or t
  misc_feature (132)..(132): n is a, c, g, or t
gacccaagagaaggcccacagtgaggagccnccaccgaagcatccccagcaacagggactgaggcatctgaggcagccagcccactcggaaaggcttgctgactgcactccagatgtcaagagcacccttgngaaaaagaaaggcaggagtgcagcactttctagagcctcagctcacttctctccttctagctccagccggagtgatggaagaggctgcgctgggagctgcctccctgggagcctaccctgcccagcctgagagtggaggctaccagcatcacgcttcccctagtgaaatccatctgtcctgaagggaaccctgggacggggtcaaggaaaccctgttcacccccaccacggggtcaggtcttcaccaaagggaggccgcacggattcccagtcgcaaacccaaagccttgctgcctttgcctctgtttccatagttgtttcaatgtcttttttaaaaatcacatacactcgagtaagactgagtctcctcaccgaagagatctggctgtatcccgagtctctgaaacctttgctccagtcccgtgggagcgtgccgtcccgaggatgtggagccgcaagggctcgccagagggatctcaggagctaggcctcaaggagcgctgttgagtgacaggtctgatgcagtagcttttactattggtggaaatcgatgttttttccttgaaagtctacctttctaagttcagtaaaccaaattagatcatgtatgtgaaagcactttgtaaactatgcagtactccag

SEQ ID NO: 132183 - DNA, 650 bp, Homo Sapiens
  misc_feature (604)..(604): n is a, c, g, or t
ttttggtggtggaaaaacatttattgcaattcagtgtcaaaagttttttacaaaaatatgccaccgtctggtacaaacaactataaaaaatcagttcatcatgcaagaaaagtgtgcaaataatttatacagaaggactcagctcacacaatattaaataaacatctctgcatgtaattggtctaactttatgctttagttacaatgttcaaccccctctaatacttttcatttaaaaaagtacattaaagcttctaagcttaggacacaggctgtaatatacgcccactttagccatggtgattggcacttggtagaataaagatggcaccaaggattcccaagtatagaatacagcttggagccttctgcttaacagacttgtgcttcgttaattaaacaaacacatctatactcaaagacagaaaaagtcatgtttaaactccagaaataatgtagcagatggagttttaagaagttcagagttttggagcagccatcatttttggccaaatggagcagggcctaagttttgagagattctccagaaagctttgtttgctgagtgaattcaaggacactttgaaaaatgcccagcagacanagtcatgaatatcatggccccttgctcctggctgcctcatggaata

SEQ ID NO: 132184 - DNA, 752 bp, Homo Sapiens
  misc_feature (637)..(700): n is a, c, g, or t
agtagaataggtaactttattttaaataactttcttaaccctgcccattaagatcacagtaaacatacaataatttttattatggaaattaatctttacatacaaaatcagctacgtaattttacttacaaaacaataaaaactgttctttactgtggcaacaaaagaagcattttgacaaatgaaaaaaattaatgcaaacaaattaaaacaatgcttttctttttacttgcttcactgtctcttctatttattttctatgatcatttgacacaaacatggattactttgatatctactgaaacataaatgataaggttcttaaaggttgaattaaaagtctgggtgttcaatattttagaagctgaataaacaaaacgaaattggggtttgtgattacagaggatttatcattttttccctttgcccatatgaaaatatataatagaaaattacccacgggaaaacatttttaaatttaatgttgcgttcctatcaagtttaataataatgccaagttggcaatttaattaattactttcactaaggattaatactttgtctagaatggagtagaggtagactgatcttttcgtattcaaatattttaaaatataaagtttaaaatgtcataagnnnnnnnnnnnnnnnnnnnnnnnnnnnnnnnnnnnnnnnnnnnnnnnnnnnnnnnnnnnnnnnnaaatccctttttgataaatagtaagtaagttgttgcttgaaattcatttggt

SEQ ID NO: 132185 - DNA, 319 bp, Homo Sapiens
tccagagtagaggtagactgatcttttcgtattcaaatattttaaaatataaagtttaaaatgtcataaggaattatataaaatagtatttttaaatatttgaaatttaatttataattatattcaaaataattaaatccctttttgataaatagtaagtaagttgttgcttgaaattcatttggttgaaatgattactctaaggaactcttttagttatttttaactaataatctttagaaaaaaatgtctatttttaataagggtttctagttttggaaaaaagcttctaatgatttaaatgcacttacagatgctc

SEQ ID NO: 132186 - DNA, 1913 bp, Homo Sapiens
  misc_feature (193)..(193): n is a, c, g, or t
gccagcgcatttcagggggttgggtgcgccctttgggaacttggcaaattttggcagggaaaaacctggccacttccttagggtcccctagttctttgcctggtgagatgaaaattagggcagggcctgttaactaaagggaaaaccagggcccgaaaatgtgagccatttcaaaatccaaaatgttcaaaantttttatgaaatatgtgggtgtaaacctttttcccccacaccataaaagggagctggtataaatgagtgaatggtgctatactttggaaatacgactaaatggatggttattcaattgctttatatttatttctgggaaaataaatcttaaaccttgactgacttttcagtgttaattagtcatgttgaggagaaacaaattctcaaattccttctctgcattacaataactatgaaactcacaagcagtgtgtaccaactcaaatagttaacttcatatacaaccaataccaagggtttcagtaattatgttttaagcaaaagcaaacgattgcagatcacatgatttaagactacagtttattcaatatgtctccaagcattaaaaagataattctgtgaagttaaactcagtaaaattatatcttaaagtgcttttattttgctgtttttaaaatctgtttggggaacaactcataacttctttaagtaattgatgtcaaataatgcaccctgtacttctggagaacacagcattttcaaaattgctcttttcaatctaattatatcagaaaaatatcttcaagagcttagtatttcccaatttttgatcctgatcctggtaacctttcatcaagatccaagcttatgcatagggttctcatctagacccatctgaaattctatacaaatagggagacatattaaatacaaaggtctgtgtaaattgacttaattactattttacaatgaaaaggaattttattacatctttacatcattttaaattggatattcctgtttaatattactgcaagattaaaaatttgcccccacatatctaaaagcagcttgctttttcttaaaatataaaaaccaaaggaatttcttttgtagcatcgtagagaaagcaacagctttatgctcactcttgtatgttcgtgtaacaaaaaagtctgccactggctctatttccgaaaatctccacagaaatgtgaatccacatatagaccacgctcccgggacagctgatccacatgccggagttctcccactgccaaacagctcccaaaccttctagtggcttaaaaatgctttccttgagaaatacacgatccgcccaagtcacagcagctttcccagtccaatctccaggctcttccaaagggttcgagattctgattccaagaaggtgctgagcatccagtattgtgtcttgactcctctcaggctgggcatgttcctctagggatcaacatcatcaaggtcacttctcaactcaccaatcatcatgggagattctgaaccctgctgtagatgcctgtctccggttctcattggccaggactactctccggaccccattactgctttcctgattgctctttttcattcaacaaagctgtggcatacgctaacggtgtcctgagctgaaatggttcgctgaaaggtttttccagttgatgtttcattagagacattactctgtggtgtccagtaatgttctgacatcttcttctggtagccactgcacagcccagctccagtggtgggaattctccttgaagtactccttagctgcaggacacctgatgaccgaggagatttttattagccaaattctttctttgcttgttcctagtgcttcattttgaaacgtaaatgctagtttcattaaaattcagttgtctttatatttgtgattctacttaaatggggt

SEQ ID NO: 132187 - DNA, 701 bp, Homo Sapiens
  misc_feature (683)..(683): n is a, c, g, or t
tttaaatttttttattatagtaaaggttactgttgtaaaacattagtgactttggtccatatcttatttgccatttgtctttaaaacattttacattatttgcatcataaattgtaatttttatgactatacataattggtttttttcctgacccttggaatgttagtttcatgtaactttttaaaaaattaaaacattgcagactaaatgtactgataagtacatactgaacacatttaattaccacagtaattaaaaagtcctgatctttacttcttaagatgaaaattcattaacttgcaatctctgggatttctctattatccacaatgagagtatgaataatcccttctttccgcttcccactactgacagcctttatgtaacagtcatggttcccgatactgaagtgagtttcagtcccatcatctacaaactcacccgctgtctccaattttttaccattgcaccatacgtccatagcatctttttccaaaacaattctaaagttctcaccatccatgtgtaatacccaagtattggtggtttttgatctgtcctccatatacttcttgagacttttcccattaatttccagagtatattcataagccaaaccactgatagcgtctatatttatggtcgcttatgtctttgcagctccaacatagaatggttcttntgccactaatttgaacat

SEQ ID NO: 132188 - DNA, 1590 bp, Homo Sapiens
ccttcgtctacttcaagccggcagcaggcttcttcggcgcgggcggtggcgggccggagccggggggctgcggggacgccgccagggcagctgcagcgccgccctcgccgccccccacgctgctggacgaggtggaattgctggatctggagagcgtagccgcctggcgggacgaggacgactacacctggttatacattggctcttcaaagacgttcacctcatcagagaaatccctgactcctttgcagtggtgtagacatgtcctagataacccaactcctgagatggaagcagcgagacgttccctgtgctttagactggagcaaggttacacttccaggggctccccactcagtccccagtcatctatcgacagtgagctgagtacttcagaattggaggatgattctatctccatgggatataaattacaggacctcactgatgttcagatcatggctcgtctgcaagaagaaagtctcaggcaagattatgcttctacttcagcatctgtatcaagacatagttccagtgtgtcattgagttcaggacaacaagggacatgtagtgatcaagaatatgaccaatacagtctggaggatgaagaggaatttgatcatttgccaccacctcagcctcgtcttccaagatgttcccctttccaaagaggaattccccattcacagactttctccagcattcgggagtgtaaggaggagccccagttcccagtattttccttcacataaattaccagcagcaacagtattattcacctcaagcccaaactcccgatcagggaaccaaataggaccaatggagataagctccgaagaagtatgcctaacctagcccggatgccaagtacaactgccattagctagcaacattagttctccggtcaccgtgcgaaatagtcagagttttgactcaagcttgcatggagctggacatggccatttcaagaatacaatcttgtattccatcaccgggacagcttcaacacagggtctacagcgtggggcatttcccagtgtctatccgacagcctcttacagccacagcctatgtgagtccaaccgttcaaggcagcagtaacatgcctttatcaaacggccttacagctgtattccaacacaggaatccccacaccgaacaaagctgcagcttctgggataatgggtcgcagtgcactcccaagaccttcgttggcaataaatgggagtaacctgcctcgaagcaaaattgcacaacctgttagaagttttcttcagcctccaaagcctctgtcttcactcagcactctgagggatggaaattggagagatggttgctactaatgcagttttatgtacccttgaaaaatgggaaagaagtaaaaatgagggttgtgttacctagctggctgggtagcagtggatgtagggatattctttccctattagtgtatttactattatttactgcattgtttctcaatggaccagtcaccagagactaattattgcaccttaaatatttgcctgagatactgcaacattctcaaacccatggttgcagctattgtgaccacttagatctaggaag

SEQ ID NO: 132189 - DNA, 1369 bp, Homo Sapiens
  misc_feature (391)..(391): n is a, c, g, or t
  misc_feature (402)..(402): n is a, c, g, or t
  misc_feature (479)..(501): n is a, c, g, or t
  misc_feature (1320)..(1320): n is a, c, g, or t
cccaagatttcttgattccccagttggggattagcggaggaattggaaccaaagaaccaggaatcctacttccatgagccatggctggagtcagtattgtctccagggtctcctccctgaaatcggttcctccagctaccaggacaaaccccctggcagcgcctgggcctttgagggataccttatggagacatggatgtagtttcagctgccacctacaccagatcagcaatttttaataagtcatttgttcatatcctgttcaaaaccattcttcctactttccacacaatatgcacaatgctttctttcatttaaatatttacaaacagaaaaggcctatcttttaaagaaaagacattttctgagtctctataaagtgcagctaatntaaggcaaatntaagtgaaatataaaagtggcttattctctctctatatacatttcccagctttaaaagataaggtctcctcccctcnnnnnnnnnnnnnnnnnnnnnnnagggctttaattttttttctggcaattttaaaatgtaagatcttactggttgtaggaaatcatagatttctgaacatcataagtaaaatggtcttcttctttaaaaaaataacttttatatagcttcttcaaacaagttaaaaggtggcaaagtatctgctacagtagtttggaggactagaggactgatgggtaagtaagggttgttttgttgttaggtaaatagatattaggcagtccatttctaaaatatgcctgatgaagctagatacctaaagctacccttagctccaggaatgagtatcttccatctccatcggaatcaaatgctctcaagctctctggttctggcatagcagaacctagggaggtccagatttcctggtaggtcagcttcccatccacgtcctggccagtcttgcggaataaatcctgaagatcttcagtgctagaaactcctggtagggagataggtcttagttgggcagctttctcaactgggtctccaagaaactgtgaaaattttggcaatgctgatggctttgatgtgaaactctctacttgctcttcatcggcggtctctggaggcctgttgctctcatgtttgtttgtaagagcactgatcagctggagtttctctcttagcttggatacctgagaatttgaactatcttctttctttatgctttggatttttactgtatctgttctgttggtgacttgatccaaagactgtcttttcagagtggcagatctatcacccatcatgctgaaggacaggtttgctttcttttctaccttgctcatagcaaccacatngctttctatcaggttgactctctgggtaagattactgactgtctcgttc

SEQ ID NO: 132190 - DNA, 1556 bp, Homo Sapiens
  misc_feature (146)..(146): n is a, c, g, or t
  misc_feature (184)..(184): n is a, c, g, or t
  misc_feature (296)..(342): n is a, c, g, or t
  misc_feature (365)..(381): n is a, c, g, or t
atcgtgggcaaagaaaatttcactattggtctcttttttgacaacgcccccccctttcacaaaaaggctccagaaataaaatgggctccccccaaaagagaggccacccccggtccctggggggaaaaaaattttaaaatctcccntggggttttcgcggaaaaaagcttttttgcagaggganttggactgttaaaacaaggggggttttgccctgtttgttccacacagccacaagagaatgagaaccgcgccgagggggacccggctttttctgtggccaaaattcattatannnnnnnnnnnnnnnnnnnnnnnnnnnnnnnnnnnnnnnnnnnnnnncccattccaggggaaaatgggtnnnnnnnnnnnnnnnnnatttaaggtgggttttaaacttcgggcaaacccaaacaccagggtggaaaaaatcttccaaccgtcttagaggggaccaaagtttcccggggattgttcccacaacaatggagtccattcccatgggggaaaatcccagaaatggattcaagacgttcccatggaaaatgcaatttttccagcttctatgcccaaatattttctaggctcttcataaaaaagaatccaaattccactgacttcgatagggccatggtaaagaacaacgtgaaactcctataaagcaaggagttggtgtcgcctggtcagcgaaatgagccacagcaacctcacacatacgattcaatgtaaagcaaattagttcatcactttattacatcttagtgctttcttaaaataaatacagtaatatcatatcaaacatacagtgagaaataaagcccacgtgtgaaagtatggtaacagaaagctcactcaggactgtgtaactcagcacttgagaaatcatacagcctttagttccctatttacaggacagagagcggctgtgtcgaacacgatatatacaaaatcgcaagagactgtacttctcttcaaaggactgaggaaaggggaataagacctataattccttctagccttctgtaccatgttccctccttatgtacacgactcactcatgttttttgtctatctaaaattatgtaacagttaaatttgtctctttttctcccaattattgatcttttgattttttctgcagtttgagatagattcaagtaacactcccaagaaaatatgtgcaaaactaatgttagtggctccagaatcttccggcagctggtcagttgcagcagtgtctggcagccatggctggcacgcacctgctcctgggaatgtccgcgctccacagaagcatcaacaccattgggaccaaggcagaaagaacccaaagccatccacttacttggagttctgaaataactgcaaataaccacttaattgtttttaaataggcaacaaacaaagtatccatctacaggggaaacggcacgctcctctgagagcatgcagcgcttccagatgcagaatccagacaggacaagcgacgcgtgggtcgacgatatcccggaattccggaccgtaccgcctgctttttgaccaccggtcaatac

SEQ ID NO: 132191 - DNA, 580 bp, Homo Sapiens
tttttttggattcacactggtgtctttttattggattttccgtgggcaacctgggtgcttcgagctccgctctggggcagtgggagctgcccatcctctcccagcgccttataacaactgggtcctctgctcctgggctcaggctgctgccttgagataaacccagttttcccactgccttcttcttcacttgtgccaggctgcccagccaggggcatggcccgggtgtcctgggtagcaggcactagttcagagccccctggcagcagtacctgcctgttgtaggcccctgtcgactccacagtgtacacaacaccatgggctggcctacagcttggtgttgaggtggaagaagtggggcgctgcataggttgtgactggtggtgcgtgccaggcagatgaggccgggcaaagtctgtggcggagggcactgtcgaaggacgttggggggaagtgcatcaggccagcggccatgggcgaggggcctgcggtggccaagaagtgggccgggaaggccgggatgaccagggggctgaaggggagtgcagcctggcccttcaaggggcccggggtgccagtg

SEQ ID NO: 132192 - DNA, 409 bp, Homo Sapiens
tgcatttaaaatctaggaatgtggggtgatcatctttgtacataaattacctaatgatcctgtccatgctgtgctacgtgtttaggtggaataacactcccatggatgaagcactgcactttggacaccatgatgtatttaaaattctccaagaataccaagtccagtacacacctcaaggagattctgacaacgggaaggaaaatcaaaccgtccataagaatcttgatggattgttgtaatggtctcaaatcccaagatttaaatcacttacctatttaattgtggaaaatgattatgaagaacatgtgtatttctatctggtagtgatgtatattttacatttgtcatttcagtgttactggagttttcttcattgtgcacacaggacaaatctgatctctttggg

SEQ ID NO: 132193 - DNA, 1166 bp, Homo Sapiens
gtttttgtgtctcacataggtgatgtacagttcattgattatgaatattctggatacaactacctggcatatgatattggaaatcatttcaatgaatttgcaggtgtgagtgatgtagactatagtctgtatccagatagagaactacagagtcagtggctgcgtgcttaccttgaagcctacaaagaatttaagggctttgggactgaagttactgaaaaggaggtagaaatactcttcattcaagtcaatcagtttgcattggcttctcatttcttttggggattgtgggctttgattcaagccaaatactccactattgagtttgatttccttgggtatgcaattgttcgttttaaccagtactttaaaatgaagcctgaggttactgcattaaaagtgcctgagtaaagaagagatttaattattctccagtagctgagcaatgcttgtgaatcttttcttaagaaatcccaaaaagccaatattagttaaaattctgttgtttaatttggttatcttgctttataaattatgcctctaaacaatcaaatctatttttgaaatagactgaatgatgtcaagaaatatacctactgctatccgtatgtggtggattagaaatgtgttaaatctgcaaaaggtataaagatgtcagtttaatttctttgataatttaacctatgttgtatgtgaattatttattataaacttagcacgattctgtgactgtttttctctgtttcacgttcgttgagtgtaagcaatgaaaatgtcccaaataagttttttaagttttactttaataagattaatttcagtaaacattctagttgttcagtgtaacctttttatcttgatgcattgtaagtaaaatgaatcatttactcttgaaatgccagtcattgactgatgtagataatttaggattttcatataaaaatagctgtttaggaaggtgaaatacattcactgtctctgttggtggtacatcttgttgaattcaatattagaaagtatttctttttggggtaatataacttagaattaaatccctgtttctctatgtagtctggcagtataaatataaatatttaccatataatcttggaataagtattagttaatgttaccaaaatctgtattaaataatgttttcaaatgct

SEQ ID NO: 132194 - DNA, 1077 bp, Homo Sapiens
  misc_feature (59)..(80): n is a, c, g, or t
  misc_feature (876)..(877): n is a, c, g, or t
  misc_feature (888)..(888): n is a, c, g, or t
  misc_feature (976)..(976): n is a, c, g, or t
  misc_feature (1039)..(1039): n is a, c, g, or t
  misc_feature (1063)..(1063): n is a, c, g, or t
gtgccaagctaaaattaaccctcaactaaagggaataagcttgcggccgccgctcaggnnnnnnnnnnnnnnnnnnnnnnaaaaagaacttaagtataattttattctattctgcatcaatgccatacacacacaaaaaaatgtttggatcacttaataagttataacattctatgttttaacattaataacaaggacataaatgatcatttcctgagttaacagtgcaaggtaaaatttaatctgtattgctaataagacattttacagcatagaaacatgatcgaagtgatcatttactttatcatgtcataaaacacaagtgcttattgtagaacagtgatataatttaaatggcaaggaaatttgtgattcataacaaagaatcctgtatgtatttgttgccatgattaactttccaggtcaaatatcagtagtaaaataagttgtggtacaaaagaaagccaagaagttacctgtactgaaggaacatttgatttcatttaagaaactgaaggctggattctagttaaccttttgttatgtacaaaaatgttctcttaaaaaaccctaagcaatcacaaatttagataaactagttgaataaaggacaatgacagctcttcattatgctgtaaaactatggatctcatttttggaaaagttgagatcatgcagcaaccttactccttgttctgtaaatggcactggtccacaaatgcagacgagaactttggatttgtccaaatttcttttcaaaaattcagaaagaagagctggtgaaatatgtccctgtttgccattccattcagaaataggtgctgagagaccaattcaacatccagtcttttatcttttaatgctaatttctccaanntggctctccanatatatcatcgtctggttttatgaagacatcagctcactttcctgagactgggttatcagtcaagcatattcagtatttaacattggntgtgagctgttcagctgcaacaaaagaatctctatttctggactggatatttaaatgcctcangatgctaagaacaatctcatcganacatagtccgtgta

SEQ ID NO: 132195 - DNA, 719 bp, Homo Sapiens
aggtaagcgtgattttcaaaagtcactgttttcattcatatttcatgactcttgcatatttatcaagtctaagttggaactttatcactgttgaccaaatcatctagacgaaagaagagtacaacatgatcttcagaaaatgctataaagcctcaggcagaataaaattagaatgagtttctgggttccaaaaaaaatgtaacattttagatttcatttattaagggcatcgccaaggccattatataaccatgtccacgtaattgtaatagccaacattccattaattctgatttttgagagaaccaaggcaataaaaagaagcaatattaaaagttaactacatagtacatttggggaacggtggtttgatttggccaagagcccaggacaacaagggaagggcagaggatgaggctgaacagtcagtccaggcggactgttaaatgtcacacaaaggggcttaggactggtaatataaaagaggtctgtgctgacccaaaggatttggagacgatgacgtgcgtcttgttaggaaacttacaatctaatgggagtgacacctaaagagggtcctgagctacagaagggcagaagagaaatgaagtatggcagggacaatgagagaaacctttcctggttatgtggcatttcagttggaccctgaagggtaggtagaatttgacaacagtagatggcaacaaacagcataacagatc

SEQ ID NO: 132196 - DNA, 743 bp, Homo Sapiens
  misc_feature (717)..(717): n is a, c, g, or t
  misc_feature (724)..(724): n is a, c, g, or t
tttcctaacatctcataggtagctttatttggtttttagaaaaatatatacaataatcggaacatcagttcttaaatagttttaagttaaaagaatgcaagtgagaggatgtttccacagtcagatcaatactgcttaataaagtagataggaatttctgcaacaagtcaaaacatttacaggaatggtaagaactctgcaagagcagcttgtggctggcaagtcagccagctcagaaaacaggtaggaagggaaggggtttgatctttcccctttagtttgaatttgagaaagtgataaaagatttacatattcacctatcctaaaggctagagctttgagtaaaaacattagaatacagggatggaggccctctagggcatatgctaacaagctaacttatatcaaacaaaaatttgccatctcaatttggtattcagttggatttggatatattaggattacctgtcagtcacagttcaactagttcagatataacaaaactcaaggacttggagtattggttaatgacatttcttttggattagacccctgctttctctcgaacattcttcgtaatgaattcacagtattcaaacagtgtttgcaaagatatttgagtttgacagccttctgactttcatcgttttgagaagttgcgcaaggaagcaataggaattgccttagctatgttctaactcgacccttttcccccanactgtantaactccaggcctacttct

SEQ ID NO: 132197 - DNA, 351 bp, Homo Sapiens
  misc_feature (309)..(309): n is a, c, g, or t
aagctggtcatgtttttactggaaaacaacctttctcatttttgttcttacacaagcaagtaactggagaagcaggccagagtgcatacgaggatttaaacatggttgtatctgtggtactttagatgcaactttaccctgttcatttgaaagtttaaatagacctgtctgctacacagactcggatgggccaaataagtcatctgatatgctgctgaatggctgagagtctattagttggcttatttcattatcaaggtcttcttctgtaacatacagtgtccttgcttatgtggggtcgaagacatnctgtgataataaaagcagcctctgctccctcgttccgaaatc

SEQ ID NO: 132198 - DNA, 986 bp, Homo Sapiens
  misc_feature (875)..(909): n is a, c, g, or t
catcctacctgacctgtaaagctgcttacctatacataatagaaacgtcataatttattcaaataatttcccagtataatctcttttaagcatagctattaatgccatcccaatcatctcattagtaagctggtcatgtttttactggaaaacaacctttctcatttttgttcttacacaagcaagtaactggagaagcaggccagagtgcatacgaggatttaaacatggttgtatctgtggtactttagatgcaactttaccctgttcatttgaaagtttaaatagacctgtctgctacacagactcggatgggccaaataagtcatctgatatgctgctgaatggctgagagtctattagttggcttatttcattatcaaggtcttcttctgtatcatctgtgtacttgcttatttttttggagtgctggtctaaagacagactttctaaagtttctatatcttcaatgcctgctctgtagtgaatcataagaagtgttagagcttgtagcctttcacctgatttagctaaggcagcagaaagaagtgattttttccttgtatcagttgtctctttttcttctctaacaagggaattattgtgttccaactcctgatcaatttcattctgtagcttatccaacatgaactctagtttctggatcctttcctctgtaggcaagcccctgtacagatcacgaccaatttctttaactgcaatgaaaacactgtcatccagaccaccctcttttctcactaactttattcctgtgctgtttccccgtttagaaggactgtttggaccacagacctccgtgtcaccccggccgtaatggccgaattcccgggcatatgtccggtaccgtcgactgnnnnnnnnnnnnnnnnnnnnnnnnnnnnnnnnnnncggccgcttcctcgctcagctactcgctgcgctcggtcgttcggctacgacgagctagcgccctatagtggtcgtca

SEQ ID NO: 132199 - DNA, 824 bp, Homo Sapiens
  misc_feature (803)..(803): n is a, c, g, or t
agattttatgaacaacttttattaacagaaatcaaacttattgtccaaagtgacaatatatcaaagaaatacataccaaaacctgctgccattatagttgttaacatttttattgcatatttacaatgtgtggaacattataaggatttacagtagaagccaaatttcccagcccttaaaattttaataggaaaaatcgaataaaccatacatatttttgaaaatgagcattagaaacacacagatgattataattctatagactaatacaggtgaatgctgtatgtaatagaacagctgggagaggtaaaagagtggataagagagtcatcagagtgtgaaaaaactacagctgggtggtattgaataaagagacaatattgaaaatatttttaaacgctaaaatgtcccgtaaaagcatagctatcccctatgcaaaactgtgaggtagaatttttcccaccccgttttctgctcttctggccaccatttgggggacttccctgtccaggtgactctctctcacatagctgtacctggggcttactagcaatacatgctttccactaccccctcaacctcatcacagaaataaccttttctgttcaatgatcagtcttactttacctactgaaaacgggtggtgaaagttagtaacataaacaaaccagtgctgtttcttctagcttacatatcaccatggttgggctttaacctttcaaggagtgaaatattgctaaagtttcaggcataggaaccccttgaggagctgtctggggcagacaggtctttgctttcctcanatagttccaattgtcatcctt

SEQ ID NO: 132200 - DNA, 690 bp, Homo Sapiens
  misc_feature (89)..(89): n is a, c, g, or t
gaagaacccagtgttgctaaatgtgtacaggcctcagcacctgctgatgaaagaatctttgattactatagcgcaagaaaagccagttntgaagctgaagtcatacaagacactattggtgacacaggaaagaagccagctagctggagtcagagtcctcagaatcaggaactgagaaaacatttcccacaaaagttccaacttttcaacacttcacatatgccagtgttggctcaggatgtccaatatgaacacagtcacttggaagggacagaaaatcacagcatggcaggagatagtggaatagattctccacggacacagagtctgggatctaataattcagtcattttggatggactaaaaagaagacagaattttctgcaaaatgtcgaaggcacaaagagcagtcaaccactcacatctaattccttactaccgctaactccagtcataaacgtttaattttcttttggaaacctacttttttctttataaaaaggagatggggttttgccatgttgcgcaactaatgaagtccatctaattttgccactggatgcattatgacactctccctgttttaaaggaatgtattaaatgaatcaagctcattatgaaaccagtaaaattttctcctatgaaactcatcatataacacagacattaaagatggggatatgtgcgatt

SEQ ID NO: 132201 - DNA, 585 bp, Homo Sapiens
ggcacgaggaaaatgtgtaatgtggttaatagtatagatatgcttgcctttagacaattcttatatactcaattcttacatgattgaaagattctgtaataatgctctacctttttataaagaaaaaagtaggtttccaaaagaaaattaaacgtttatgactggagttagcggtagtaaggaattagatgtgagtggttgactgctctttgtgccttcgacattttgcagaaaattctgtcttctttttagtccatccaaaatgactgaattattagatcccagactctgtgtccgtggagaatctattccactatctcctgccatgctgtgattttctgtcccttccaagtgactgtgttcatattggacatcctgagccaacactggcatatgtgaagtgttgaaaagttggaacttttgtgggaaatgttttctcatttcctgattctgaggactctgactccagctagctggcttctttcctgtgtcaccaatagtgtcttgtatgacttcagcttcaaaactggcttttcttgcgctatagtaatcaaagattctttcatcagcaggtgctgaggccgc

SEQ ID NO: 132202 - DNA, 510 bp, Homo Sapiens
  misc_feature (487)..(487): n is a, c, g, or t
ccagtgcaaatgaatccaataactcaatctcagttcgtacctttgggtgaagttctttgctgtgctatatctgatatgaatacagctcagattgtagtaacgcaggaatcacttttggagcgtttgatgaaacattacccaggcattgcaattccatcggaagatattctttataccactctgggaacgctgattaaagaaaggaagatttatcacactggagaaggatacttcatagttactcctcagacttacttcattacaaatacaaccacccaggaaaataagagaatgctgccatcagatgaaagtcgcctgatgccagcttccatgacatatctggacacagagtctgggatctaataattcagtcattttggatggactaaaaagaagacagaattttctgcaaaatgtcgaaggcacaaagagcagtcaaccactcacatctaattccttactaccgctaactccagtcataaacgtntaattttcttttggaaacctact

SEQ ID NO: 132203 - DNA, 1051 bp, Homo Sapiens
  misc_feature (1)..(1): n is a, c, g, or t
  misc_feature (694)..(694): n is a, c, g, or t
ntgagccaccatgcctggccccaaccagaacacttctgagcgtggaagaggatgctgttaattactcaagaccaaaaggcataaaaggagacatatgtccacccaagtgataaggcagtttgggaaactacatttcccagtatgccctgccccttgaaagttaaaaatcttaactggcacagagcaccctgggacacctgtggttagcaccatttaagaagtaaaaggtatagggttgggttctgacgtgaaggctttccccttccatgggacacttaaccagacacaggacacaacacctgaggtgaaatttcaatgggtattaagtctggggtagagcttctctctccccaaatctagcttccaaagatgtggagctggtggagctgtccattggtccactgccctgtttctcctgggtgctgcctctgcctcctcatatcaccagcgtccccactgccactagtctgtagggggattccgggctaggtgctcttcccactcgacttcaaccaacttatatagctccatggtggcctgggcatcttccacagaggaatgtccgctcttcccaacctggatatcccggtttagcagcttcttggtgagatgcttcagagacatggtggcattctccgggcagtcagccttccggttgaggggggggatatgggaggtgtcacgggtgagggancttggggtgaaagtactgaagggctttgaagtcgttgtggatggcatgccccaccactatcttccctgtgagtatcttcaagatctggcctcgagcaatcttgaagggtgtggcattcaccatgtgctgcttccggataccactccacctggttcggtagtccacaatgtggcaggggggaagaatgtactcgtcataaagcacatctccgttgtagttgacaatgctacatcgaggcaaggaactaacatgcccctttggtcctgtgcccaccatctcacagtcaattgccaccatcttccgtggcaacttctgggatgctccggagcatttattctctgaatgagcttgggtgga

SEQ ID NO: 132204 - DNA, 1892 bp, Homo Sapiens
ttttaaagagtacacctgtttattaaaaggaaaaacagaaatgtacatttttgttgtttgctttaagaaatttgatcaagttgcaaggaaatgtgtgggcacggctctgtacatcctcgggcagggtggcaggcattgaaggtggctgggcggcacgtggctcctctagggggtggtctgacccccaagcatcgcttatcaaagccactgccaagcagacttccgtcccatggcaatgtccccagcgctccctcctagggggcccccgacaccttccccgagagcccacctgccctgtgccagtgagccaggggctggcctccccccgaggacttcaggacaccgggtgggctctagggcacttggccctggcaggcaggctctgagctacggaacagattgaggctggaggccagtgtcactgctgcccggatttcttctccttctggaagctgaagctcgtacgtctgttcagttttctttgtttttgagcaaagtagtcagcccgggcagtgctagctcgcgattccaggatgtagttaaccttgagcacaatttcattgacggtagcagcgtccgattcaaagtagaggtgtttatagtcgtgattgcttagatacgtgagtttaaatattgcgtgactggggcttttctcttcagcaaggtcacaggcacagagcaggtcggaatcgattgagatgggtttctgcttaatccaaaacttagtgctggctttctgattcgtaacagggtctatctctactttgtctccagagatacctagctgtacgtcggttgtgaatcgcagtctgtggatcatgctgactttgaatgacttgtaatggtggctgctaagcatatcctgtactgtggctatgtcaatttgcgaatcctcctcaaaaaccccgtctgcccttgaactgttctcgcggaccaggcagaactcccatgcgctctggctctccaaagtgctgtccaggtcaacggcgacattgggctcgctctgcttctccaggcggtactgagggcctgaaactttctgggatccttttcttcgcttcactgccttcagtaagatttccttcatggtaacctttgtgttgtccacctgaataagggagaatccatgagcagcatttattcgaacaaagagtgactctttggatgtcagaccaggagatgagtacttttcaaccagggccaaagtactgaagccaaacttatgaatgggctcattggaatccagcggggggaaatcggtgtccacctccccatcatcctcagcaatatgcaggcagtaggcactgacattgtcattgagcttcggctcccgtccttcgcttgtatactgccagcagatgagcccgatcaggtcctgcaccctggcgctggccattgtcaccacggtcattggcagcagtctgtcctggctcgagtgcagagggaggtagacatcgatcttcttggttgctgttgtacctacatgacccttgccatcaaatttggaatactcgttaaaagggttattcagctgcagagggcactgttctaggcgtacagataatatcgactgcttcccagaaattggaggcttctctttgagagattttttttcaaacagtgactttaactcctgggctgaagctgcttccacactacgggccgggtcggccccgggacacgttcctgaggggagggcccggctcccccacgcctcccggcccctgccccgagctctgcactctcgggatccacggggaccggcgctcctcccggcccgctcagctgccgcttcccgggttagccctcatgcccctgctgctcgccgccgccggccggccgagcagcagcccggacgcgtgggtcgacgatatcccgggaattccggaccg

SEQ ID NO: 132205 - DNA, 1122 bp, Homo Sapiens
  misc_feature (500)..(500): n is a, c, g, or t
ctccccggagtgctcttccacggcccatgggacccaatttgggcgccgagaacccccggggaaacggtgcaccccgtccccaattcaccttcacaatagccagccattggccacggaccatttccatggacttcgggttccgtcccttcgcttgtatactgccagccagatgagccccgatcaggtcctgcaaccctgccgcgtgccattgtcacccacggtcattgcagcagtctgtcctggctcgagtgcagaggggaggtagacatcgatcttcttggttgtctgttgtacctacatgaccctgtgccatcaaaatttggaataactcgttaaaagggttattcagctgcagagggcactgttctaggcgtacagatatatcgactgcttcccagaaattggaggcttctctttgagagattttttttcaaacagtgactttaactcctgggctgattgcttagaatttctttcttttccactgaatatttttgcantttgatctggttttgtctctcttttcggagtcgttctaatctttgagctgtgtttgagcgtcttctaataccaaagtcccaacttgaggtaatatcgactgactgggcatatacatagccctgagtctcaccattgcttccctgaatttctgacccactgtctccaggcattgaaggaggatgaatcttctctaggtcaacatcatgatcaatgagaaccatctcacacattcccgtgtcatcactggtcacatgtgactgtcgaatatgagctagaatgatagttggattgtccaagaaggccatcctttctgtgggccaatttccttaaaaggctattttctcctcttcatattgtttcacgagctcacctacctgaagctgcttccacactacgggccgggtcggccccgggacacgttcctgaggggagggcccggctcccccacgcctcccggcccctgccccgagctctgcactctcgggatccacggggaccggcgctcctcccggcccgctcagctgccgcttcccgggttagccctcatgcccctgctgctcgccgccgccggccggccgagcagcagccctattaccccgagccgcacacgaccctcgtgcc

SEQ ID NO: 132206 - DNA, 1221 bp, Homo Sapiens
  misc_feature (564)..(667): n is a, c, g, or t
aattggttggttttgggctagagacgatttgctctcttcttttcgtttgcgtgcgcgcctgtttgtttttctttctttcgctgccgggcgccgctttgacttgtctctgtcgctgggtggtggtgtggctcggtccgctcgctctcatctgtctgacctcgctcgcgactgagctacttttttgtgtttgtctctcccccgcggcggcggcttggtcttttctctcttcctcccggttcggcgtggtgggtgtgtttctcgctccgtcctctctcggttgttctgcttctccccctccaccagtaagatagtagagtgagttttcgctagtatcctcgtcagatattcctcccgcgaaagcagccccatttgttttcccctgcagccatccagttgtgtgtttatttatatatcacgcacgcgccgctcgcctctgttcgctgctttttatatatataatacgcactcctaggaggggcccccttttctcaaagaggggtggcgtgtgctggtgcgccccctgctgggggagtgttgtcggcggcgcgctcgcctcctctctcnnnnnnnnnnnnnnnnnnnnnnnnnnnnnnnnnnnnnnnnnnnnnnnnnnnnnnnnnnnnnnnnnnnnnnnnnnnnnnnnnnnnnnnnnnnnnnnnnnnnnnnnaaaaatagaattactttattaatctttgaaatcagtaattccaaagggtgcctttaccctggctcatgttgtcaatggcacaccgatttgtctcctctctctaggaaacttgtgatgaatgctcctctttccccctagatcctccgaaaagggaggaacaactttggcggatgatgatgttgaaattttaagcttgtacaaagaaaataaagcttcatactgtaatctggaaaagaagaggaagcaaaatgcaaatagccaaagagcctcttttatatcatctctgtgcagcagcagtaaagggacagagaagacctaagcagtttgggggcatggggcaaagggaaggtaaaagatacaagtgtgctctgacggggtatataatgcatcagctgaatgtccccactgccaagttccatcaaaacccagaagatctgctttcttgttgtcccagtgaaagtctgcattggctgattggcaaccatctactgccacttctgctcgaaggctttggggactttgaggcagcaaaaaaaacctcgtgccgaattctt

SEQ ID NO: 132207 - DNA, 1006 bp, Homo Sapiens
tttgggggtggctgatttctttatttattagactcaagtgctttagtacagaatggtacagagatgatatatgtttgtgcttcagtactttcaaacactgagattctgataattttaaggtaaacaagtttcaagacagactagcttttttaaaatatccttttgataaattatttttatataaataacagagaaagggaaaccaacatcttcgacaaacaaggtcctgaagcatgagcactgtttggtccgagggaggggacagaacaagcagcgggagtaagacgcccggcgcaggtgcctgcggttccgtcctaaggaaatcaggtcgtataagttgggagggagacggggagagatctgacgactaatctcagtgcaaggggagatttcaaagccttgagaagagaacaccacaatgcagcgagcagagagggcggggagcaggctctgaaagggaggcggaggtggcgccgagctcgcgtacagcactttgagaggacatcactagacaagtaatacacacatggcctgcaggaggtcaagggcggcgagggggctgggcaggggacatttttgtgacttccactgttattatatttcacgacaacagcagcagcacaaatggtgtgctcaccactggagaatgagagctgctgagtcttgaggatggcgagacagccttcctgcatttgctgctttagtttctgctttagagctaagttttatacagagaataaaatgaccatcttctcttacaaacacgatgatgtatgaccccacacaacacaaggtattatgaagtatctgaaactgaggataatctgactgaagatgcttgccgagagggtacagggtctgtgtgagtccaacgggccaagaaccttctccacagccatagccctctgttcaggggcctccagaacccatctgttctggtccattcctgacccttgaacgaaggcggactagggaaaatgagctgttgggatgatgcctggggacc

SEQ ID NO: 132208 - DNA, 831 bp, Homo Sapiens
catgttgatcctattagtagaataaaattaattgtttttaattttagaaaatgaacccagatgagcagccttcacttcagtttggttgggcagggatggagggtggtgctgaggctcacttgtttcttcttcccccaggatgggctgactgtgactctgcattagcctcttatgaaccagggtggagaccaccccatcagctgctttccagagctaggctctcacagctcagccgcctgctcactgttcaccatgtgtctcctatgtggcagcttctggggacctgcagatcctgggacaccagtctcatcccgaaggagctcaccatcaaggagaagagttagatcagcgagcaaggtggcgtgacatagagtgctgagtgcgagaggtctgcgtggtcaggatgctgcaagagaaagactggaggcccctcgctctagataggtcccagggagctgatgtcatttgagctgtgccttgatggatgagcaggagtctccaggcagagggggcaagaagcaccgttcaggcagggggttggtttgcaagaagcaccaccatttaggcagggggttggtttagggcttcccagagagggacaatctagtggctggagagtagagtgcgctgcgggacagggctggagagttagattaagacccgggaatggcccctcacacaaaagacaaagtctttccttcctcagcttccagagagtcctggtaccaggaatcatgtttcctgcaggtcacagcatttcatcccatcctgccctcggggctgagatttgctcagtgagtggtccttggcaggatgacttttctgagaaca

SEQ ID NO: 132209 - DNA, 645 bp, Homo Sapiens
ttttgccagcatcaagaagagatattgtatttccaaacaaggtcacatacacaaaaaaagtagagatgctcaataaatgcttaatatcacctctttcttaataccttcccttcatgttctaagtcagaacccatcattcgctattcctcacccccagaacattctggatgtaccttccaccttcattccagcatttccttccagccagcataatctttgcatgtgtttctctcctgaccacacttagagctctcgagggtagaaagacatctttatcatccttacagctcttatggtgtctggcttgcattttgtgctcagtgatgttcaactcaataagcacaggtccagcctggttgaatgaaacgcttattgtgtgaagcctctcttcctgttgcagtgaggctgtcagttcctggtctgatacttcttttgcctagcacagggctgcatgcatagcagaccgtacaccagtgtgtgctgatccattgatgttaaagtttcgaagttgaatggtcaagctcagagtcattcttcctccctgcatgcctgcaccagacactcccttcaagtgcgcgcaggaattcggagagcagtgggcccactgttattgtgctccatgtccagattggaagctgaggcacg

SEQ ID NO: 132210 - DNA, 527 bp, Homo Sapiens
cagtagatagctttcagaggtgctgggattgcaggtgtagccactgcatctggcctcagagagcataatctgtattccctagcagctgtttttactattgtttttcttatagtcttcaaagatgtattgggctttgaaaaccttttggctcctaggaagaagctatttctgcttggtggagtcctgtctgaaagtgaattctctgtttacactgccccattcatatcctgtcccatgaactacagctacagatcctctttgtaacactgctcagaatagaaagtttaattactctacccctaaaattttgcagattgcaagaggctataagctactggtatagcctagagatcaagggatcttgtgtggtgttatgacaactacttctatttatatgtgatgttcactttaaatatacacagacatatctgtacgttagttgaagggggtctcaaaaatctcatctgacctttaattagactccaataagaagtggttaagacattgacgtatgggccaggcgtctc

SEQ ID NO: 132211 - DNA, 832 bp, Homo Sapiens
catgcaagaacaagtttctattcccaaaccacccccatccccatcaatgctcagctctcttcctgcccccatgccttccctctgctcaacagagagctggaggcaggagggcgactcagtttgccagacatgctgctgcaggtccccagaccccagggaggctggcaaagggacacaaacactttgatgttgccactcctcctcaaggaatgctcctgccctcccaacacccccaagaaacacctaggccgtggacgcacagagcaaactgcttcatgttctaggggcctatctggagcttctgtccagggcctctgactgcagccctcaacggacatcagtcgggtagcaggcgacccagctccgcctcatccagccggttggtggccatgatgtgctccagctgctgccggtagcgtgccaagtcctgcatgaagtggggcacccgggtattatccagcaccccatggggccgcaggtggtccacatcctcataggacaccttgcccagtgaggtcagcaacgggaaatcgatggtctggcgatgtcgcagaatgcgcacgatgccgtccaggtacacctggtccttgctgaaacaacctggcagcgaggtgtcggtctggccgcgcttggcgcgcacgcagtactcccagcgcacatcggcgtcctgcacgtagcgctccaggtcctggaagagctgacggaaggacatgcgcgcggcgcggtggatggtgtagtagagcagtgcagcgcgccacaggaacggctgcttgcgggaacagcacgctcctcgtgccggagttcaacacccaggcctcgtacctagcgcgtt

SEQ ID NO: 132212 - DNA, 1334 bp, Homo Sapiens
  misc_feature (249)..(306): n is a, c, g, or t
  misc_feature (337)..(358): n is a, c, g, or t
  misc_feature (623)..(636): n is a, c, g, or t
gtaaatagagacaaggtctcgctatgttgcccaccggggtgaagtccctgccatgctacctctgaaagtcaaaggccgacgcttctatttcctcttggacaaaactggacacttccctaacacaaaactctttgacaatactgtgggtgcctaccggagcttgtgaagaaatgacctcaagtcactcacctctccaagaggaggataaaaactgaaccttggggagccaggtgtgttggttcacacctnnnnnnnnnnnnnnnnnnnnnnnnnnnnnnnnnnnnnnnnnnnnnnnnnnnnnnnnnngcaacatagcgagaccttggtcttatttacnnnnnnnnnnnnnnnnnnnnnncgccaatcttagaatggagtaacaaccagggtcacacaaggaggtcaagattcattaacaacaaataaaggagcagtcatccctagggcagctgcttaacagtacctctaagtttcagtccatgtctgcttagccttcactccttcctcctatctagttgtactttaacatcaaaaactcactactaagatgaagacagtaatataatattttggtacaaaaacagctgcaggaagaggtggaggggggcctgtcattatgtttnnnnnnnnnnnnnnaacgaaaggaaaactaagactcccaacataaacagggccttgaggggggggattacaggcacttgggcatggagtcttcggctgcaggaagcactccgcttattcttcaggaatgggaaaggcgtgacccaacgagagcatctgtctcagagctccactcagggtcacccctctccagaggccggtatggggtggcttcagacttccactgcacgacctggagcaccaagaccacacaccacaataccaaattcacccaagaagaggtttcagcattgtgtaggttggagtaaaactgcagagcagttccagggggtgtccatggaattttctgggcttcagaacagctaattgtagtgttcaaggagatgatggagttgcagagagacctggtgccaaatcgaaggatacaggcagacaccaagaccaggaagacggctatagctgagatggccagtgcaatgcgcagccctatagcacctctgtgggagtcctcgatgcagctgctgtagatccagaagagcaaaagcaggaggcagtagagggccaagaggccagaggccccagctacaaagtagcacagggatggtgctgagggacgggataaggccagggaggagccattcagggtggccacaccatacaggggacatctaccactgaaggagccctgggtccgagtcatcgccgcggccgca

SEQ ID NO: 132213 - DNA, 598 bp, Homo Sapiens
  misc_feature (104)..(125): n is a, c, g, or t
  misc_feature (156)..(213): n is a, c, g, or t
actgttaggcagctgccctagggatgactgctcctttatttgttgttaatgaatcttgacctccttgtgtgaccctggttgttactccattctaagattggcgnnnnnnnnnnnnnnnnnnnnnngtaaatagagacaaggtctcgctatgttgcnnnnnnnnnnnnnnnnnnnnnnnnnnnnnnnnnnnnnnnnnnnnnnnnnnnnnnnnnnaggtgtgaaccaacacacctggctccccaaggttcagtttttatcctcctcttggagaggtgagtgacttgaggtcatttcttcacaagctccggtaggcacccacagtattgtcaaagagttttgtgttagggaagtgtccagttttgtccaagaggaaatagaagcgtcggcctttgactttcagaggtagcatggcagggacttcaccccggtgggccatgcaagatacctgcttcaaaggaactgtgaaatgggcccccaagccaaagggggcatgagtggtgagggtcacctgctgccctccagctcgaagcaccactgagcgcacagaccggagagagaagagaagaccagcaccgagtacgagggctccgatggcgcc

SEQ ID NO: 132214 - DNA, 2623 bp, Homo Sapiens
gggttggtcatagagtttattgggagacacaggaaccagaaggggaaagtcccaggtgtccgtggggtgcatctccccttggtgtgaggtgtccaaaatgcagtaggtggcgctcaggcatcagtcccccataggcagccacagggccttggtccgcgccactcgcagccccagctctgggcctgccccctcggcctcctggtcccaggcccgcgggcagcccctgctcgcccacaccggtttgaggtttcctgccgaggcccactcgacaaactgggaaccctgggctgatccgaaataccacatggcctggacgtcttggtgcaaggccaggcagcgggtcagatggtcccggtctcctgtcaccacgttggccaggcctgctgggaacacggtggccatgtcctggcagacctccagggccagcagaggacaggccgcactgggcaccatgaccacagtgttgccgtaggccagggcgggagccagcagggacccgaaggcaagcaggggccacttgttcgggcccaccacagccagcacacccagcggctcccgcaggcgcagcacagggcctctcagcccggctacctgcagggtggtggccttgggcctgcacccggggccccccacgccccgaagtcgtcttgcgctcagctccacctccgcctccgcagccttgagctccgctccctgcctctccagcctcgaggccagggtagatttccggcggtccagtgcagccgccaggggcccacagcagggctgcccgggctcctggggactggcccgcccagccagggaaagcctgggtgagcggcctccacagcacctcggatgtccttggctccaccctcagccacgtagccatggaggttgccagacgaatcccggatgggcctggagcttcgggccccaggagcctggaaacggcccccaacgaagagcccataggggggtgctgggctgggccctatttcaggcccagccggcagggttgagggaacagcgaggccaaaggtgtcatagttcaggttcttggagaggcaggacagccgggcaggggtccctgagggccgcagatactcatacagcccgtctgggcccccgtgccaggaacacccactctccttgcagccgcctgtgggcaccgaagggtctctgaggccgtgggcgttgatccagacagtgcccacttggagcccatagcccagctcccagcgcctggccccagcctctcgcgtccacacactggcgctgcccaccgcggggcgtcccgttggccaccaacagtgcctccttggctgtgcggaagggggaggccacgaccacaggccacggcacctccacctgggcacatggggaggctggggcaaggttggagaccaaggttgggggatagaatgggcgttccgaaggcacatcaccagcctggaacacctgtgcaccctggctctgggcctcacgcacaaaagcgctggaccaggtcacatgcaggcagccccccgggcccccatgtccacggccccatccagccctcggccactccgaagccgccccatccgctcctgcagccgtctcatggcttcatcccacacagactcctggatgaggagcctgaggccacccgggccgcggtcggaccaggcggcgtccacgacaccctccacggccgagtctacgtccgccgtgtccgtcagcagcagcagcgactccgtccccagcgccaggcccagctccgcacactcacccgccaggctccgtcgaagggcacgcccttcctccggggctccgcagaaggccaccttccggattccaggctgggaggccaggatgggcaccagggacgcagggccactgacgacattcaggattcccgggaaggggcccagctcccccgccagctgggccaggaggaggggcgccggggaggccgggggcacgagggccaccacggtgcagcccacagccagggcagggcaaatcctccacatcatctcaaggaaggagaatgtgggtggcaggatgaggccaattactcccatgggctcccagcctgccagtgcctcctcctgggtggatgcctggattgcatggtagtggagcagctgctgggccagctggacgtccccgtctcgaacctctcgaacagcccgcccagtcaccagggattccagggtccacagcagccgctggtgcttctggatcacctcggccagcctggtcaggtgctgggcccggacgacgccggggtgcgcactccagcccttaaatgccatcctggctgcctccacggctgcagccacatcctcggcctgtgcctgcaggcaactggccaagttctctcctgtgatgggatcctggcaaggcactgaatttctgtgttcaggctttaaccacttcccattcacatagtggcccaagcaccggtcctgggtgtccagccaggccagtgcgcatgcgtggctctccggcaccggtccgtactccagcgaggtgaagatctcgcgggcgcggggccctgcacgcgtcgcagccatcgcctaccccgaacgctttccgcgaagactgcggggcgctctgtgttaaggggaaccttgaggtccgaagagcgacacctccg

SEQ ID NO: 132215 - DNA, 559 bp, Homo Sapiens
  misc_feature (21)..(21): n is a, c, g, or t
gggttccacctttggaactgngggtgtggtaggaggaggaacctcttctggtggttcaggaccctcttttgagggcagttgtggttccacagagtgggagccgcagccacacctggagtagaagtagattgggcaggaggggcctgtgctggctcttcaggttctttctctggtgttggggctgatgctggaggtggagctggaggtgcagggagttctttagggactgcaggtggtggagctggggtagaaggggcagcaggtggggcagcaggctctgctttgagccgcttgtcaggtgccccaaactcttcatcgagtcgcttgagcttctcagcacaggctgcccggcgctcttcttgcatgcgccgctcctcttcttctcgccgtcgccgggcccgctccactgccagggaaatctcagatgacgactgctttcgtcgctgccgccatgcctcatcctcatcttcaggtgctgggggcttgcagggaggacccccacgatctgggtagtccccaggggggccccagttcccggcggggccccggtgaggtgggg

SEQ ID NO: 132216 - DNA, 1054 bp, Homo Sapiens
  misc_feature (61)..(78): n is a, c, g, or t
  misc_feature (853)..(853): n is a, c, g, or t
  misc_feature (962)..(962): n is a, c, g, or t
  misc_feature (1010)..(1010): n is a, c, g, or t
gtgccaagctaaaattaaccctcaactaaagggaataagcttgcggccgcatacgcggtcnnnnnnnnnnnnnnnnnnaactctgaaaaacatttattcatccatttgaagactatacatccattacatgttaccttaaaaaaatttttaaacctatattttccaaaacaatatatttcatcagtaggagtggcatcgttttacatttttgcagatccttaaagcctggcttaacagaaggctgctgcatcctcatagctgcttccgccttcggtctgttgcagtatggtatcctgactgaagaaaaccacgtggggttgggaaaggaaggaccttgaggaccctcaggggtccttggaccacactgccgagggcatggtgtggcagccgactttaacccatacattctagaacagagagagccatgaccaaaccagagggagagacacctgcagatatcctgggttgcgggctggaagaagtattaacagttgatgaagcagcttggcattgcctctcttttctcctagggaagggataaaccactgtctttttgtgaggcatggttgtgttatgtcaggtgggagcctgatttctgaggtgcgcgcatgggaagatgggggtgcatcagatagccaaggaaagtggtgtagtggacttttgtcatctgaacacccttccttttgggaaaatcttttatcgagtgagttctggcagagtcctgccccctcctcctcgagacaaaggagccagatgctctctcctcgcatgttctgggagctacagaatgaacacatgcctgaggtttgcccaatcatatcctccctcctggtactaaccttagctcatgganacactgaggagtaccgcagagcagggtgcagctggagccccttttgtggtgtcagcgtcatggtggggtgtggagtgtgcactcagcaatgtcctgtgggcacctgctnggttcagcaacactccggatctgtgactgctggtcatcactttctgcngtgatgctgtccacagtcctctgatcaggctgcagcaggggaga

SEQ ID NO: 132217 - DNA, 1262 bp, Homo Sapiens
gtttcaacaagatttatttattagattaagtgaatatattaacattccatgggtaaaattacagaagacatggttaggaataaaatttcctcatctccttgatgtcttcgtccctcatattaagtccttaatttgcagagttagcaacattcttaattccttgtgcaataaattttcttgtggaaaatagttttacctgttagtctccacacgtatgtctgatctttgtgatacggtatcaggcatcccctgacctgttggtttgtcatcttttccattttatcttttcatctattttgcaaactcatcaagatgacttccactttccagcttctccattatgtacctaagggttgtccttaaatttttgtccaacctaaaaaataacaatcactaaatgatagaactctataataactaaacgatagaatgatagaaataatttccatcattcctgtcggagtgatagaaatctcctagcctactttgaagcaaatcaaaagcaactgtgaagttaatttaatgaaattattttctctttttgaggcccactgttgcaactttccttatctccaagctagtagaaaatgctgttgctttgtggtcgtttttttcaaaggacttagggagggatcattttctctaaccagctcatcaaattcacagaggtctacagaagtgaagtgacgtgcccaagagctcatggcaagtaaatagtgtcttagtctaaatacttccagaatgagtattcctagaccttgtacttatctcattgtcctatgctcaggcaaacgtttgcaaacagcagggaaaacaactgcagattgagacttgagggagaagggtgggagatggtccttagcagatccctgggcctggggatcacctgctccctgggatcaaaatagtgaaacaagctattcataagtacatcaaggacgagtaggccattgttttcagaaccagctgtggagaatctgctcgacagtggccttggaacagctgcggctgctgcaccaagaagggagggcaggagggcggagcggtactggtggaagggtgagctaggaggaaaggctgcaaggaccctgccacgccacctcccggcaaaccaggaagtatttttgcagtaagtgcattggactgagccacttttgaacctacccgaagtgttaacagcgcacagcaggccttagatgggtgcaataactgcaaactctcaacgggctggtgcctaagaggctacgggctggcagctaaat

SEQ ID NO: 132218 - DNA, 724 bp, Homo Sapiens
  misc_feature (244)..(244): n is a, c, g, or t
  misc_feature (255)..(255): n is a, c, g, or t
  misc_feature (397)..(521): n is a, c, g, or t
aacagaataaatggaattcttacattttaaaacattttcttaatataaaggataacaattcaaatcatattttacatttctacgtcttcatattgcactaaaattattttacatggaagaactagttgatgcatcataataccttagaaacattttttgatattcacatctatattaataaatatttcacagtctacttaaatattctactatagagcaaatcatctaacaaaaacaaatctantagtgttactnttttttttaagagcaaagatattcagtatttttatttctgcctctgggaaacacactgacattttaaaacacatgtaagtcactcatagtacctcataataacatttgagcaagacttagtcgttcattcatttattaagtnnnnnnnnnnnnnnnnnnnnnnnnnnnnnnnnnnnnnnnnnnnnnnnnnnnnnnnnnnnnnnnnnnnnnnnnnnnnnnnnnnnnnnnnnnnnnnnnnnnnnnnnnnnnnnnnnnnnnnnnnnnnntgtgtctctacatggctactttttaaatacaacattaattttatttaaaaaatgaaggaaagaagtgtttttcctattatccagtggagcataattgtgagaagagagataacaaaataaatgtcaatgctggctgtttcatagaacttaaaattcaattctcattattctattgcaatataacaaccctgtttattttaata

SEQ ID NO: 132219 - DNA, 873 bp, Homo Sapiens
aatccttcatccggaccctcatcatcacgtgtgtggccctggctgtggtcctgtcctcggtctccatttgtgatgggcactggctcctggctgaggaccgcctcttcgggctctggcacttctgcaccaccaccaaccagagtgtgccgatctgcttcagagacctgggccaggcccatgtgcccgggctggccgtgggcatgggcctggtacgcagcgtgggcgccttggccgtggtggccgccatttttggcctggagttcctcatggtgtcccagttgtgcgaggacaaacactcacagtgcaagtgggtcatgggttccatcctcctcctggtgtctttcgtcctctcctccggcgggctcctgggttttgtgatcctcctcaggaaccaagtcacactcatcggcttcaccctaatgttttggtgcgaattcactgcctccttcctcctcttcctgaacgccatcagcggccttcacatcaacagcatcacccatccctgggaatgaccgtggaaattttaggccccctccagggacatcagattccacaagaaaatatggtcaaaatgggacttttccagcatgtggcctctggtggggctgggttggacaagggccttgaaacggctgcctgtttgccgataacttgtgggtggtcagccagaaatggcccgggggcctctgcacctggtctgcagggccagaggccaggagggtgcctcagtgccaccaactgcacaggcttagccagatgttgattttagaggaagaaaaaaacattttaaaactccttcttgaattttcttccctggactggaatacagttggaagcacaggggtaactggtacctgagctagctgcacagcc

SEQ ID NO: 132220 - DNA, 1333 bp, Homo Sapiens
  misc_feature (473)..(550): n is a, c, g, or t
cccccttgtttgttctttccgcctgctgtagatatgtttgcgctcgttcgtttctctcctctcggttgcctgcagtctttcttctgctcggccgcgctgatggtggcgcgttggtttttgtctcccttcctagctcgttcgctgcctattgattttgtgtgttcccttcggccggcggtcggcttcattcctctgcttgctgtattgtgggtgtcgttctcctcctcgattgttgtctgtccccccccatacctgagggggggttgttcttctcgcagatgtgtttctcttgctgtgttgtgttgtcctgccccatgctgggttttgttaaacgcgcgtccctgcttctgctgttttttattattaccctctctgtttgctgggtcccctcttctgtaatatagtatctaggtgcggtattttgctcgttctgccccctctgcgtgtgtattttttgtggcgccgcccccccnnnnnnnnnnnnnnnnnnnnnnnnnnnnnnnnnnnnnnnnnnnnnnnnnnnnnnnnnnnnnnnnnnnnnnnnnnnnnncctgcaataagtagtcatttaattaaagaacaaaattaacaggaatcaaaatgttgcagctgtattttttgttagacattatataaaaaaggaaaagtataatacagtaaatcatcttgtataacatgaacttaaagagttttcaaattaattatgatcaggataaaaatgtcttttgaacataatactgaatgacactgtcacatgtccctcatgtcagaggcctgggagtggtgagcctgcacatgcacgttgcccgtcctccattacactgcagaactgtaaaacaaggttgaaaggcaaacaacagttttcttctgatagagttatgttgggtcttaactgaccccaacagttcacactcctcagacaccaaagaaggaaggaagtgtgtcctctggttactcctcttgcaggtaagtgtggtcaagattgcacctgtgtgtgtgatcctactcttctcacaaacacagcaggtagggtagtcttgagctgaacttcaggaaagttccctgatgaatgttcagtgttggtatcaaaaaattaaacacaaattcttctcagaagaaaatctctatggcctgtggaatcttgtcaagtgcttgcttgatgcatgtacctccatttcattacttttgtactcatttaattctttacgaattgctgccttatctgctgctgacagtctcgtccagggtttgtctgccctcctgtcatagtcctgcgcttttgctactttcacgtaatcactgaatcgtatcagaattttctgtctcttaatca

SEQ ID NO: 132221 - DNA, 1354 bp, Homo Sapiens
gcagagcactgagctttatttacaaacttccacagaatccctcaccctccaccccagggtcctccctctctggaactcaggcagcagacaagcttgggtccacccacctgcccaacctaggacagctgggcctgagctgggcgggcaggggattccatcgtcctgtggtgcgcctgccagaggggagaggctggaggcggcgggaatgctgttctcccccaggagtcagtcctcagggcttctgccgtgggacgtaggggccgagggacctggggcactgaccaggtcggggtcgggggcagcatctgcattggtgaggccgggtgaaaagggctgctggtgccggacagcttctggtgctgggcctcagcggagacagaggaccagaggtccaggttcctgggggctgagcttttctcagacttcggaggaaaaatgtcccagcccagcaggcagtgccggggcagggccagtgtgtcagaggcgtcaaagctctttcgccggtggatgtggtaccggtgcgggggctccaggatcgacagcgggatgctacaccctgacgtgcagctggctgcgccagggtcccagggccctgctggtctcgcggtgtcctgcacaggcgcgcagggggtaccgggatccacaggcaccgggaacaggcgccggttgacaacggtaaacagtacacggcctgcgaggcccatgagaagccacagctctccctgagccaggaacccaggtcccaggcttcacgtgctgcctcagcggccccaacacaccaggctgcaatcgctctgggaagcccttcaggccatttactactaaagccgttcctacccagaacctggggcccacggcctaaagggtgaggaagggacatccgtccctggggccccgtaggaagccagggactggacgtcccacccagcacaagggccacagccatatgaagggatgaggatggtgcccagacaggacagaccactaaatacggtggccaagcgctataaagacacaccaacccgctacagaagggggtttagagcaacccaggagcaacggaactgataggggcaccccaccacaaagaagttccaagaccgtcaagggaggccacacccaaaggggccccaaaacatcagacacagggagcatggcatcaaggagcccacggaaaggcacagagaagaacagcaaagagtggagaacacacgaagagcagacgcagaggacgcaacaacacgataactagagaggcgacaaccgacgctagcacgagagccacaccagcagtagcaagcaggagaggagacagagagggcggagacaaacaccatagcgacgcaccagcaag

SEQ ID NO: 132222 - DNA, 1003 bp, Homo Sapiens
ggtctcgcggtgtcctgcagcaggcagggggtaccgggatccacaggcaccggaaccaggcgccgttgacacggtaacagtacacgcattcatggtctttcctccacgccgctgccactgctctcacgcaggcctggcaactggggttcaggatggctgcagatacactcctccttgttggtttcccgaaactcctgcagcttggagaagaaggcctcaggctggctggtgatggaagagctggtgtccagagaccctgcaatccagtcatagcccaggtatggcctgaggcgccagctcctctcaggaactgcagactcctcagagaaggtcaccctgggcttggacagcttgctctgttgagccaggatggacctcggggtctgtgcctcctggggtcctggatcacccagcctccctgagggctctgggtccctcaggcttgaggtgcccagcgagggtgctgagtggggtctcggtcggcccagggactcctggtgctggcatttggcaggtgggagagaggccacccccgatctggccacatcacggaggtcccctcgacaggcatctggtgggccccacacggaggaccggccccgtgggcaggaggtgctcaaggaagttgaggacgtctctggggtcgatggagtctctgagttgtagctgctgctggattccaggcttgactccgaggctgccctggccactgaccgccgcacagcatcctgccccacccacagctgcctcaggagctccagattgagcagccgcagctgtgccagttcctcagcctccaccatcctgggcctctctcagcaggtgtcacttgcccctgggccgcaggatgtcctcagggctgggttccaggcccagctcttctacccggcagaatcccctagcatgcgccgccgtagcagccgcagccgcctgagccgttccaggggcctcggccggccgtcttcctcgtccgagaacgccacccaggcctcgctaccttgga

SEQ ID NO: 132223 - DNA, 828 bp, Homo Sapiens
  misc_feature (392)..(433): n is a, c, g, or t
  misc_feature (701)..(701): n is a, c, g, or t
  misc_feature (785)..(785): n is a, c, g, or t
ttttttgtttgctttgctgatatatttatttacatatttccccatttcagatgatggtgacaaaaagtagatggagaccccaccctatccaccccccaacaaattacagacacagatttcacttagcatatagaagcattggggcatgtccaaattcattccactgggttactacagccaggagagatttgatcttgggggcagtctgagcacctcaggcccagaaattgagctaaagagaggtcgccattctgggccttgccactggtgtgccagcagaggtgacagaagagaatcatggtgaactgagctgtctagccctatcatgtggtctagaaggtgacagtgggctcttggatagcttccagtgagatccacagtcccacagaaannnnnnnnnnnnnnnnnnnnnnnnnnnnnnnnnnnnnnnnnncctgccctaaagatgtcacaaggctatcatgaagctccaatcagacacaacttgtcaaaagtgctttgccaaagttccagtgccatacaaatttaagggaatttgattgattgattgtgatggttagagtgccccgggtataacagtggactggtttatgggtccaggggtcaagcaagtgatagaactccgacagtgtgccctgggtgggcaccaatcaatggcgagctatgcctgttgcaaagccgagtttccttagtttcttggncccaggaagtcaccaaggcctagtgcctgggtcagggctaggggaagtcactgggaaagttacagaaagagtcacaggggtcanagagaaggaagaggggtggcatataagcaggggagtagtacta

SEQ ID NO: 132224 - DNA, 1329 bp, Homo Sapiens
aaaaaatagcatattgcccaaggtaagtgactttattttacagttttcaaaattaagaacatttttgcttacttgaagtctatttgtattcattagtacatttcaacaatttggaaatgaaagatgtgaagatcatttgataaataaaacactgcatataaggctaattttttaaaaatgaggttattttgcaatgctaaattagcttttagaacttcataacacagatatacttgaccaccaattaatagaaaagtacccttttattgagaggtaagacaagtatatttacaatattcaattgttagataatataatctgacagtgggactttttaaagcagcagtatttcaggaattacaatttataaggggaaaagaaaaacattccaaatatgtttctgttacagaaaatacacttgaacaatgacagaaacacttaaggctatgtagtattagaccttttcctccatctctataaagtacatttttgttacagacagaaggctgattttggaaagaaagaaacaataggatgtatagtgctttctatcagcagactagtatgtttaaaaatagtctcatcaagggttctgaataagaaatataaatgttgccaggcagtcccaaactcacatttgatattaactgcagactcatttaaaactgaaaactgctccagcctctctcaatctttactaaggactgggagattatcaaaccctttcaagtctaataatgcttttgaattaagattattgaaaaaaggaatctctgttacagtgcaaagaacattttgatagaaattcatgtctacaaaggagttaaatacagatgtcccttacattagcagatactattcttgctctaaaaaggtagaattatcaagacattgtaaataatatgggtcaaaaatatgtgtaacagatttctacagggcaccttatattaagtcaatcctcaaagtatgtatttgacactctccaagtgaggatattacttttttgaagaacattagacacaacagtagcctcttattattccattaactattgaggtaggagtctccatttgtcaatatcatcccattttcacagatacatcgtaagtcaaatgcaagtaccaaaaatgtcttaatccttaagactaaaccatcacactatacaccaagtctttccttatttagatgagcaagattgggagttctctgtgtattaagagatttaactaaaaataaaataagctgtaatctatttttgtagacatgtttgtaaataaataccacagatttcaattatacttttatgcattaaaaagctttgcaactgtt

SEQ ID NO: 132225 - DNA, 1035 bp, Homo Sapiens
  misc_feature (127)..(135): n is a, c, g, or t
  misc_feature (782)..(782): n is a, c, g, or t
  misc_feature (798)..(798): n is a, c, g, or t
  misc_feature (814)..(815): n is a, c, g, or t
  misc_feature (904)..(904): n is a, c, g, or t
  misc_feature (953)..(953): n is a, c, g, or t
  misc_feature (959)..(959): n is a, c, g, or t
  misc_feature (970)..(970): n is a, c, g, or t
  misc_feature (986)..(986): n is a, c, g, or t
tttgatttatgaaaaataaatttattacataacaccttgtttttaacaatgttcaattattttttattcagaatacttgtgtcattcatgtaaaatagtttgatacagtacattgtatgttataggnnnnnnnnncctcaaaaattctaaggctctcctactccttctcctttgctgaagtaagggcaccctaaacaacgtgcgaacaagttttcaaaaggaaaattaactgaacgaaattttaatagcactacaccaaccagctttaaaatcaggacgaaaatatttgaattggatgccgcacctttttaaggaagttatcattcatgcttttttcatcttaaagcatgctcacaaatcagcaacaccaacaggaaaaataaaacactgtctatgacaatcattttagtttgtttgctgaaccaaacaggtttatatcaatgacaacatatttaattactatcaaatagcagctttaataccagtcaagtcatagattgaaaataaaaacaaacttataagttggaagttaatctttgggagttttgaaacctttctggaaaaactatgtggctttttgtactttcaaaaaaatccaagcaatattcttggtcagaaaacactgattaatgtagaaaatgaatcagcccactgataagacactaaaaagaaaggtgtaccaaaataatctcatttcgagtcttggttatttcgttaacatatactgtatgtttcaagtaccagttaaactttgtgtctgtgtgtgtactattggtcagatnatgttgttacactganaaatttcacacatacnnaagacaatgcttgcccctagcacatcacagctttcactgctacagactgtcactgaaaaaaatgcattggtcagtctgaaccatgtcangtaaactatggaagtagcaaatccacacaacaactgtgctagcatttcntttcangtcttactcanaataggtaaacttggnaggcactaccccatctgtgaaaagctcgtgccgaatcttgggctcgagg

SEQ ID NO: 132226 - DNA, 721 bp, Homo Sapiens
ttttgaattcagtcaagtttattaaacttgctgtgtgctcagcaccgccctaggcagtaacatgaaaaacattacaaaagaagatctcaacaagggaaaaatatattctgtactatattaatttccaatcatttacatgttgctttttaaagtgttcttaggtcactttggggtatgtggtctccttctttctccatgttcccctaaagcttccacactgttgaattatgtgcctgtggcgaccatcctccaggaagggcaccttcctgctgatgaggcaaccatgggttggtcagggctggggtcccgtggtggaggagacatgctgagagaaaaaccatcaaccccgagagctcaggacactcacagtgaatcccagaaggccaaacgtggggaagccacaaagagggctctgggcccctcactcaccccctcccctaggggatgtgcttaaagtgctaacgccgtaggaaaatgatgcatagctacaagccgtcctgggtgctactagactcatcgcctgcctcttcctccctaacttgtgctaatactgggcgatggcacaggccaatagaaaagtctagtgcccagtgaagtagtagagaaggtccaacgtgtaacctagaattcccaagaggaggtggggacagaagagaagaagtgaagggcagagacgtgtgcagcaaaaaggacgtttgtgcttggccggtacgctgggtca

SEQ ID NO: 132227 - DNA, 1007 bp, Homo Sapiens
  misc_feature (748)..(749): n is a, c, g, or t
  misc_feature (766)..(767): n is a, c, g, or t
  misc_feature (791)..(791): n is a, c, g, or t
  misc_feature (817)..(818): n is a, c, g, or t
  misc_feature (892)..(892): n is a, c, g, or t
ctgtgaaatttattgtttccacattaaaagaatttttttgagggaagtattttttgtaaccacatgatgatcctatacagctgcccagaggaggacaccatcagagtcattaacatgccgtatgcgttctgaataaataaaagctacaaagcccaagttatatacaaatatctcaggcaataatgtttacaaacctatgtacaataaaacaaatgtaaacagtaaatgcagcatgagagtaatcaaaggatgcacagggacagccgccgctgttcagtccaccccggagctggcaccggcccaccctggaaccagccactcacccttcctaacacaacgggacggcccttggaagagaaaacaaaaacactccaaagatgtcgttgaactgaaggacgggaaggctggcgagaggctgcccgcctccctcaccccgagtctgaggcgcacagaggaggagacagcacagaggctgggcctgtgtgtgccccgtcccagaggctcctgccacgtggggctcagacgggcattgtgctgctctgggaggcaagtccatggaatggtagctgcttaagtaaaatcagaaggtgcagaaaatgttccctaattcagtaaccttcctgactctttgccagaaacaggcccaaactgtgaggggtggagttgggggacacatgatcatgagcactggagatgcctgggtgggagctcaggagggacacattgactgatttgggggagactctannagatttgcatgtcctannacacactaatctatcatacagcanagtgggggcatgggcagtgtgataannggtactctgcatcagtgacaagtataacgtagtacacctgcgaccacaaatgcatcatgtgaaacacggactcngcgagaaagaaataccatatgattccgcaaatccgggcggggaggccataacgcatgatgaacgctctgccactgtgggcacggagggacggctgggcacacagggtaggtggtc

SEQ ID NO: 132228 - DNA, 618 bp, Homo Sapiens
  misc_feature (542)..(576): n is a, c, g, or t
catggttaagaatttcatttttattatactaaatgtcaggtcagaagtcaatggcatttacaagctggaagactgtttatccactcaactctttcaattatatcaaacactgattaaccaaatgtgactggacttaactgctacaactttatggtttctatcaagtatatgcaaatatcttaaatgggcacatatgcatatgtgcaaaacaaatgaaatatagatacttaaagaatgaacagaaatggcttgtaagcaaaaaccaccctgccattcaatttcgaaactctgtcttttcttcactaatttgtcttctgttattagtagtcttctattaaagttgtaggtttacagatgatctggaaatttcacattggtataagaaaggaatgtcgggttgatgcagtctctacaataagaagaaataccttgttctatgagcagctgccatactttcagacatgtttctgacttttagataattaacaaatcccggccgtaatggccgaattcccgggcatatgtccggtaccgtcgactgnnnnnnnnnnnnnnnnnnnnnnnnnnnnnnnnnnncggccgcttcctcgctcaaacgagctcgctgcgctcggtcgt

SEQ ID NO: 132229 - DNA, 512 bp, Homo Sapiens
  misc_feature (391)..(448): n is a, c, g, or t
  misc_feature (464)..(464): n is a, c, g, or t
  misc_feature (498)..(498): n is a, c, g, or t
aatatcacaatgtgtaatgccaccatttattacttctttactacattaaaaaagtgaccctgtttctagagaccaaacagcaccacagaggcattcttggaagagaattccttttgttcccaagcctttgtgactgactttaaatcctctcacctgcagaacagagatggcttcaaagtggggagtgagggagtgagcgaggaccctgggctgagacctgtttttcttccatttctgctgtggcttcccacagctccctggttccacaccaggccctgctctgccgcaggaaaatggattcccaggccacagagctgtcaggcctttgactttgcagagaccaagcaccccagaggctgtgcgacagcggctagtccctggtgggccggtnnnnnnnnnnnnnnnnnnnnnnnnnnnnnnnnnnnnnnnnnnnnnnnnnnnnnnnnnntcctggatactgacanaatggctcaggtctgagctctggctgcccactgnatgtgtggcttggc

SEQ ID NO: 132230 - DNA, 1021 bp, Homo Sapiens
  misc_feature (146)..(146): n is a, c, g, or t
  misc_feature (695)..(704): n is a, c, g, or t
aaggtagcgaggcctgggtggcgaattcggcacgaggcctcactgcccttcctccccagcccagcctgggaacacagatgccccgcgggtaggaggcctcgagggaggagccgggctgatgcggggctgctcagggcaggccccangggcgagcttgccatcgtggccaggcagcctccacctgtgcttcagtggcccctgcccccctgaagcatgtggggtttgtccgctaggaggaggcaaggcccccgaagagaggagagacctgggagtgggagctcaggtcagggaggaggcaggggagtggggtctcccagacccaacggtgagctcagagcaagcttcacgcaggacgctccgaaacactgtgtggagggggctgtgttgtgggcaccttggggcctgattctccttcctccgaacgggctccttgatggcctggccacaggggcagctccccattggctgttaggaccagagtgtgaagaagaagtgaaatataaatatgtatacatatataaatatatttttaattacatgtcgtgtcacggtggctccagacatactgtttgcctagtttattccactgcttgaaagcgcttcctagccaatctgaacaacaacactttaagctgtttttctaaatgcaggttgctgctcctttttcagatatggaaggaaaacgttaagactannnnnnnnnnaaagaaacaatagtcaagcctaaaatttgagaccccgaggcagcttcccgagggagactgctcagacaggaactgcaggacagaagtgggatgccccacagaccctggccccctccccaagtccatcccctctctgtggcatgaggaaggccgcgtccgagttgacctctgaatgtatgtgatgagaggcagagctggatattgcatttctaaggcttgcattgctttcccctcgtcccgcggttcttggcgcatggaagaggcggtcagccatctgatgtgatcctgtctcagtcttccccactgctgtcggatgc

SEQ ID NO: 132231 - DNA, 375 bp, Homo Sapiens
tgatttttaatggtttctgatttattttcttctcaaaaccaaagtgttccacatgaaaagttcttaaggaagctgggctttctgtcagcacacagatcaaacaagagccttgcattgcacaggctgacatggccaaggagtgggttcctccccagggggctgtgacagctatggtccaagcgtccaggtgcagccacacatgagagagataagagggatggggaccagatggagtaaaggccatagcctggaactgcttagacaaacccctgggcacatattccagggaggtcacattccactagatctgacaaagcttcctccaggcagccctggcttcttaaacaggaaggggaaaaggtcccagggaggaag

SEQ ID NO: 132232 - DNA, 583 bp, Homo Sapiens
tttttttctcatttaaaaatatttattgagcatgtgcgatgcaccaacacataatttatttggaagacgtctacacaactgtactatcccatgcagagtcccatcgcatacatcgccaccttagctcgcacgctgagccagggcagtgttccctacacgccactggcacagccctgtgcaatcctacgtcccacacgagtggatgagcgacggcagtaagggcaccactaacacaggaggtggggacagtcactgtcacagggtacacgggctgatatgcgtgcgtcctaggagtgtagacctagacctagcttaggaacatggagctccgacccagccacgggtcggcactgtgggcaccacgggtgaacacctggaaacacagcctacttctagagggcagacactgggcagcgggggtggccacggcagctcctgccgagcccaagcgtgtttgtctgtgaaggaccctgacgtcacctgccaggctagggaggggtcaatgtggagtgaatgttcaccgactttcgcaggagtgtgcagaagccaggtgcaacttggtttgcttgtgttcacctcgtgc

SEQ ID NO: 132233 - DNA, 733 bp, Homo Sapiens
aagaaataactttaatgtatttagaaacctcaaaaccgaaatctccctgccgggtcccctccctccggccggccccttctcagaacgtggggcactcctgggcactcagggcccttcttgtcccactcaggggtaggaagggcataggaggagacctcgcattgcccccaataatcgctattggtgcctcctgtgcccatcagtccaggtgagagttgtccccctgggtgcagatgggagagcgtggggcccagcagctgataggggcccagacacagccaacggcgatataggctgggctccctgaggagcacggtgtggacccccctcgacgcttgcctgggggtgcctctctggggacatgtgatcttccttccgtgaagtgtctggatgcccggcaccacagccacaggctctctgggaagccccagggaaccatgctgggtccttgagaccagctccccacgctctctagagccaggcacgaccacttgctgattggggacaggctgtgctgccgccggactggcctcgccagggctacacgtccgtctccacccgcagacgctccatcctgcggacattgcactccacggaccacacggctggtgatgaagcgggcacacgtcctcgagggaaccatcacgtctctccgtcccggagcctctcgccataagccacccatcgtcctgcagcagaacccggacacgtccgacctgctgcagtgtgacct

SEQ ID NO: 132234 - DNA, 526 bp, Homo Sapiens
  misc_feature (78)..(88): n is a, c, g, or t
  misc_feature (175)..(268): n is a, c, g, or t
gattaaatgaggtcagtaagattagttaaaaatagtcattccttgtgggtgttggacacagcttgaaaggagtgtttnnnnnnnnnnngctagggaggaaaagaacaagaaagatagacttcgagagtgataagagaaaaatacagggagatggaatggaaactaccaggaaggnnnnnnnnnnnnnnnnnnnnnnnnnnnnnnnnnnnnnnnnnnnnnnnnnnnnnnnnnnnnnnnnnnnnnnnnnnnnnnnnnnnnnnnnnnnnnntattttattatattagccaccatgcctgtcctattttcttatgttttaatatattttaatatattacatgtgcagtaattagattatcatgggtgaactttatgagtgagtatcttggtgatgactcctcctgaccagcccaggaccagctttcttgtcaccttgaggtcccctcgccccgtcacaccgttatgcattactctgtgtctactattatgtgtgcataatttataccgtaaatgtttactctttaaatag

SEQ ID NO: 132235 - DNA, 282 bp, Homo Sapiens
ccgattccagcttttattgggccgagcactcccctccaggggaggctgccgtcagaagggtggggacgcagcaccttggtcgccatcacccccatctgggccaccctgacccccgtctcacccaggcaaagggcctgttgctggcagactttggggtgggcaggggctcagtggggtgcccggcagccaagggacagtgcgagtgtctcggtggcatcaggggccccaagggtctgttgaagcaggaggagcctggttcgggagatgggggatgggatgggg

SEQ ID NO: 132236 - DNA, 473 bp, Homo Sapiens
  misc_feature (320)..(320): n is a, c, g, or t
aaaatgttttagatatgttgcttttattcaaaagaataaaatgcttgacaaactctttaatcacaaggtttgaaccaaaccaccagtcttctacaacaactctgtgaggtaggtatctgcatagccacaagggatccacatagtcctttcttcccttgtacctctcaaacactgagaattgtagtagttgaaaccactgttctagtgggcagttagaacagttgttttccccgtcttgttccccacagagctgcccaagttattatctgctcctggggttggaccatctgttttatgacagttatgatattgttgtttanaaaaaatccaaattgttactttgatttatatgatctaactctgaatcacggaagtattactatgatgttcaaaactctgattgactctacttgctttaaaaactctcagatcccttctgcatttatcatcagagatcggtaaagatgacaaca

SEQ ID NO: 132237 - DNA, 670 bp, Homo Sapiens
ggtttaatttaaagccacaaccacatacaacacaaagagaaaaagaaatgcaaaaatctctgcgtgcagggacaaagaggcctttaaccatggtgcttgttaatgctttctgaagctttaccagctgaaagttgggactctggagagcggaggagagagaggcagaagaaccctggcctgagaaggtttggtccagcctggtttagcctggatgttgctgtgcacggtggacccagacacgtcgcactgtggattatttcattttgtaacaaatgaacgatatgtagcagaaaggcacgtccactcacaagggacgctttgggagaatgtcagttcatgtatgttcagaagaaattctgtcatagaaagtgccagaaagtgtttaacttgtcaaaaaacaaaaaccccgcaacagaaaaatggagtttggaaaacaggacttaaaatgacattcagtatataaaatatgtacataatattgggtgactaactatcaaatagatggatttgtatcaataccaaatagcttctgttttgttttgctgaagggtaaattcacagcggtatgcaatttttaattttcattaagttgttatttcagttttaaatgtaccttcagaataagcttccccaccccagtttttgttgcttgaaaatattgttgtcccgg

SEQ ID NO: 132238 - DNA, 1179 bp, Homo Sapiens
gaatgaacaaaagagcttacatttattgagcatgcttgtgctaagccctgggctggcctttgtttcattggcacaacagccttgagaggttggtccattatcacccctcagttcaggtaagtggactgaggctgagagaggtgcacgggtttgtcagggtcacatagcacatgaggacagagccagaccaggagccctgtgacatcctcggccaggatgctaaccctaaggacagtgaggtcactcttcacaccgctgtgaagggagaggctattgctctgcacccacagctcagcaatggggaccatgaacgcctctagggcagcccatgtatggggccgctacctacctggtaactgtccacggctgtccatttggaagagatattgatgtgtttgttttctcctccccagcctgtgggctcctggagccaaggaccccacctaattcatcactaggcacaaaacagctgctcaataaatgtttactgaatgaatgaacgcatgaagaatcaatgaaggaggcggtgaaggaatgaatgagtcagtggagaacctgaattggttcctcaagccagccttccactgccctgcatgccctggcatcttggacatttctggcactaggctgctcctgccacctcactgccaggggtgatacagggctgccggcctctgcaagccggggaggcctacggctgtgccgaggcagggaacagtgtgctgtactcctcctggaagcttaggtccttgaatctccgcacggccagggctgcggtcaggctccaggtgaagatggagaaaaaggagaaggcgatggcggcccgggctgcgtccgtcccttcgttcagtgggttgtccttgggcttggagacctgccactggttggccaggtagcagaatcccacgaaccagaggaaagcccagaaggccgagacaccgatgtcggacaggacggctttcttgcggtccttgacgctgctgatctgcgggaagtacacgtccagggccaggtacagcaggcaggtgaggaaggcgagcacgcccacggccacgccatagctgcaggcgttggggttgcggttgtagatgcagaactcctccccctcggaggcgctgttgaggtagccctcgttcacgatggagccgaacaccactatggagaacagccaagacaccc

SEQ ID NO: 132239 - DNA, 845 bp, Homo Sapiens
  misc_feature (700)..(710): n is a, c, g, or t
  misc_feature (732)..(789): n is a, c, g, or t
caagttttgtctgtttatttaaaaacagaatatcattttatgtacaaatatgcacatatttacataaaatgtacatgttaggatcttagatcttcaggctccacattcgaagtcctaggctggctggggaacgaaggatgggagcctctcccttaggccagaaatccagcagatttcagactaagaagagtttgggtactaaatctaggtattctggctgagtgtatctgggtgggccagctaaaaataaacctcattgaactccagccccaacccagagaaacatccagaagagccttggattagtgatccaaaacccagggggaaaggcgacattctcacccccagcacctccttcacctcacctcaactcctactctctcggtctataatcactgctctctctctccccaaaccccactattgaacaggagcccttgtcaccaggtccaagcaattccctaaggtatcacaaacaatggtggatgcaattttaccttactcagtaaccacgaggctcacatccctaatttcagactctaccagctctcaggtgccctcccaaggggctgcctgcatgaagatgccttggaagtagcccctttcacaatcacaggaattaaccccctggtgttggaggggcctcactttaagcaatcccagtagtaaacattggataaatctaaaggctttctttaannnnnnnnnnnctcttcgtaaaggattcaaagnnnnnnnnnnnnnnnnnnnnnnnnnnnnnnnnnnnnnnnnnnnnnnnnnnnnnnnnnntgcttgagcccaggagttcaaggccagcctgagcaacatagtgagactccatctct

SEQ ID NO: 132240 - DNA, 518 bp, Homo Sapiens
  misc_feature (478)..(478): n is a, c, g, or t
  misc_feature (502)..(502): n is a, c, g, or t
ttaacaagtctagtttcttttattgcagaaaattctttacatctaatatatattccatggctacaaattccaacccgtttcccccatgattccattagagatgtcttctattttccaaacatcaccaatgagaggcataagacagtgcattaatagttcatctggagattccctagtggtggttaacaagatttcatcacagtaaaaaactgtgataacaggatccaagagaagttgccgaaaagtttaagaaggaactcaagtgatgtccaactttgcaaaccgtgtccaatgacaaaagaaagaaaatccaatttggttcctggaacactttacattgtaattcatttcggcctcatgagactatggaaattggtaagcctgctactgtgaagagaatggtatgcaattaaacatgcatgttactgctttttgttttggaagacatgctgccaatgtttctattggatgtgttcanaaatgactggagagatcaatacanagccaacaatgtttac

SEQ ID NO: 132241 - DNA, 1280 bp, Homo Sapiens
  misc_feature (375)..(384): n is a, c, g, or t
  misc_feature (418)..(440): n is a, c, g, or t
  misc_feature (824)..(840): n is a, c, g, or t
  misc_feature (858)..(1088): n is a, c, g, or t
  misc_feature (1143)..(1143): n is a, c, g, or t
ttaaagctgcttcctcaactgtttccagctgccaatgtttaagagaataacagcccccactcccacaggaaccgctgtaattaaatcagacagtaggaagactgggctgctgccctcaaagccacagcccttggatgttccttttccgagagcagaaggtctaggctacagggagggggagattggctcccgtgagtcaggctgtgtttggggcttgggccctgggattgggaaaaggggatggggcagactttgtaagcatatgctaggtatccgatagtcctgtagaatttagtgaagaaaccttatacagtttttaatttttatataaactataactcagacccaagctacaaggttggaattttggttggnnnnnnnnnnaagtaccctgcctgtataattgcctcaagatatnnnnnnnnnnnnnnnnnnnnnnngtgtttgtattttgggttggtttacactcgcacatactcagttttcagttttcccctttacagtcttctcccctcacctccaggaccctccccctttttaaaaaataaatcgctgacaagtgtgaatcccgtgaagactttattttgtgttgtgtgtatcctgtacagcaaggttggtccttcgtaacaacggatgaaatggttcccttttttaaagcgccctctctccctccaccctcagcgcccctgtccttggcatgttttgtatcagcgatcattctgaactgtacatatttatgttgcgagaggcaaagggcaagttttggattttgcttcttccaagtttgtttttaaacgacaaataaaaaaagaacattttaaatnnnnnnnnnnnnnnnnncctcgtgccgaattcttnnnnnnnnnnnnnnnnnnnnnnnnnnnnnnnnnnnnnnnnnnnnnnnnnnnnnnnnnnnnnnnnnnnnnnnnnnnnnnnnnnnnnnnnnnnnnnnnnnnnnnnnnnnnnnnnnnnnnnnnnnnnnnnnnnnnnnnnnnnnnnnnnnnnnnnnnnnnnnnnnnnnnnnnnnnnnnnnnnnnnnnnnnnnnnnnnnnnnnnnnnnnnnnnnnnnnnnnnnnnnnnnnnnnnnnacggcggggagagcggttgcgtatggggctctccgctcctcgctcatgatcgctncgccggtcgtcggctgcggagcgtacagtcatcaaagcggtataggtatcaagatcagggatacgcagaagaatgtagaaaggcagcaagggcagacgtaaaagcggtgctgggtttcatagtccgccctgacacaa

SEQ ID NO: 132242 - DNA, 720 bp, Homo Sapiens
  misc_feature (658)..(658): n is a, c, g, or t
ttcagacttcacaatctttatttaatctccagtatgtagggcacatttgtgctaaacagagtgtggtagggtacaaggtttcaaatagggcacattagtgctaaacagagtgtgggagggtacgtggtttcaagtagggcacattagtgctaaacagagtgtgggagggtacaaggtttcaaatataaaagcataaatgaataactttcacctctttccacaacccttttttcatccttcctttttgccatcagctgtgctctctgttgggtgatgcaggagctggcattcccccagaatggaaatgggcaaaataagaaggcagtggaggaccaaatatcggaggaggagcaaaaggaagaggcatagtgagaaagggattgaaaatcggaggtcgaggagggatgaaacaatgaacagtagagcaagaaggtaaacctggagtactggaagacaacgggataggccttggccaattatgcatggggtggcatgggccccagagtgggaaagaaacatgagccagctttcctctgcaggctattcgtgtatttccgggcggcacctccattactatccctgatctaagggtgggaatatgtgaagggcctctcacttgtgggcccctgggtggaaagaacctttaccttgtggcaanctacatgcaccttgcgttattactgctctctcagtgccccattgttgactttgtgcccctac

SEQ ID NO: 132243 - DNA, 974 bp, Homo Sapiens
  misc_feature (413)..(441): n is a, c, g, or t
  misc_feature (681)..(681): n is a, c, g, or t
  misc_feature (723)..(723): n is a, c, g, or t
  misc_feature (783)..(783): n is a, c, g, or t
  misc_feature (867)..(867): n is a, c, g, or t
gaagtttttaaaaattatatttaatacaagtgaatagattagaagatctgaaatgttataaagcaatatacacaacgaataaataatttgcacaggagagtcatgtctacattacataacactgtctagtatgggaatacttaaagtaaatccagtgataatggagaaagtccataaaaatgctaacctgtcttcccttgtatgaaattgttcaagtataaaaatccaatacagtgtaaaatagtattcaatttagtttaagaataaaaattgcaagtattgcagtttcagaagaaaaatgtaaagcagcatttaaaaactacataatagtgttaaactaatgaattaccaataaatgaaatctacacaggcaaaatcagaggaggaagcatgaaactagcaatatatcgttnnnnnnnnnnnnnnnnnnnnnnnnnnnnntgtgttaatgtaagagtactctcttatacagtgcacatatgaatttaaataaatccaagtcaacatctttagttgaataggttaatatttaatacgctacatctagacttactaaataatttatgccatgagatgaatacataattttacagtgtcacatctaaagttcctttctttagagtgcagcatagtaaaacttaaaaataaatatcttaaatagcattactattaaggcacagntataaccacattatcattaaccttttgagaatttgtatctcnagtaccttgttgtctcatgtactgtagtcactaataaatagttttaaatatgactctganatagatactaaagtgtaaaatacttataaagggaaaaaaataatgttcttagacagttctgcaactttgcttgctttatcatangcacgagtcgaacaatctcgtgccgattcttggccccgaggccaattcctataggagtctattaaatcgtatcagtcacactgtttctgtgtgaattgtaccgccca

SEQ ID NO: 132244 - DNA, 727 bp, Homo Sapiens
  misc_feature (60)..(74): n is a, c, g, or t
ttgaagttaaaattttatttatggctggagtggcataaaagatttgttttccatgcttcnnnnnnnnnnnnnnngttttcagggcttctctccctccctatgcatcctacccttctgtttcctgttcttaactttatctgtacctatgggagtcatcaatggggagtgtcacagggcttggcaagaaatgtcacattgaagataagtggcctcaaactgaaaccaagcagggctgtttgtttccaaagagaaccctccactgtagggccgctcatgcaccgccacagaagcctctgccgggtcacagtcagagaagctccccgggcaccggcagcacactcagcacagctgtttcatgtgggtgaacctgagaaggtttaaagtgttgcaggcccttttcaagttttgcctccctcactctctgcaaactcccttaatgtgggccatggaagagaattttaagagacaataacagaaagactggatattaccccagagaataaagacttgcaaagcctggaacttataatgtttgaaacctggtctttcgaacttgagctatcccggttgtcagtcccacagtggccgtgcacaatgttggcctggactgaaaagggcctctggctcctccgatttcagttcttagcaatatcagacctgtgtttctttggaacagaagttactaaaacaagctaattccaaggaagcccttttgatccagggggtc

SEQ ID NO: 132245 - DNA, 1027 bp, Homo Sapiens
  misc_feature (950)..(951): n is a, c, g, or t
cagctcggtaccggggaaacttgggaagggagtctcagattaagaaaactggagaaatgggcatgtcagtaggatgaggatgcctagtggcaggtgcaggatgtctgtgactttgtcgtgtgtgggagaaatgacctttctcaggatgtgggaatataataggctgtactcctgatgaccttgaccatcctaatcacacttgtgtgatgccagggccccaggttccacccaagttttactttatagctattcccaagtttccctattaatcaagaaaattaatgaataaggaataaggtgatcattcttcaggttatgggttgaaatagacacagaaatcaactcagctgaatatagcatgtggaatcagtcctccagaaggcagctttctctctttctgggggtgtataataagacataacttggccggttgtgggagtcctcatcagccgtgacagaccaagtcctcacccatggccaggaatgaggcacaggcttttggatgtgcgtgtatgagcaaacgtacacagaaaccgccacacccacacctcacataccatgacagggtggagtatttgttgtccttatgttaaccttgtcaccgttttcagaaattctgggctttgatggtgctgcgtccatcaggacacagtccagaaattctcagcagccttaaaaggcacctttccagcaacattcccttcatctgcccctcacatctgggcatcctggactccaagcagttcacaaccataagtaagatttacttcctaaggggaagcaggagtcatgtctggccatgtctcacctccaagcttgtatttgcaagcccacaccacccacccataataccctctttcggcatttgctcaagctgcacaacttggtcacggaatttgaggggagaggtgttctggttaatgatgagttaccatatagctatcttccannagataaattaaaagccacagcaataactattagtttgaacaatatttaatctctgatgcttcagaaggcactttga

SEQ ID NO: 132246 - DNA, 1251 bp, Homo Sapiens
  misc_feature (42)..(63): n is a, c, g, or t
  misc_feature (169)..(212): n is a, c, g, or t
  misc_feature (813)..(813): n is a, c, g, or t
ccctcaactaaagggaataagcttgcggccgcctgctcaggnnnnnnnnnnnnnnnnnnnnnncatcttattgcctttattctgctgtcggcccagctggccccattgtagggcacagggccaagcttttacacgctcacccatgctctctgtgcaggccagtgcgtgnnnnnnnnnnnnnnnnnnnnnnnnnnnnnnnnnnnnnnnnnnnntcccatctctggctctgagagtcagtctctggggggcaaagggcaactcctcagcctgcccctgcctgcccttttatgacagcaccaagggcgggggtggggacagggccctcagcccccagaacaaatccctgtgcaaactggaggtgcaagctggcttcaggatggtggtgtcacatttccccattcctggagtcccctcctccagttcctgagggagggactgctctccgcctacctggggggccagacccctgccagggctgggccctgtggaaccccggcttaccccagcctgaccctgccaggacctccagcactgaagaacagacaagtgtgaggttgtggggatcccctgctggagagcaggaaggtctgggccctgaggggcttggggaggggtcatcaccccctctcctaatccatcttcaatatgaagaggtttggggcgcacttcctggggagggaaacaggcctggagaagtccagcttgggcctttcccaacttccagcttctgggccacagcctaaggccaggcatccaaaagtccaagagtccgaaagtccagccggctgcttggcatccctgcacggtcctcangggtccccgtgggagccagtgtcagacctgcacaggcagcgtctggttcatctgcagccgcatgtcctggatactgctcaggatcttcttctggtgggcggccagggtgaccccaatacggagcaggtcttctgccgtcatctgggccaccaggtcaaaggatgcaaaccccgcactgacgaagctctccttgtaccgccccatcttgatggcatccagccaatcaccaactgtcgtgaaggttgtgtaatctgggactgtgcggtccaggaggggctgtgacatgccagactgagcgctggcaatgaccttgaggctggcagcattgcggatgagcttgtccagggtattgacaatctgggagaatttgggcctgaggttccggtcccgcacccagcagtccagcatgagctggtgcagtgctgtgggacagtccat

SEQ ID NO: 132247 - DNA, 689 bp, Homo Sapiens
  misc_feature (184)..(192): n is a, c, g, or t
taaattttaaaaaatagtttattttttaaaaccattaaggcaaaactgtaccctgaaattaactctgtacattcatcagtcttacagtaggacatcccaaacacagaagttcccatatattcaggatataaatcaatacatgtggtcagttcagtctcctaataggaaaacgaagacccaagannnnnnnnnaaaattaaggttattttatagccattttctaattgcctggaaccaatcagttcatgtgactagaaaaattactttcgctcttctctgcacatccttgattccggaggtcctggatgcccgctccccccaccaggagagaggtatgaagttggagagaggatgctggggcctgtgtggcagttcctactttggaactgcacctttttagcacaaataagaagctgtaagccccaaaatactgagagtataaggcactcactagtagagcacatgtggagagtctgggcccagtccttgctctgggatctgcctcattctcgcgtgtgtttctgtcaaccctctctcttagggttttagcctaatggcattatgaatcccagagggtgtaaccaatatgcaccaagaagttttgccaagttattggaaacaaggtatggggagactcacggggtctgtggtttctgctttctgctttgggttgggccactggaggatgc

SEQ ID NO: 132248 - DNA, 516 bp, Homo Sapiens
ttttcatggtaaagactgctttattggtggcagttactacaagtcaataaatattgatccccaaagaagagctcggttatttatcagattactggtccatagagagctgaatgaaactgaaccaagcgattgctgggatgactgaagtcactcctgcttcttgggaaatgaagccacagccagctcatatatggcatatgctgttccaccaactgtaagaatcatggtggctctatacaggagggcatcagctaccccaccctttagatacagtggaatttcatcatcctcctggaacagtttttgcttctccggaactttatttttaaaatgcctgcgggaagcagtgcttatcgtcctctgcccaatctgacgaagagccagcagattccgcagcatcttggctgttactgaccagcaaccgccacaactgaacaccaccaacgaaaatggccacgccggaccccccggccgtaatggccgaattcccgggcatatgtccggtaccgtcgactg

SEQ ID NO: 132249 - DNA, 875 bp, Homo Sapiens
  misc_feature (48)..(60): n is a, c, g, or t
  misc_feature (69)..(139): n is a, c, g, or t
  misc_feature (144)..(144): n is a, c, g, or t
  misc_feature (153)..(153): n is a, c, g, or t
  misc_feature (155)..(175): n is a, c, g, or t
  misc_feature (178)..(328): n is a, c, g, or t
gtgggaagacccaacccccctttctttgtcccgggtttcttttagagnnnnnnnnnnnnncaattttcnnnnnnnnnnnnnnnnnnnnnnnnnnnnnnnnnnnnnnnnnnnnnnnnnnnnnnnnnnnnnnnnnnnnnnncgcgnccttttttntnnnnnnnnnnnnnnnnnnnnnttnnnnnnnnnnnnnnnnnnnnnnnnnnnnnnnnnnnnnnnnnnnnnnnnnnnnnnnnnnnnnnnnnnnnnnnnnnnnnnnnnnnnnnnnnnnnnnnnnnnnnnnnnnnnnnnnnnnnnnnnnnnnnnnnnnnnnnnnnnnnnnnnnnnnnnntttcatggtaaagactgctttattggtggcagttactacaagtcaataaatattgatccccaaagaagagctcggttatttatcagattactggtccatagagagctgaatgaaactgaaccaagcgattgctgggatgactgaagtcactcctgcttcttgggaaatgaagccacagccagctcatatatggcatatgctgttccaccaactgtaagaatcatggtggctctatacaggagggcatcagctaccccaccctttagatacagtggaatttcatcatcctcctggaacagtttttgcttctccggaactttatttttaaaatgcctgcgggaagcagtgcttatcgtcctctgcccaatctgacgaagagccagcagattccgcagcatcttggctgttactgaccagcaaccgccacaactgaacggacgcgtgggtcgacgatatcccgggaattccggacgcgtaccagcctgctttttgtacaactgttctatattcactatgactcggtggtcggtggggggtgttggggtgc

SEQ ID NO: 132250 - DNA, 669 bp, Homo Sapiens
  misc_feature (449)..(449): n is a, c, g, or t
attgggggagggaaattccaaaagcccccttatttcaagggccccagggattttttctttagggaaaaccaggttatgggccccatgtttccaatttccctttttgggggccccggggggcccaaaaagaatggttttaggaaaagtttttttgagggggccgagggcggggccgacaaagatatattagtgttgtgggaaggtcggggtttccatggtaaagactgctttattggggtgggccagttactacaagtcaataaatattgatccccaaaagaagagctcgggtttatttatcagattactggtccattagagagctgaatgaaactgaaccaagcgattgctgggattgactgaagtcactcctgcttcttgggaaatgaagccacagccagctcatatatggcatatgcttgttccacccaactgtaagaatcatggtnggtggctctatacaggagggcatcagctaccccaccctttagatacagtggaatttcatcatcctcctggaacagtttttgcttctccggaactttatttttaaaatgcctgcgggaagcagtgcttatcgtcctctgcccaatctgacgaagagccagcagattccgcagcatcttggctgttactgaccagcaaccgccacaactgaacaccaccccc

SEQ ID NO: 132251 - DNA, 750 bp, Homo Sapiens
  misc_feature (719)..(719): n is a, c, g, or t
ttttcagggtcctgtcttttttattatccagacacacgtatcagagcctgctaacatccagttgtgggaagagcagcaagcagtacaccaggagccacaggaagagaataaaatacatcatatccggctgctggacaagctgtgtcagggagtcactctgcgggctgtggctccccagtgacatggcttctcctgagctgttggccttcctggttaatattcggtttcttctgtcatccagatctgctgcgttcctcaactgaacatagctaaaatgatcctacagtgaaatttataaacaaaagcccccgcaacccaattagtaaagatgaaatctctgaaacagaagataaaacgattttaaacacacaaagccgagcatgccgggcatttctcaataccgccagcgtctagatccaaaatcaaagtgctaaacaatatacattcctctacctcctcccctaagcccctcccttgtgagtgcgagagaccccaccacccggaacccggattggggtgtgctgctccgggttctaacacatctgctactgagcacgtgccactgtccatcggaccttgactcatgttgcacctctgtctctgaacgtgatccttctgggtgcgcgcggggtccaggtgaggcgttttgggtgcgtttttatagcaaggaggcctttgggctttaaatcctcactttatttacatctcttattgcccanaccggatatccgatcggactgtgcttaatga

SEQ ID NO: 132252 - DNA, 904 bp, Homo Sapiens
  misc_feature (444)..(459): n is a, c, g, or t
cagggtcctgtcttttttattatccagacacacgtatcagagcctgctaacatccagttgtgggaagagcagcaagcagtacaccaggagccacaggaagagaataaaatacatcatatccggctgctggacaagctgtgtcagggagtcactctgcgggctgtggctccccagtgacatggcttctcctgagctgttggccttcctggttaatattcggtttcttctgtcatccagatctgctgcgttcctcaactgaacatagctaaaatgatccgattccgaagacctatgagtatgtcgtcgaaggtaaatgctggagtcactgtgactagtcctggaaggaatgctgtagtcgctactgtcttcttctaggtcatctgaggattgaacacttcctggtgctacaaatagtgaactttctacgtggtccacatgtttccnnnnnnnnnnnnnnnnactactgattgattctttcgttacattttcttctagggggtttgctatgttttccaggtttggggattcctgggactgatggctgtccatggggtcattctctttggtctccctttgctggtggtcctcatggggggccagtggagcgggttctgaggctggtgtggtacccacaccacccctgctgagatacagcacctggtcgctggcactggggaggctctctcctggcaccgaggaactggagctgctctgagagccatcggcctcctcctccctggagtccaggtctggaatatagccctctggctcttcgagatccatttcttcattttttagatcctccgggtcttctacataagcctccaaaactgcagccaggggaacctcatagtgtgggaaatagaagaggtcgtggggaatgacggaacctttgagaggggtg

SEQ ID NO: 132253 - DNA, 542 bp, Homo Sapiens
tttgccttgattcaaacaagtataattctcaagttatcacaaaatttcccacaaaaatttacaatcagcaaaatagtttccttatttctcatgtatcattttcatataattccatggtttcactaatattatatgttacaataagcctccattagtccctcaaaacgatgatataaataagtctgtacaacctagcatagaataaaaaactgaaaccaagattcccaacgtttttcatagcagccgggcacactttggtgaccccaacgagaaccctctcggcagcagccaggagctgttcaccttccagaagcagggcctgtggcagcctaacagggagaggccacggggcccaaaaacgcaacacgtctcaaggcaaacccgagggaggaacttggtctgggaggaagagagaactcgctcctcaaccaccccagacactggagtgtcaggaaagcactgagctgttggggcacactgcccagcccggccacagcagctcagccagtcacagctccacctccaacttctacagcagcaat

SEQ ID NO: 132254 - DNA, 668 bp, Homo Sapiens
  misc_feature (57)..(113): n is a, c, g, or t
aggagatatttaaccttttattgtcctttagagcacatctcaatttggactaaccannnnnnnnnnnnnnnnnnnnnnnnnnnnnnnnnnnnnnnnnnnnnnnnnnnnnnnnnttctagaactctctcttacaaatgaacactatcactgtcgttgaaaactttcttgagatagtttattttatacaaacaaactgtatttcttattattcctgaaatatctcatattggcatcctgccatttcattgtagtgcctatcatttttccattgatactgataaagttgcctaagacacaacttcctacatagaggaaataagaggaacaaaccccttttggacagaatctattaaaactcattccactatccctatgtacataaataacattgcctctgctgagtggaatttgcattcgttacttcaaaattcagactcatctacctttccaagttagacagttggggaaagaacttcctaaatcttaaggttgaaggcagagggctcaaccccactccagattcaggcaaggggaataggaaagaaagtgcgagataagagcatggtggcctcttggggtcccttgatgggggctgttgggaagtggaaggcattcttttaaggggataagaagcaaatggaagacttgctccaactctagagttttca

SEQ ID NO: 132255 - DNA, 691 bp, Homo Sapiens
  misc_feature (676)..(676): n is a, c, g, or t
aacaatgcacaggcaggctttattctttctctctgcgtgtctgcaggatgccagtctatgaggaccaaaagctcattccctgggaaagggagtcagctctaaatgggttttcttcacctctgattattctctcctgtaacggaacccttggagagcctctattttcaagttatttagaaaatgagacctcttacttaaaaaaagtcatgtggtattaaatgtcttcttgtcctcagaatattaggttagtcatacttcccctcagttctccaagccaagaagctcttatttgaacctatccttaaaaaagtgtttacaatagcagcccgtgacctgttgcagcatctcagccccttcctattgtttcctctcaactctgaacctcagtcccaccttgcggcgcactggaaccaccgtcctcacgtcatgtatgaagacagtgagcagctctggactgtctgttacctgccacctctgctgtggcttcaggatggtgatggagttccatcccggccacatcctctttaggatggaaaatcccagctcctctgcttgttgaaccagaagactctgattacctggaacaagccgtgtctccaagggtggtgtcggggctcctggcaagtggagatgagggcttctgaaagatggcgctggtattttccatgctgcctgnaaggtctgcatggta

SEQ ID NO: 132256 - DNA, 731 bp, Homo Sapiens
ttttcccataatgaaaatagctttatttgatttttcttattttaacgataatacatacaaattttaagcaatacaaaatggtattaaaaattaaaggtaatgcaaacttccatctctagaggtgaccatagttattaacaattcaatcaacatccttcccatatataaagttttatataaatgtgaatatcatgcaattctataacctgcttttttcactaaaaaatatgagttttccttgtcaatgaatatagctatatatcatcttcaatggctgtaaaatattcaacggtgtaactgtaccataattcatttaatcccctcctgatggacatttcaattggcttcagtttttgcaactgtaaacagtgctatgacgggcatttctggttagtcatcttcaaggatttggtttctagaagtgcctatgaggatcctcagtgaatgttctgacacacaggcaaatgcttcacatctccttacacttatattcccatctagggcattggaaaatgcctgcttcagacaggtgtaattctgagaatgaagatggggaagggagaaagggtgcttaaggtaccaagcccagcattaacccagcctcctcgggccacacagaagtgagaagtagcacatttgcaatcagtttccatgaggtgtcggcgctgttgggaaggactgggagataagagggaaaggtgagctgggtcctttcacagacagtatgaacg

SEQ ID NO: 132257 - DNA, 961 bp, Homo Sapiens
  misc_feature (307)..(315): n is a, c, g, or t
  misc_feature (383)..(393): n is a, c, g, or t
gttcagatttattaaaaatcaacaatcctaccttcccaggatatacaggacatataagctactaagaaggtatgtcttactaactcatggtaagactaacacttaatattttctaaataattttctatgaataatggaaaagagatgcaagaaacaagccacacacatcatatacaagattcatttttaatggatttgatcgtcgggtgcaaatttgagcattatttacaagagctttctgtagagttatttctgttcaaataaaaccagactctcaaaatacaacataagcctgaacctacttgannnnnnnnnctccctctagttaccaaggaatatcgtatctcagatgcatggcctactatcacactggtctttaaagnnnnnnnnnnntgcatggccacagttccaggtagctggatttagtggatttatatatgacagtacagtacatcatcagtttcacccacagggcagaacttgcctccattcaggcatctctttacaactggcagcaatgcagcattaagggtttttagccaggacctgctgtttgcagtcctgccccttgtagtgttactctgggtgttgcacactccatgattactagaagacaaacacctgaggcatgcaatctgcttggagtgcatctatttacatgaagctgctcacgggagctggtgattcttccagatatgggtttcgtaggttggcaaagagttatcacaccatcagagattttaccaatggaaagagagtagctgaagattatattgcaatgttattgtgaaacatttaactttcttaagtttaaagtgtactatctcctgcagctcaatataaacaacgatgtatttctttgtagcagtatgtggagtcagaatgggttttccaatctgatttaatccctgagcagctatgttaaaagttaactttttaaaaaagcccaataaaaaactcc

SEQ ID NO: 132258 - DNA, 720 bp, Homo Sapiens
ttttttttcagtgtccataaataaagttttattggaatacagccacgttcgttcatgtatgtgttgtctatggctgcttttgcactacaatggcagaattgggtggttgcaacatattttatggcccccagccctaaaatatttactgtttggccctttacagacaagcttgctgacccttgctctaagtcaattcgtgacgatttttccaactgctgacatttataaaatggcagtcccctgggcttcattcatcagtaaattggttggtggcaactagccctgtgccattttgcttctcctcagcatggatctcacatgtgtgaaggcttcagttcagaaatcatcaatttccagtttaagtctgatgaaaataattatattttttccaccatgttcactctttaacttcttgcttaaagatcttcacctgggttaaacatgctgcccttagtcactgtcggtaatccattgtgtcactggaggacaagccacccacaggtttctcctccttggtttggatactttctgaggtcaagagctgagaaggtgatgtaagtcctcggggctgtttagttgacttggtgagcttcttgagttcacttgcgaaagaaatgcctttctttttatcttctcgagatgcctgcactgctcctttagcttaaggatgaattttcctgcacctttccacttgctttgggcttgaacacacactcctga

SEQ ID NO: 132259 - DNA, 858 bp, Homo Sapiens
cttttggtggcaaagcatagtcgctattcagacacatttttaatagggaaactagatgtacttggcttaaaagcaaccagatgctgaaactggacagagggcaagaactctgtcacttgtcaccatgcctaacaatgcaatggagaaaaccagtaactaagcacaaaaatagcctggagctcccaggaagagctgcctactccgagacaggtgtgcatggtgggtgccccctgctgatggtgtgaggtcagatccaggtcactgagggagatgggagacctgaaacagggggtgaggggacgcagcttccagaggagggctgctggagcgtgccagagtccggaggcctcactccaggtcggcctccacctgctccgtgtcagagcactgcaacttgttacgctcccattggcaaatggcgttggcgtactccaccaccagcttatccatccatgtcaggggctcggggaacagcacagagccctcaaagaagcccaagtggcccccatgcagaggcagcacaaacatgacgttctctcgtttctctgaaagagattttggaatggttagaagactttcatgcaccaacggatcgtcagctgcattaaccagcatgagaggaacataaatcctgtgcaggtaccgcatgcaactttctttctcatagtattccttcagggagttatagccgtgaaacttcctcatcacattgtcatcaatctgcatcaagggatgtgctgtgtagagccggcttcaagtcgtgtctttccaggctctggggtttcttaacatgtcttcaaaaagaagctgcctgtgcgaagagatgatctcttcatgttgtcaaccattaggaatgtt

SEQ ID NO: 132260 - DNA, 843 bp, Homo Sapiens
tgttatgtggcaaaacaaagacatttatttttcacagcagtactagaataataatgatgtatttcaacattctaaggtttagagttctcttaaacaggagtgggctgctttgagatactgagctcccgggcactgaaagtattcaagcagaagctggacgccatgggccaggctttcttttattaaaaccgagatgctactcttcctcttctcaaagtgcctacagaacagctgagacctacttacccagctcgtttgtcactattagtttcatgactataaatttcatacagctttactgagggataacctatgtactgtacaatttacccattgtaagtgaacaatttgatggttcctagtaaatctatacagttctgcaaccatgactacagtccagttgcagaaactttgtgattatagattttttccccaaagaacattgttagcatcaagggtagatccaggtcccatgggccgtggtctccgctgacctaacagcaggcctctgtgctgtggctctttcctcacatcctctcctcattccttcttgggagtcacctgatgctggcctgccaacatgttgcttggccttcctgggccctgggcacctcgcccctccccgagttgtccccgctgggcacctttgcttccttccctccttctttgccatggcttgggggcaggggcttggtcttcagcagattccaaggcagtagggtgtacttagaagtatgtgagccctgataacccagacctgtatttggctcacagccatgtggcctccagcaagtcaccttattttttgttatttctgttttgttttgagacagggtctcaaaa

SEQ ID NO: 132261 - DNA, 639 bp, Homo Sapiens
cacagtgacaatggaaatgtttattgctggtggttgggtctgtcatttcctagaggacatagctggccagcagattttcatttcttttttacaaaataaacaaatgcctactttattatttatacacagaaaattatatagaaacaccacacaaactgcttgaaatacaaatattctttggtttacttatcaaagtaaaaaataacaaaaatcttatcagttaaataaaaaagtgacattctttatcaagccttcttaaacactgaaacgcacgcatttttatgctcatgttctttagcagtatttctccccttttgcccctcattcccctaaattgtttcaatgagttcatctgtagaatgaagattgttacctttcttaatgctacttactttttattatctcaatatcaagaccaatctagacttttttgtctcttacatgtgaaatggatgtaaaaaatggaaaattcaccagcactttttaagataacataaaagaagccctaagcaagcatttcaaggcaatgacacaccattacatttctgagaaatttaagtatcattggtacttaaaaggagaactcaattccagaagcatattcttatactggacattattcataatagctaatatagt

SEQ ID NO: 132262 - DNA, 1955 bp, Homo Sapiens
  misc_feature (183)..(226): n is a, c, g, or t
  misc_feature (666)..(676): n is a, c, g, or t
gacaatggaaatgtttattgctggtggttgggtctgtcatttcctagaggacatagctggccagcagattttcatttcttttttacaaaataaacaaatgcctactttattatttatacacagaaaattatatagaaacaccacacaaactgcttgaaatacaaatattctttggtttacttnnnnnnnnnnnnnnnnnnnnnnnnnnnnnnnnnnnnnnnnnnnngtgacattctttatcaagccttcttaaacactgaaacgcacgcatttttatgctcatgttctttagcagtatttctccccttttgcccctcattcccctaaattgtttcaatgagttcatctgtagaatgaagattgttacctttcttaatgctacttactttttattatctcaatatcaagaccaatctagacttttttgtctcttacatgtgaaatggatgtaaaaaatggaaaattcaccagcactttttaagataacataaaagaagccctaagcaagcatttcaaggcaatgacacaccattacatttctgagaaatttaagtatcattggtacttaaaaggagaactcaattccagaagcatattcttatactggacattattcataatagctaatatagttcatttccacagtactgatttcagataagccannnnnnnnnnncctgagggttgactacctcagacttaaatcctgaatgtcgatgactcaatcttaacaaaacagtcagctgtagacatgaaaattgaattgtttcaaaaggagcaatgatagcaagagaaagttcttggcattttaagaaaagtacatatacatagcaagaaatgaaagtaaatcaaaatacatagctttgtacatgttagaaatatccaatgtgccaccaacacaacaactgccctattaaaaagtcctcaggtctggagacatctgtatttttctttgtataactacatttgcattacccaaccacatatctctcccatggtctgttacccgttaggaagcttttaaccagaatttttggcaatatgcttttcttcaaataaaacaagccttcaaataaatcattatgtctgacaactgaattgggtaaagtctttctgaaatatgtgtaatctttagaaaattcttcttttttccttcataaatcagcagtgctccatcttcaaataaatcatgatcagtcacaatcttaactcatgtgctcatatgttctcttcatccaacattttgttgataccatcacatagtttttgtaagtggggtttaaaattcccaaaaggattatacaaggcagccaaaaattcacaatctgaaaaatgatcaaacacattattaacccgtccatgtgacttggcagtgaggtggcgctgaatgatttggtgcagcatctctctgcattcatttaacagcctggataacacattccggtcaaaggtataatccacctgatggaaactgaccacggtcatagcaagctgatgaactttcttcttaaatttctccatcaatgctagctcatcttgattaaactgattattcctataaagaatggccagcttgatgactgtcttgatgaggttcttgatgatcttctctgcctccttcttgttttgggtgtactccctggtcactctgtagagctcatccagcacctcactacttgtgtcgtctattaaggtggtggcgatggatttggacaccattttacccaagatcttcttttgtgcctgaacggccaggtttttggaattaaagacatctgtggccatcggaggagtggcgcgacggcgccgggacgctgaagcgcgagctgggctgtttggcggcgccgagttctctgctctctcggtggctcacgggttcccgcggaccttagccaagcgcgggttagagccggcgggagaaaaggaggcagaggccaggggcggaacttgcagga

SEQ ID NO: 132263 - DNA, 1187 bp, Homo Sapiens
  misc_feature (79)..(113): n is a, c, g, or t
gggatgatagtcactataggggtagctcggttcgcagcgaacgacgagcgcagcgagtagtgagcgaggaagcggccgnnnnnnnnnnnnnnnnnnnnnnnnnnnnnnnnnnncagtcgacggtaccggacatatgcccgggaattcggccattacggccggggactcttgcagaactttccccctgaaaatccctgcaccagaacccgctctcgcgccccggggaggttttgattttagtggctttcttccttttattttccgtcgtgtgcggatttcgctgcagagcgaacttgcggctcgtccgagtacatgtgagcggtaatcgcccctgcagctggttatcctgacattatgcactccgaagcagaagaatccaaggaagtggccacagatgtctttaattccaaaaacctggccgttcaggcacaaaagaagatcttgggtaaaatggtgtccaaatccatcgccaccaccttaatagacgacacaagtagtgaggtgctggatgagctctacagagtgaccagggagtacacccaaaacaagaaggaggcagagaagatcatcaagaacctcatcaagacagtcatcaagctggccattctttataggaataatcagtttaatcaagatgagctagcattgatggagaaatttaagaagaaagttcatcagcttgctatgaccgtggtcagtttccatcaggtggattatacctttgaccggaatgtgttatccaggctgttaaatgaatgcagagagatgctgcaccaaatcattcagcgccacctcactgccaagtcacatggacgggttaataatgtctttgatcatttttcagatgtgtgaatttttggttgctttgtataatcctttttgggaattttaaacccaacttacaaaaactatgtgatggtatcaacaaaatgttggatgaagagaacatatgagcacatgaagttaagaatgtgactggatcatgaatgtatttgaagattggagcactggtgattgactgaagggaccacagaagcaattttcctcaagaatacacatatttccgaacagaactttacccaaagtcatggcagacataatgattcttggacaggcggttaatggagaaagctattgccaaaatctgggtaaaacttcctaagggtaacactggggagaatgtggga

SEQ ID NO: 132264 - DNA, 490 bp, Homo Sapiens
ctgggaaactttttttctcttttattgccaagtttaaatttacaaggaagttccagttttcatttccaccctcgtgttcagtacccacgaagcatgagtcatgctggcgaaagcaggtacttccctagagcggtcccgaggctcagaggcatcgaggttttctaaccctcggttctcactgggacaaaaattatttacatatttttagctcaaggaaacataaggaactcgtacagtgtaggcccaatgtcaagatgactacattaaatgcttcagatttatttattgcatctagacaagaagatcaaaatcagttcaccccacgcctttttaaaaaacggtgcatctcagagaccttagaggaatctagcgcgtctggcagggctgcgcttcttcacctgccccttaggttgcttgtgaacgcaagtgtctgggttgtgggaggctgccaaggctccgggagagggactgggctgggacagcggcagag

SEQ ID NO: 132265 - DNA, 820 bp, Homo Sapiens
attttgaaaaaccattgcctttttattgtctccttttaacatcaaatgttttataacacacttgatccttttgtttctaccccctattcattacagtcaaattaacaggcaatataataggtctaacagaatgcttgcatttcattagggaaaaatgaacgtctctctcctgaaacaggttgtcggtaccttgaatgacataatattggtgtatagactaggttcagcagagggattttttccacatcttgaatgaaaatgttaaacatgtgatgcacagagtattaacctgtttcaaaaaagtatagataaataatttattaaaaaatatatataccttgtatatttaagccatatttgagaacaggctaggataggattatttaaaaaaagatatttactagagttagaaattacaacctactgattaaataatgcaggtttggtcctgtaagattttaaccacttttcatgcttttagagcttctgagcagttggagagagagttcaggaggtattcttggcattcagtgcttggcaggccctcaggagccgctccagcccttttgaaagggctctgcatcagggttcaagtccgcagcatagaagagcaggagcttcaacaagtgcactttgtcttggagttgggggacaagaggctcccccagcatctggatcaggcggctgcggaaggcctcaatctgcttctctacgtctaccactgtgatgtcatctccttgctggggtttgggcttaatccttttgattattaagtcctttcggtcgatcacggaactccttaagtgttctcttaaaacat

SEQ ID NO: 132266 - DNA, 527 bp, Homo Sapiens
  misc_feature (418)..(474): n is a, c, g, or t
acgtacaactcaggaactgagcgaggctcacactgccccttccaacctggggttgggggacacagacgcgagagagccggagacccccacccccgatttggaaaggaaagagacctgtatcttggtgtttttctggctttttcaccctttcgcctcctgtctttttgcttcgccccttcatcttactctgtttccatttttcccggcacttacctgcctttctctttgcacctaagtccctgccgccctctctctttggccatccttcctttcccccaccttgacccagggaggagaagggagaacatcacccccccaagtcacccccacatcttttcccttcttgtatattaaggacaaaataccacatcattttgtaactttttttctatttattgaacggtgtattacatgtccnnnnnnnnnnnnnnnnnnnnnnnnnnnnnnnnnnnnnnnnnnnnnnnnnnnnnnnnnagactggggtgcatctccagagccactcacaccctcaacctcgtttcctccgc

SEQ ID NO: 132267 - DNA, 733 bp, Homo Sapiens
gaatttgttaccagaaaatgggattttattttctactgcatggccaggctgtaaattttccaaaattttacactctgcttctcatttaaacataagttccaatttcagatcatctctttgtgaatgcatttgactgtatgcttcagaaaaagtcaaatcatatcttgaatgctttggtgcttagaaatttcttttaccagataccctaaataatttctctcaagttcaacattccacagatccccagggcaggagcacaatgctgccagtctctttgctaaagcatagcaagagtgatctttgctccagttccctgtaagttcctgatctccatctgagaccacctcagcctggacttcgttgttcatatcactatcagcattttggtcaaaaccattcaacaagtctctaggaagtttcaaactttcccacatcttcctgtcttcttctgagccctccaaactgttctagcctcttcctgtttgccagttccaatgtcgcttccacattttcagtttatctttatagcagtacccaactctgctggtaccaattctctgtattagtctgttatcacactgctatgaagatactacctaggactgggtaatttataaagaaaaatggtttaattgactcatagttcctcatggttggagaggcaccaggaaatttacatcatggtggaaggtgaaggggaagcaaggcacatgttacatggtggcaggagaga

SEQ ID NO: 132268 - DNA, 810 bp, Homo Sapiens
ggtgaggagaaaaaaaatctggaaccaaaagggatggcggctgtttcctcggggacctggtgggtgtgggccaccgagcagccaatcaccggaggttatagaccaggctgacggtgaggatgatgcccaggagaaggatgaagggcaagccaggtcttcaccgataggtctcctacgctgaacggtacttcccgtagagcaggccagaagaagcagagccgtcgaccatattcccagttggtgctgtttgttgtagcgcatcagatgtcagggccaatgccaccgtgcgagtggcagttgtcacagcagagattgtgcatgcggtgcttgtactcctcagaggcgtcgtgcacagccgtgtcccatgcgttgggcccgctagcatagacctgagcagggtccaaccttccagtaccttggcaggctttccaataggccatgttgtcctccttctgaaggtccagagatgtggttcctggatggtctgactctccactcttgcctctaatccctacccatgtctcggtaccccaggggtgggggcaaagggctgggtcagttacattaagaatccttctggccacactgccactcccggcactgtctgagacaaagtaggggcccagcgaagtccacgaatgactcctgtggatgtgcagatgacccatgtggccgatgatggggaaaaaccacgtcgagcaccgggatgggcgtccacaccacgcagtaggggaagcgactccgttccacatccatggcgacgccgccggagccttgatattgcttcatgtccgtctcgccgccgtcgcg

SEQ ID NO: 132269 - DNA, 983 bp, Homo Sapiens
  misc_feature (160)..(160): n is a, c, g, or t
ggggaggagggaccagggtgcttctgagaggcagggagacaacaacgccccacttcatgcatggtcctcagtccgtccatcctgccagccccgacccccggtccacgacagcaggcccaaccctgccttttgggatgaggagaaaaaaatctggaaccanaagggatgacggctgtttcctcgggaccctggtggttagggccaaccgagcagccatcaccggaggtttaagatccaggctgtcggtgaggatgatgcccaggagaaggatgaagggcagccagttcttcaacgaaggccccaacgctatgctggctcacgagtctgggctctgctgtgtccatgctgtggcgaccatgggcgactcactcaatctctctgcctaggaagggacctgacgtacttcccgtagagcaggcagaagaagcagagcgtcaccatattccagttggtgctgttgttgtagcgcatcagattcagggccaatgccacgtgcgagtggcagttgtcacagcagagattgtgcattcggtgcttgtactcctcagaggcgtcgtgcacagccgtgtcccatgcgttgggcccgctagcatagacctgagcagggtccaacttccagtacttggcaggctttccaaaggccatgttgtcctccttctgaaggtccagagatgtggttcctggatggtctgactctccactcttgcctctaatccctacccatgtctcggtaccccaggggtgggggcaaagggctgggtcagttacttaagaatccttctggccacactgccctcccggcctgtctgagacaaagtaggggcccgcgaagtcccgaatgactcctgtggatgtgcagatgcccatgtggccgatgatggggaaaaaccacgtgagcaccgggatgggcgtccacaccacgcagtaggggaagcgactccgttccacatccatggcgacgccgccggagccttgatattgct

SEQ ID NO: 132270 - DNA, 1676 bp, Homo Sapiens
  misc_feature (67)..(98): n is a, c, g, or t
cggccagtgccatgctaaaattaaccctcactaaacgggaataagcttgcggccgcatacgcggtcnnnnnnnnnnnnnnnnnnnnnnnnnnnnnnnntggagtcaaaactctttattgtcctgcccagggagcccttcccaaaggaatccacagagcaggggggcgaggcgggcggcacagggccttggtgacaacgtgaagggggagctggagttaggtgggggacagccccttcagctccctgatggcactggctgtgctggcaggccacccaggggagccatcaccagcatgaggtccacacctggggctggggctgagtgctgtctacactgctctgtctacacggttactctggcacttgtcaggtccactcacctctctggcctcaaactgcagggggagatgggtccaatgctgggaggcactgggaggccgtggaacagtgaagagcggactgcacgggctggaggatgccagatgggcacacatgtcccccagggcagctgccggcaggagtctgacaaagggacccagccagcccctctggaccattctagaggccagtggtgaaggtcctgaagcaacttggcttatagagacacgttaagtgtacccggtgcaccccatgctgggaccagctctggtcccagggccaccttgacaggtgagcccaaatgtcctcctctccccatactgggcactgggctgaggcaggaccccagcaggtggtggcgggagcagctctacagcgggaagccaaagcctttcaacagaagaacaaaggggcttccagggccggagtccacaggcctggggaggaggggacagggtgcttctgagaggcagggagacaacaaacccccacttcatgctggtcctcagtccttccatcctgccagccccgacccccggtccacaacagcaggcccaaccctgccttttggggtgaggagaaaaaaatctggaaccaaaagggatggcggctgtttcctcgggaccctggtgggtgtggggccaccgagcagccatcaccggaggttaaagaccaggctgacggtgaggatgatgcccaggagaaggatgaagggcagccaggtcttcacgaaggccccaacgctgacgtacttcccgtagagcaggcagaagaagcagagcgtcaccatattccagttggtgctgttgttgtagcgcatcagattcagggccaatgccacgtgcgagtggcagttgtcacagcagagattgtgcatgcggtgcttgtactcctcagaggcgtcgtgcacagccgtgtcccatgcgttgggcccgctagcatagacctgagcagggtccaacttccagtacttggcaggctttccaaaggccatgttgtcctctgagacaaagtaggggcccgcgaagtcccgaatgactcctgtggatgtgcagatgcccatgtggccgatgatggggaaaaaccacgtgagcaccgggatgggcgtccacaccacgcagtaggggaagcgactccgttccacatccatggcgacgccgccggagccttgatattgcttcatgtccgtctcggccgccgtcggcgcctccacttccgccatcctggatcccgggaattccggaccggtaccatcgattgtgatgcttcgttgtctattatagggcggtggaggagaa

SEQ ID NO: 132271 - DNA, 893 bp, Homo Sapiens
tgaagcaatgaaagcacaaatttattgaaatgaaagtacacttcacaaagtgggagtaggctccagcaagcagctcaagagcactggttacagaattttctggggtttacatacccgctagaggtttcccattggttacttggttacaccctatgtaaacgaaggagtagcccatggccagtctgattggttgtgggaggggaccaatctgaggtactttccattttttatctgcaatgcagtgcaaagggagtagcctctgatccttttgttacttgggtgtggagaggtggggttttccttttcattcaatcctagaaactcagcacaaatcagctttaggttccctgtctccagaccctattctcctgcctcattttcccctgagagatgtgatccccataaatctttctgggaggcagagggacccatggtctttcttccataactacttcatgctgacttggggcacagtccctacctactggggattacagaactctcaccctgctctgtctagtggagacaaggttacttcttggtggccggggttgacatcattatctgaaactgactggtggccctgctgcattatcataatggtctctaggcaagaagaaataaatctggttaaaagatttaacaaacatgatccaaaagccaaggcaagtataataattaatagtggactggccagaggaaggagatgtgagccccaaattagcattttgactaggcgccccatgactcagacagctgttgtcatatcttatggtaccaatcggctagtttttgggtggcatcccttactaatcctgtttggttgacataaaaacagcattcttcctctaggaaaaagacataagccaccttcttcagcatttaggagatcc

SEQ ID NO: 132272 - DNA, 153 bp, Homo Sapiens
ttttttagttaaatacgcacaattttattgattgaagattaggacaaaaacattaaaccaaatacaggacaaagcaccagaggccatagatccccaccatgcatgtcaccaacctctcctcctccaaggtacttaaaaaataggggagagggg

SEQ ID NO: 132273 - DNA, 516 bp, Homo Sapiens
  misc_feature (498)..(498): n is a, c, g, or t
ctcggctctaccttctctcctttctatcttccattagcaaaatagaatcaagggcaaatccatggccgccttgtctcctggttacgaagggtgaagccgccctcctgggaacgtgaggacagggctcctgctgcgcaggcataaagcatccaagagtctgcacatacatgccacacactattatgaagcacagattcaagtaacatttacatactagagtccacgtgtcacctacccaaaaacaggaccatttcacaaaacatatacaggcagtcaaatccgaacaagtgaggtactgggaacacaaatatttatgccaaaagagttctgtatcatacagcaatagaaaagccgtaataaaaaacattttgccactcgaaatcaaataaagctatctagaaaagccaagtaaaaggttatttcagagacagaaatactcaaacaaggaaaaagaattataaatgtactacagcatgtaatatgtcatcccagtcagancagtagagccgaggtccg

SEQ ID NO: 132274 - DNA, 1077 bp, Homo Sapiens
gcggccgccaacgtaccacttgccatcctcccagggacacatggtcaaggtcctgctcaaccggatctgctggagaagccaccaccaccctgagccccctgcccctcctgatggctctgaccccaggatcgagtccagggacctccctgaaaggcctcagtgccgcccccaccggaagacctttatgccatcattagtggttaagaagcaacgagcaaaaaacctttctgtaggctgagacctctcggtgcacctggtgaccctgggtggaggggacttgctgtgaagtcttcctcgccctctgccctcttgctgcttctccacattgccaggaaaagctgctgacgcctgccctcctctcttgagtcgagggctgaatctttctcctctaagcagtctggtcaggaaccttggtttcttgagaggcccccaagatgccgcagctccagggctcttcctcctcaccagaaatccctgggcttccacaatgtgaactcactcattgtcaggtgtccgtggagtgtttttggcatggtgacctgtctgggcccagcatgttgcagatgtgtatttatgcgcaatggtatgcatatctctgtgtgactgtcagtgttgcaagctggctggatccaaccatctcttctgaaataatgcatccaaagggttgatattctgggggaggtcactgcagaaggatggaactgacctttattccccagtgggcagttactgagctttcctcctcagagccatgctggcagccctgggacagagaacggtgtggctttggctgcctctgcatggaatcttgccccggactcctgaagactgcacaaggaatgaggaagatcagggacaacctgggaactgaataactttcaaagccagtgctcagcttctctgctccgtactagcgtttacaggtcttaattcaaaccagatgcctgtactagtttttagaccccaagtcaacctttctgagccacagcttcccgctgggaataatgatgcctgccctatctacctcacagacttgttatgaggataaagtgagattaaactgcctcaaagtgcaaa

SEQ ID NO: 132275 - DNA, 775 bp, Homo Sapiens
acccccaaaaaaattttcgttggggggcccacccacaggggggttgggttccccccatttttctaagggtgggttttttcgtggccccaaccaattaacctggcttaacccaaaaggatggctttccaccttctgggcttaccacctggatggtgaaacctttgaaacttttagcaggaaggagctccagcttctaagaggaaccaatgaggctccctacattccctttttttcctccaaagaataagtaagtctaagcagaaaaaaaatatgcaaagaattttcagtatgaatgaaataagacaaaccatcaggcttgctgtattgtaaaccaacacaatatagttataacagatctgtagaaggatccttagaataagagagtcatttgtcgggggtcatcagggagaatactgatagtatcttcggctttgccgcataacagacacagcatggtatactcctgaaattcatccatgatactgaatgtatactcatgtctggctattacatgatgacaattcttacacaaatgatcataggtaactatttcttctccatcttcttctttcaaggatttgtttgtgatcagcataaaatcccgcttactgcacactgcacagcctgtaaagttcagtaagaaagatccattctccaggcaggtattaccccggttgggatattccttctccacacagtcgccacacatcgcgacgcagtcaacagggaatgtcctccaacgcttccgggaagacgaaacctcgcgagaactccc

SEQ ID NO: 132276 - DNA, 1011 bp, Homo Sapiens
  misc_feature (101)..(101): n is a, c, g, or t
  misc_feature (119)..(327): n is a, c, g, or t
  misc_feature (426)..(426): n is a, c, g, or t
ccgttaccgcttgggtactgatccgtccggcacgaacgacgagcccaggattcatgagcgagagcgagagcgcccatacgcaacccctctcccgcgcgtgncgattcataatgcagctnnnnnnnnnnnnnnnnnnnnnnnnnnnnnnnnnnnnnnnnnnnnnnnnnnnnnnnnnnnnnnnnnnnnnnnnnnnnnnnnnnnnnnnnnnnnnnnnnnnnnnnnnnnnnnnnnnnnnnnnnnnnnnnnnnnnnnnnnnnnnnnnnnnnnnnnnnnnnnnnnnnnnnnnnnnnnnnnnnnnnnnnnnnnnnnnnnnnnnnnnnnnnnnnnaagaattcggcacgaggtgaccctgcaccacttggtggtgagatcaagggttgcttggactgcagcacctgggccgagatcacagtgatggcatctgtntgaatgtgctggtgaccgtggcttttcggagcccagggatccaggatgaacccccaaaagttcggggtgagaacttctcttggtggaaggtgatggaggaagacctgcaaagccagctcctccagcggcttcagggatcctctgttgtcccagtgaacagatagagaggtggaggaggtgacagggagctaggcagccgtgctccctccagtgcggacttgtctccctctgagggaggcaagaggctggcgatcagggatcttgttgtattgggagcaggggcggctctcctggtccccaggagagatgctttgaggagcattcctctagattgcacaagggacagtgcctttaaccaagcgaggagtccaaagctcaggacctgactaccctgagggcacgctgacgcctctccccagggggatggggagctttctgcacccccagtggcatctcctcatcacgttctgtgccgtccttgggaaaggcctgcattctgatccttccaggcccttcgagcatggaggggcactggggaaggtcccccgagggaggagcacgttgctgagtaaagaggtgttactc

SEQ ID NO: 132277 - DNA, 645 bp, Homo Sapiens
cctggctccgaaaagccacggtcaccagcacattcaaacagatgccatcactgtgatctcggcccaggtgctgcagtccaagcaaccccttgatctccaccaccaagtggtgcagggtcagacactcctgcagcagccgcaggacggccatcttcatgccacccctctgctccacagggtcgaggccacaggcagtgacaggcaagtgaggcatccccactgtgcccactaacacccacactgtctgggcgctggtaaaggtagccacgagccgctggcagaccagatcacagggtagctcttggggcagaatgagagggtgcctggcttgctggcgatactgggcggctagttcaaccaggtgcaggatgtcatgggctcgcagcggagtgggcagggaggtccgtgggtaccaggcagcctgcagggactccgcatcggcctccttggaagtcttgagaattccacctgtggggcgagcgaggaacacgaagcggacccaggaggggccccgctcctccacggacagcagtgtctcgggctcacagtgcagccccgcctcctccttcacctcccgctgcagcgcctccacgatggtctcccctggctccattctccccgcaggcaggtaccacgacccccggc

SEQ ID NO: 132278 - DNA, 579 bp, Homo Sapiens
  misc_feature (378)..(386): n is a, c, g, or t
cctgtgttagagttacatgaatctggctctaaagtatctattttgcatccatttatatatagatcttaaacagaaatactctaggttgccacaccacagttttaagaagttatgctgctgctgttactctcttctaggattctggtggtaaagtagagaaactcggacactatattaaccttactgaaacatgctttaaatcgtgtctaaaatctgatttgagcaagtcactgccgagcttctgagtctgcattgacactgctactgactcacctctccttccctggaataaggcttcagcttccctatgctgtgaagacaccatttgtaagcactttgaacataagcactgtgtgacagcgctggatatcatgcttnnnnnnnnncctctccctgactcccatccccataataatgagttttgtttggaattgtaataagtaatgaactgcatggtttagaaaattataaatatttgatcagctgtcctctctgaaaaaaattgcacccctttttcttttttaaaattttgttgcatcttcgtagtaatgtaattgtattttatgcctgcttttttat

SEQ ID NO: 132279 - DNA, 1425 bp, Homo Sapiens
  misc_feature (1291)..(1325): n is a, c, g, or t
  misc_feature (1329)..(1369): n is a, c, g, or t
tgaggtttaagacagttttgtcattactggtgggatctggtcacacaagatagcattaaacgtgacatggcacataaaattggttaaaaaattttgttttttaattacgtaatgtaaaagcccaacaaacactttatgcaagattggaatgtatcttcaaattcagatttaataaacatgtaaagatcctctgtatataaaagttgtatttaatcccttgtgcccaagaatgctataaaagatcccaagaatgttatctataaaagatagcaataggaatggtgaacaaataatttaatttgcaattctaaaaacatgacttaaaccccataaaacttggttcatagtttaactgtttatgttcaatacaaaccagagtgtttacattcacaatacaaatttcatcaatcttggatatttttgtatttctatgaatactatcaattttattgataacacatactactttcagcacacagaagcatattttctagttattgttaaatagtagataaggcaggttgttccctaaagtgctcagttatcattcagtgggttatttgccgttgatccttttctgccatttcttgttggcgaattgtattctgtgctgcttgatgcattttctctagtttttccagagtcagagattttaagggtaaaagtttgggtttacacagcaccattgtcattatatcttccacaaacagtggccctaagtttaacaagaaaataagaattaattcaagaaagataacccagttgtttgtagttggatttgcagctagaatgaagggtctaaaaaattaatctgcttgtcactgaaaaactcttgtacctaaattgagttttgctctggaaccagaaagatcattgtcattctataagcgcatttcttactagtagggtgcttctgaggaagacaagttttgagcgttctacccaagaatctatgctaccataagacacaactttttgtgtcagaagtttaatcttaaaataagatttggcagaatatatatatacatagtgcacaaaaatatagcacaatatgatatttaacgtaaatattcacatgactgaaggtttaaaccttcggcttttcttactgttgcttcaggtttctctttctccactttcagaccttatttaacatagtaaattccattatttctttcactgaagtttcatattgagtagggcatggtagctcttacctgttatcccagcactttgggatcccggccgtaatggccgaattcccgggcatatgtccggtaccgtcgactgnnnnnnnnnnnnnnnnnnnnnnnnnnnnnnnnnnncggnnnnnnnnnnnnnnnnnnnnnnnnnnnnnnnnnnnnnnnnnaagaaacgacgctagcgcccatagtggtcgatcatttgggtgttctttgcttgcgt

SEQ ID NO: 132280 - DNA, 466 bp, Homo Sapiens
cacagaagcatattttctagttattgttaaatagtagataaggcaggttgttccctaaagtgctcagttatcattcagtgggttatttgccgttgatccttttctgccatttcttgttggcgaattgtattctgtgctgcttgatgcattttctctagtttttccagagtcagagattttaagggtaaaagtttgggtttacacagcaccattgtcattatatcttccacaaacagtggcccttgctttggaagaacttcccggaacattgacttcacttctgccatatctgagttgttggatatagtgttttttcctgaaagttctggtctttttgctgcagctttaagcatccaacccggtattaccaagatgacttagagttcttgactcaagcatacagaagaaaagatgcatcccttcccaggcggctcagctgttgccccgggtaacggtgagactggcg

SEQ ID NO: 132281 - DNA, 973 bp, Homo Sapiens
  misc_feature (635)..(635): n is a, c, g, or t
  misc_feature (638)..(638): n is a, c, g, or t
  misc_feature (649)..(650): n is a, c, g, or t
  misc_feature (846)..(846): n is a, c, g, or t
  misc_feature (944)..(944): n is a, c, g, or t
tttgaaggttctgaggcaagtatttattccaagcaaacacgtgggcgtggacagctatctcagagcctacgtcactcagcagagtcacacatttcaaagcaggtcacacaagtccctcatgaacagtcttccagcttcagcccttctcttgccacctctgtggtctgagctgggggagggggagggcctccgagttcccaaacaaaacacaggtacctaagggcttcagctgtaggccttgggaacttggaaaagatcagcaatgtccagcagggctttgcggatgtggtttccaaagcgctgggcgttcgtctctgagcttgagaacttgctggagatgtggaagaagatcgtgttctcgcctgcaatcatgtaggaaactccatagccatcatctgctacagggccaaagccacctccagcgcccaggtgattggggtgctgctctgggtcgaacatgcggatctgggattgggggatctggctggtggagagacgccagggttccgagagacctcagcaaggaaaggagagctgactcctaggtacttggagaccaagtaaaggcagaagaggtgcctgtcgattcctgccccggtcatggccaggcggtacatattctgggtgcttcttancanccttctgggannagattctcgcaggtctgcttttgtgtggggaccctccatcatggcctgcacaaaggctgtggactcgcttgtacaggacgcacatctcagtccgtcctcccggacatctggtcatttgagctcaaggtcaggagactacccttccgggaatgagcactgacgcgattgcacaagatcaggctgtccgactcttgtnagcttgcaagggagatgaacataatcactctcgcacgctgcacgttagatctgtacgcggctgttggatgcactactttgagggacaggttgttgcanatgcgcctgcattggccagcatctatggg

SEQ ID NO: 132282 - DNA, 380 bp, Homo Sapiens
tttttttgaaggttctgaggcaagtatttattccaagcaaacacgtgggcgtggacagctatctcagagcctacgtcactcagcagagtcacacatttcaaagcaggtcacacaagtccctcatgaacagtcttccagcttcagcccttctcttgccacctctgtggtctgagctgggggagggggagggcctccgagttcccaaacaaaacacaggtacctaagggctgctgccggagctgtccttggagcctgggcacctgtgcacggccacccctcatgcctgtgagctgccacaggtcccttcctccacagtgtggggacgaaagggcagctggcatttctccaaccttcagctgtaggccttgggaacttggaaa

SEQ ID NO: 132283 - DNA, 2403 bp, Homo Sapiens
  misc_feature (2190)..(2229): n is a, c, g, or t
ttgagaacttctaatcttacatgtttaataccaaacacaaagcaaacacattcatcatctagagtactatattccaaccctatctcaaatgcaggaatgggcctctatctggtatctagaggatgatcataggaaacaaaatgaggacagaggcatctggtatcttctaaaagtggtacaaaactcccgcctgtcatgtcataaagctccccatctggtgctgcgacccacctccaagagaaagccaaaggaacagaccaataaaaggggtccggggtgctttctctatttcactcactcctcttatttgctaaggagctccaataaccaaaagaaatggttcctagaagaagagaactaaatctccagagagctgctggggcataccgataaaaactgggagaaacaaagactgacagcagagaagtccaatactgctgctgaagtttctcagcctaaatccgtgaaagagcctgggattctactgctctgtccagtaagaggagcttctgggtcctgtatgacccttccaactctgacttgaatgcaccatctaaaaacgtgtctatctctacccctaggcttcttagctcttcagtcatcctcatcatcctcaatctggtatcgtttcttcttttggattcctggagctcccaactctggtgctctgttcctgccctcatcttcttcctgttcctcgtcgctgtccagcaattgtcgtttcttgggtgctgccttcagcggctctttaccaacagcgtcttcctcctctggggatgccaggcccgctttcttcttgtgggctagcaagagggccctcagggcttgtgctcggtgctctttacagtgctcctcatcagagccttgctctccagggactttaggctgcagctctggctgcagcttctgttcctcctctggttgactcaaagaagctgctgccctccggagctgggtaggactcagcttggctggaattcgccagaaggtttcctgcccagaggcagggggccgaacccctagcttgcgcaacagctgctgaaactgttcgttttccatggcttcctcattttcctctgtgagtggcaccaatggaacggcctgggagcagccatcctcttcccgatcatcagctgctcggatcaggcagttctggagccataggagcgggatagaaaagccttcctgatgcaggctttgaccaaggttttcatttgaaaggactaagctagcctggacttgttctgcttctgagcccccttcttcttcctcttcgctgtcttcctcaggcaggttttcctcttcttccagatcttcctggcaaaaatctttcagggactccgctccatttggcaagatggaggatgccaactttttctgccgtttcttgtacagctcccgccgctcagccaccagcccccagagccaagagtttatccactattcgggcccgtgagcgtttggctgtgatattcttcatgatatgacccaggacatcatctgagtcccggaattcctcaaaaagccgctgcagctccaactcctgatcccccgtccacagtacaatatgggttcctttcctttggaagtccttgacactgtcagccagtcccatctgtaccagatggtggatgatctgcttgcgtgttcgaggaacagtattcaggtgggccaagatggcttccaccacatcctgcccttccacgtccttattggcgaggtacagctcctgaagatgagcctcttcttcggggctccatgtaggtgctctgcgactggaagacctgtcatccagggagccatagccctcagtcatctctcgaaccacagctgtgttcttccagaacaacagctccacaaaggctttttggttgactgcagccagtgcaaaaaatttgcccaggatgtatttggcaaaagtcactagctctttgtaggctccagcagcagggtcactaagcagacgattgaagaggcagaagactgacagctgaaaaagtagggcttccattttgaggtcatgggccagccggtgcagcatcttcacaatgcaatggttagtgtgggcactattctgctggtagctccttagtagcagcacataggctcgaacgacagttgaacatgcaaagcgtttcaggtagtccagaaaattaaattctttctccgacacctggaccactgtgcaannnnnnnnnnnnnnnnnnnnnnnnnnnnnnnnnnnnnnnngccccacgttcctctgggccctgctgccggggaagtggagcagagaggatttgtttcagccactggatctcttcctctggagaaatgtcttgagagccaaacacatctccttcaggccacacctaccgagcagacctcagcctcggccgattaacacccagcctcgtacctagc

SEQ ID NO: 132284 - DNA, 2064 bp, Homo Sapiens
tttgcaactgaaactgtttattgaaacctcagttctacaaaagcgtgaaaaaccctgatacaaagcagtggccagagaggcctgggaagagaatacctgggagaagaaccagaagagagggaaacctaggagcaggacactaagagaagactggaagacaaaagatcagggttgaaggtcccagcagtccttggctccattagactaaagctaaggaatgggagtgaaaagggttccctgcctcacccagcagctcccacctgaacccatcagtccccggctcttctgcctcagggacatcacacaggcccatgccaacatttcctttctcctctcaccccacttcccttatctcccacctatactcttccatcctagggaaatcaaaagtaaaagtctaaaaaatcccagggaggcagagaggggcttctatgtccatctgggacatgtccctggtcaccaagcggaagctctccctggtggcatcactgtcctggccaagcagccagccactgcgatctaggagtgaattaccttcagtccttctgccccaccaccccataagctcccacccaggaggacaggggacctgccaaggacccagcgaggcagacaggatctgaatcaagctttgctcctccaggttctcagaaactcccaaaccctcttaatgcattcctcacagccctacctagcctgggaaaacgaaagacttgaggcgagccagctccatgacactgaaaagggacattgctgaggctgaggaagtgaaaggggcaccgggctccaaggccaggggggagccaggccataggtatggtaccaggggctggacagcgcagtggggactgtacggttggggtggaggcaggcatggcaggttggggagtctctctggagcttctggcaaaggtggcagttatgaagaagagtgggaggggcaggggggtctgggggaggcaatggtggaggagtcagtgaggccagaagactgccccagagtgaccgcagccccatgctgccttccaggcagctggagacattagcgggagacggcaggcattgtggcacagaaggtatgcagggctccaggaggcaacgggaggtcagtccaaggtcaggcggcccaggtgtaggggtgcaggacagccccaaagactggatgtattacggcccaccgatgccacagccagggccacaactgcttcacatatgccacagctaacaggcaagacagctttaccagccgctgtcagagggagcccagggccaactgccaggtcggctgctccagcagcacacacaggtctgtgtaggtgtaccagcctcgccaccgtccctgctgctcagccacacagctctccaaccagctcagcacctcaaagatctcccgagggtcagtgtagagatgccaatccatggcactcaggaagcccctctccaaggcattgagagtgggcacggccacacccccagcagctccccattcgtcgttgaagacctcctcctcctccccttcatcatagaggtacttactggccaccatcatggagatcaggaacaagtcagaggatgacacatgctgcaagtagtctgggtttcggtgccggagccgttcaatgtacaccagagccagcatcatagcacatggggagatgcatgcctcccgggacacatgagctacgtatttcttctggagtcggcgaatagggctgggggctgccttctggagcagttcgacagcaatgtctgccaccgggctggagagctcctccaggctacagtcggcttcccagtcccagccatagtagagcctccttcggatccgggcactcagcttctggtgtcctgggaggaacgtgaagtcctggaagccggcgagggagaaggtgccttcttcgtccagcaggagcccggtcaggtccatcgcgccgccagtcgccgccctgcgaaggtgaacggaaggaaacgagttgtagggggctcgcggagctgtccttgcccgcctgtccacctgccagcctgcctccccggggcggccgccgtcctcgccctcgccctcgc

SEQ ID NO: 132285 - DNA, 477 bp, Homo Sapiens
  misc_feature (393)..(393): n is a, c, g, or t
  misc_feature (411)..(411): n is a, c, g, or t
  misc_feature (461)..(461): n is a, c, g, or t
tttttttagaagtactctgatttttattgttatacaacatatatatataattgtttccccaaaatatgcacaattacatgtgtcaattttaaaaaatgaatgaagactataatgtaaaacctatagctgtaaaattcctagcacaatacagaagggtgaagcttcatgacaactggtcgtggcaataatttgggggacgtaacatcaacggatgagacaacaaaagcaagggaatacacatggtactgaatcagtgtatgaaaaatatcccaaacagacaaagcagaacatggaatagatatatgcacattgtagtattactcacaaacatgttacctggaagcaaatgtacccttaaggatgagtagattcagcaaacagggcacgtacaanactgggatagcattcagncttaaaaataaggaaacttgaaaagtctccataaggccaattcaaccatntgttagtaaatagcag

SEQ ID NO: 132286 - DNA, 1032 bp, Homo Sapiens
caccctcgcgtagctttcctgtggttttccaggactgtccggtacagcccgggctccgcgtgccccgcccgctggagcacctgccaccgaggcgcgcgtggggccactgccgtggcggcggctgccctcctcacactcggctccgcgccgcctccggccaccgtgcgctcccgcgtggggcgcctcggatgggcccgggagggctgggggctcttccctggaggaagcggcctccgcttcgctggcgccgcctttttagcttggacttcagtcctccctcggggactcacctccggagtaaacggctcttcattagcttggagtggccgcaggtcccgtgaccagcacccgcgagaccctgtgcgacagctgggctgatgctccgtttctctgggaattggtgattttttactgtgaagatgaaattaccctaatagcatgaagatcgtgggtctgtgtgtccgtgaagtgagtcccgtctgccaggagctgacgaaccacgaatgcttctgcctgtgctgtgcattcccaggcccgcagctcccggtcgaggggactccgatgtgaatttgttgtgaatttgttgtgccacaatagcagttttggaatgaagctaggaaactcgagtgtgctttttgtttaatgagcgttcaccaagctgagccggagccatcctttcggtggtagttggggaaggctatgcagatttgctctgttgtgacgcgttggtgacggtgcccagcctgcggttccccacagcatcgcaggcgctcggaaatcctctcccgtgcctttagaggaaggagaggattgctgaggaatgcagggacgcctgtttctgtcctcacaccacagaaagaaacctgagggaaaactgagacgtgaggttcctgatttaagaagcctgggtttcttcatggtggggggccatttggaatgacagcctcacttccttctgatggctacatctgtatcttttcctcctgtgtttaatgtttcactagggagaggaaataaagcagaaggaacgtg

SEQ ID NO: 132287 - DNA, 1266 bp, Homo Sapiens
  misc_feature (1086)..(1128): n is a, c, g, or t
  misc_feature (1143)..(1189): n is a, c, g, or t
tttaactttaatgcattttatttaacccaacacatatatttcaacatgtaatcagtatcaaatatttttgacatattttacattttgtgtgctgtcttagaaatctgctgtgtattttacacttacattacatctcaattgagactagtcatatttcaaatgagtcctatgtgactagtgacttcggtactagtagtccagggctagaggaaaatgttcatacggaagagtaacagaggttcaagttggaggtaggggtcaaactagagggggtctgaatgccactaaagaaagtggaaagcctttgaaggattttgagttgattgtaaagttaatctagtggttaacacaggattaagagaccatccttaatgccactgtagcaatccttccttcatttcattgaggctgttccactctgtcacagcttatcactggtggtgcagactgcttttccaagcatgtacttttgtaccttaccaacgggtctggtaggtagtgaggactgagcaatcaggacagcagtatgcagatgcttccctcttcagatgacacactcttaggcatggctgggcactaaaaaaggtcctttgacaatgttggtgaaagctgagattcagccagagtatcaaacagtgcggattgatgtgccacaggtacaatgtcaagtatgactcagaggacaaattatctagatccttctaataatagcatgtaccccaacaactggattccttagtattcttcaaaatctgaggtaaaatcactctcgctttaaaagataccaacttcaccccttcctctcttcccaactccctcctgcttccttaaggatccatgccagctagcaggtaaaccagaggctgacttgctgacatcttccttaccttattcctcaggtatacatcctaggcagggaaaatttacagaatgcatcccagcctgattttggaagaatgagaaagttatctgagggctcccaagggcctcctgtgcataccatctttatcttccaacttagaactaaccaaattcagtctttttgtgtaatgaaaaaaggacaagctgggcacagtggctcacacnnnnnnnnnnnnnnnnnnnnnnnnnnnnnnnnnnnnnnnnnnntgagcccaggaacannnnnnnnnnnnnnnnnnnnnnnnnnnnnnnnnnnnnnnnnnnnnnnaagaagaaaaaaggatgcaggaaattaacaataggatagccaacaccctcactaaagcatcaatttccatatgatcc

SEQ ID NO: 132288 - DNA, 1026 bp, Homo Sapiens
  misc_feature (60)..(308): n is a, c, g, or t
  misc_feature (778)..(778): n is a, c, g, or t
  misc_feature (922)..(922): n is a, c, g, or t
  misc_feature (951)..(951): n is a, c, g, or t
gaatgttaaaacaaattttaatgttctggggtgacatataccacgtagggtgggcctgcnnnnnnnnnnnnnnnnnnnnnnnnnnnnnnnnnnnnnnnnnnnnnnnnnnnnnnnnnnnnnnnnnnnnnnnnnnnnnnnnnnnnnnnnnnnnnnnnnnnnnnnnnnnnnnnnnnnnnnnnnnnnnnnnnnnnnnnnnnnnnnnnnnnnnnnnnnnnnnnnnnnnnnnnnnnnnnnnnnnnnnnnnnnnnnnnnnnnnnnnnnnnnnnnnnnnnnnnnnnnnnnnnnnnnnnnnnnnnnnnnnnnnnnnnctgtatttaaaaaaattgaaactacttaaggctttatcccatgtttacattcatagggtctatctccaaagtgagttctttcaagtttctgaaattaaagtactgaatgttttcccacattccatacatttagagagtatctttccagtgagtccttttatgtctatgcaaggaacggagagaactcaatgctttcccacattccttacattcatacagcttctctccagtgtgagttttttcatgtcctcgaaggaaacgggaacgagtgaaggctttaccacattgtagacattcatagggtttctctccagtgtgaattctttcatgtcgtagaaggcaagtgagccaagagaatgcttttccacattccttacattcatatggcttctctccagagtgaatcctttcatggacttttaagttactgaaatgactgaaggcttttctacatgttttacactcaatanggttttctactgtgtgggtcttttatgttgagcaaggtatttgaacaactgatgctttccacattccttaactcatatggctctctcagtgtgagtgtctcagatttgaaggagagaatcactaagcttccaactgacatatanggttcatcagtggagtgctcagtctcganggaacgcagatgaggctacacatgtacatgaaggtctccatggatcctcagtcttgatactggacacaggctcca

SEQ ID NO: 132289 - DNA, 651 bp, Homo Sapiens
ctgaaggggctacccatgactgaagagatagtctagaggtggaggtcttatccactcagaaagctgccagttgcaaagtcctgtctggttcttgctcctgcaagccatgagtgatcatttttcagaatgccccctaccttttctctcttttgacagatacaccaagcctcagtcaggaatgacagggaatacctgcctactttcccttactcaataccggaaaacggacaatatgaagagaggagggatggagcaagatgtgcccacaagacaggtgtgataagtttccataaaaactgatgcttcagaagaagggagcgtgaaagactcaaaggcaatgacagagtaatcttgtgtgtagcagagatgcaatgtggcttctccccttccaaaaagacctgattttacctcactgccagaaaagagaatggtgctcaaattgctttgtacatagtgttcactgggcagcagttcatctacctggataagggctccgagctacagggaccctgacattgggatgtatggagagttggaattcaggaacagttgtaccgaatcttgaagtgaagaagaaagtagtttgttgtacatatgaatgaaatccaacttttattgcattcaatatagtattgtcaagcaccgtgcttt

SEQ ID NO: 132290 - DNA, 766 bp, Homo Sapiens
  misc_feature (690)..(690): n is a, c, g, or t
  misc_feature (708)..(708): n is a, c, g, or t
tttttaaaggagggaggaagaggatttatgacttaggttgtaggggcggggcgtgggggtgaggggcatgggcctcatcatctactctgactggagaatggagccccctccaggacggcctgccttcaagccacgatgcagttcttgtctcgggcctgacgaggcatccctgcgcgagagtccctggggagcgataaagatggggagttgaaggtctccattgcagtgtcctgagcaggcatgggcctgcacaaatgcgggggcagagggatgcgctctcctaggaagaagccatcatcctctgatgattcggaactggaactggagggcgagctggagcaagattccgagtctgaccctgatcccgcgtcacattgatagtggcgacgtctgcttgggtggcggttgtgatggtgatggtgattatgatgatggtggcggcgacggctgggggccctgggtgggggactgcgtggcctgcggcgctgggccgggggtgcactcagggtccggcgcgggcctccttcagacaccagagggtcgcggaagctgacgcgtggggtgctctgacgaccgaaggcactatcatctgggcgcaggttaggctggccgggggactctgggggcggctcggggacactgcggagccccagttccggcatggagtggcggtggggagccctctcaganagcgggagggctcctcangggctgtagctggcgctactctgtgctggtgctttggtggtggctctgatgccccttc

SEQ ID NO: 132291 - DNA, 1191 bp, Homo Sapiens
aagtttgttcatatttgtatgtacatgactatttaaagccaggggattatctttctataaatgtataactggcaacctgtatcttccctctttgttgcccatatagccggagccctttttctcatttgagaatctcttccctactaagtgttaagcttagagtgaagggcacctcctactggaccaaaggagaggggattggagaattgttttaagttttatacattaggtcagtattccatcttcccacccccagccttatgaggacagctctctacccatcctgattaaactgcagctatagctgaaaaaaattattgtaagaaaaatacacagcaaaacagagctggaaggtggtaagtgtaaaagatatggaaagatgtaatcaccaaagaagctgcccaaatggcttcctgctatggaggagagtgatttggcccttacctcacctgccttcctgattcaaagaaacttgccactagcaggactgggcccaggagccccatttgccaatctcttctcttcttgggagtctgggaaaggttgtatagttctcaggctttaaaggtgtagaagacagtatggagaataagagaaggatgttttatagtcctctgtttcagtgccttccccatgcccatggagctgtcccaaaacccatccctcagtatttgttgatgccaaagacacgaaccccatggaactggggcaacttcggcagcagtacacttagcaatgaggctgtgttgatgaggaagtgcgcagcatcatacttggtatagaagctggccaggagatagagcacaataggagagatgctgaggaacttgcgggaagaggtaaactggagcccatagtccatttgctcccagtgtgtcagtagccgagcctttccttggtcaggagtctcaaagggtgtccctttcaccgtatgaaggaagacatacgtagccaggttatggatgacgttggtcagggtccagacaacaggaatgctgaagaaggggatgctgagtagaaccatatgcagcaatcctaccaagatgatgtaggccagccagatgcctcggctattcatcactcgggtgttggggtttacttcgctgtgtgccacccccacattcatcctgccagctcagatccccgtccggctattggcgcggcgccggctccaacatcagaatggtaaca

SEQ ID NO: 132292 - DNA, 731 bp, Homo Sapiens
tttgagcatttaaaggtttttattataatgaattctgcaatgaacatctttctatataaatttttgtgagtactctgcattatttcctaaaataaattagaagaaggaatgatggagaatgtaaacacttggagcttttgaaacagacagtttttataaattagagtctgtagttttaattcagggagattgttgtgtctcagaagatatttcacggtgaagtctcacctgacggcacttcctcgtcctccgcagagccgtgtgtgtagggcccggggtgcggaacgggcagttcttcaacacagtgagtggcagcgggcgtcccgaaggttctcaggccttgtctccgtggagggcattttgtggcctctcccagggcagccggcaggagccaggcgatgaacagatgcgtctgtagcaggagggcgttgatgcctctgaggttgtagcgaggttggtatttaccttttcctcctggtccattctgaagctccaaagaacggtcagtttaatacagagacacaattacagcaagcatctagtgtgaggcgagtcacgcattttggctagaattactcagggcgttggaaaatcacaaaccttttcaagtaacttgcaaattgctagcattctctctgcaagacaagagatgctgtctgtgccctgacccctgactccacaccccagcttgttctgcccctttctgattgttctaagtaactgacatactt

SEQ ID NO: 132293 - DNA, 991 bp, Homo Sapiens
  misc_feature (198)..(210): n is a, c, g, or t
  misc_feature (226)..(338): n is a, c, g, or t
actcgagtgttgcccggaaatctttgcaaatacaagggggaggtgtgtgtggttgagggaagaacgagggcttggtttgtccgcccagatcgggagtccaatgccccaattcataggtgcggggcaagctttaattaaggggggttcaagacatcctcctggtttcaacctccagagagtggggaccatagggtgcannnnnnnnnnnnntaagttattttttggnnnnnnnnnnnnnnnnnnnnnnnnnnnnnnnnnnnnnnnnnnnnnnnnnnnnnnnnnnnnnnnnnnnnnnnnnnnnnnnnnnnnnnnnnnnnnnnnnnnnnnnnnnnnnnnnnccagtacaatcttttttgaactcaaatttttgctgacatctgaggtgcacacaccacagtgtaaattatgccttatcagaatctaaatgaaaatagcgaacatttaaaagctatcaccattgtagtagaatcatccttcttttttgaaatttgaagcatcccaggcttaaaatcttgtgtttcagaaagacagtttataccatgactgcttaattatccccccaaagaccttctgattgaagtcatgtacagttcagtggcctaaattctctgcctttttaacttgctttgcaagcctactctgaaaataagttatttagtcaagttattctcaaagatgtcccagttgcctagaaaggatcaaatggaacatttgacacacatactcaaaaaaatgtaactgactataaacactttaacctaatcatctgtatcaaactttctaaaaatcaaatctcaggattgttccactttagagattctatgtaaagtttatataactatacttgtcaaatagcacctatctatgcatttaaaaatgcattaatatctaacataaaattgttaatttatacacacacatacacttatacatagagagagattttcggtatgttgcaagtattttttccgattaaatttattttccaaag

SEQ ID NO: 132294 - DNA, 1015 bp, Homo Sapiens
  misc_feature (289)..(326): n is a, c, g, or t
  misc_feature (778)..(779): n is a, c, g, or t
  misc_feature (798)..(798): n is a, c, g, or t
  misc_feature (806)..(807): n is a, c, g, or t
  misc_feature (829)..(829): n is a, c, g, or t
  misc_feature (836)..(836): n is a, c, g, or t
  misc_feature (862)..(862): n is a, c, g, or t
  misc_feature (895)..(895): n is a, c, g, or t
  misc_feature (936)..(936): n is a, c, g, or t
  misc_feature (957)..(957): n is a, c, g, or t
  misc_feature (974)..(974): n is a, c, g, or t
  misc_feature (976)..(976): n is a, c, g, or t
  misc_feature (978)..(978): n is a, c, g, or t
gactgaaaaaatgaatcaatgctttattaaatgataaatccatagtctgtcgggttcaccgacgccagccatcggtgccatattgccacaagtgtcctatggtaaagcagtttttcttggtccattcaaattgggatgggaagcagacgtttttgtagaatacacctcccgggcagaaatggaattgcctccctgtggtgcgcagatggagaatgtcctcgcattgtggtttcaagtcctggtttgacggccccacgacctggcttagacacaggagctgctcttcaannnnnnnnnnnnnnnnnnnnnnnnnnnnnnnnnnnnnncttcagaattgtgccaccatgtctttccatccattataaaaatattatatgtcgtgtttgccagaggagatgatggctgtttcttcctgatgtatgaggccaacccaagcagcaacagcacgatggccatgaggatggccacccctgagacggtggcgatgatggtgttcctctgcaggaagtgcagaagctgcccgcagggcatagtcctaaagtgagcatctggtttagctgctccttgaagtgtttctttatctatagtagttaactgctctcttaaatccctgtcgaacagacaggattctttaaaattcttctcctctgaaaggtgatctttatcaggaattttgtccacactgccaaggaaatattctggtttaggagaatccaagcatgctggttcttttctcatgtctgtcttttgtatggatctgactgctgttgcttcgttnnatgatgggtcatacggaancttttggnnacactgcagtagatttcatcanatatttnagccaatgttctctcgctcatttganctgatgcaatgcagcatgttcaagctctctgtngggatagctatctgagtgtcaagagatcatgaatgtctgangcactgagttcacacacacangggctagccacttcaanantnttggtggcctcttgtaggatcgacgctgtcttgttca

SEQ ID NO: 132295 - DNA, 662 bp, Homo Sapiens
  misc_feature (611)..(611): n is a, c, g, or t
ctctcaaagcaaatagttccataaaacactaggtcaaagggcctcagtgtgtgtgtactgagtttgaagggccaagcaataatctataagagtgacctattagcaatatatttgcaaaactaaaccaaaatctgtacaggatattatcaaagccttaggaacaacagaacatacatattttatgaagtggttggagaaccatctcccctttagtagttaacgtactgatgagtgtccccattttcataagcaaggacatactaacactaagcagttgaaaggcctgtctcagaagcatcctgccccaggtagctgatcacggtggccccataccacgacacagcttttcttttggttggtcttgctgagtgccttctctagatttgggctgtcattcaagcctcttcatttacaatgttcattaaaaattcggtaccatacctgtcccactcccaaccattttttacttcctgattcttttgtttgccttgtgggtaaaatgcaaatgtgtccaaggtgaaaaagcaaccaatcaacctttgagttttttttccagcgccaggaatgtgacatgaacaaaggtcactgaagcagcatgaggagtaagttancagggccctttgttgtgtgtgtatgagtgtgtgcctttacctaagctctgt

SEQ ID NO: 132296 - DNA, 897 bp, Homo Sapiens
  misc_feature (251)..(268): n is a, c, g, or t
ctgttgacatctgctgaattttcctgtggcacctcccaaggagtgactaagcctaccatccttggtaaggaaaatggggattatactaaggaattttatctgaggcattctggaatttctcaggaatagaaaccagcccagctaccaagtgagctttttaaaatgttgatactgggccactgtgacatgacaggcatctatatagcatttcaaaaaaatgcttcagcaatacaaattcaaactgggaaacnnnnnnnnnnnnnnnnnnaagagacagtgtctcgctctgtcatcacctacgctgtcacgtgcagcctcaaactcctggacttgtgatctcccgcctcagcttacctagtagctgggaccacgaatgtccacagatgcactccacctacccggctaattattttttgtataattagctggggtctttaccatcatgcccagggctggtctctaactcctgggaaacattcttattgcaaaggtagattctgctgtcatggttctgttatgaaatttaggccaggcgcagtggctcacggctaaagggaatttttgtagtggtccccagtacagggccagcatttcctatttctgtaacatacagccctataatctttgcaaagctgaagtacacttgaaataggcaaacagaagacacctttaaacaaataagacccccccaaaacccttcaaatatgtatatgtacacaaaatattcaaataattaaaaattcacaacccctatggaatgctaactagtagccacaggaaaaataaagcatggaaaatatcctcatatatccagtacctcttctatctcaagcatgtccagacaaaaattaaattacacactaagccataaaaattttaaaggcaaaacatcccacc

SEQ ID NO: 132297 - DNA, 782 bp, Homo Sapiens
ttttttttaaaggtgaatatcaagatttactgattctaaatataactttcagaacaataaattttgaatctcaaagcatgaagtcaatacgtgtcacagattctgaatgctttcaggagtagcacaggaaaacttcagaattttgcatatgtaacatttaagcaggaagctaacactcagaaaacacatttgcaagtaatgtttgatttcaactaggatagcagttttctggtaactttgctcagctaatcagattttttaaaaaaattcttaaaactacaacacagtttactttcgtaaaaatttcggcaaacaaaaattttaagtcttttgtttccctttctttaatttccagtttctccagttatgaagtgtcagctctcaattccctctccatggacttcatgcttatgtttttttcaggcattagttttacaaattagcttcacccttcacgactatcttttcataaactctcttaacatattgagtcaagtagtttaattctattctttgtcaatccccctccttagttctttagggcccaactgtgtctcattcatttcaattttgccaactaatatccatacaatttcttatgcaagatctcggcactgtacctcaatgttatgagaaatgtgactgacagcagatttttccatgtgctcacacatccattcatttgatatcgattgactcaatactgaagccactcatcctttcttacatcctttcaaaacactacaaataagctgcattttttatgtgacaaatctatcttc

SEQ ID NO: 132298 - DNA, 744 bp, Homo Sapiens
  misc_feature (640)..(640): n is a, c, g, or t
  misc_feature (671)..(671): n is a, c, g, or t
tttggtatctattttcagttttttggctgcaggattaagtaatgatgagtcttccctttcaactgttgttaaatctgagacatcctgactctcgagctgggaagatgaaagaaactctattatatatttggcctactttccaggcttgggcaaagtaagaagacatcatccttatcacaaaacaacaaatccatttattgagtagtttttcagttctaggcactgactgtaccatcaaggataagatacagtatctctcctaagggaagattatggctcagctatggaaagaaaacctgctaaataatctagttttccagtttggctatgagcacagctccagtatctgtttacaagggtaatgaaatgccatggatcatgaaaatcaccctccccctgggcccactcttctgaccttatttttcagaggggatgtcagcaaagtcccctccatccagccagctcttctgcttccagatctatagatctctttactgctgatgattccacatggaaagaatattaaaaaggaggccccttctcatcaaaacagtgtttatttcaatttgggactttcaagtgagcttctcacacgtagtgctcttttgttcttattcttcaatcctactgtttcatgcanatgtttatttcacattactagtctttttgangataggtttgtctcttattatttatatctcccccccatcagcatttaatgcaattttacttatgctggatgtt

SEQ ID NO: 132299 - DNA, 1190 bp, Homo Sapiens
  misc_feature (420)..(480): n is a, c, g, or t
  misc_feature (1085)..(1085): n is a, c, g, or t
  misc_feature (1089)..(1089): n is a, c, g, or t
  misc_feature (1104)..(1104): n is a, c, g, or t
  misc_feature (1121)..(1121): n is a, c, g, or t
  misc_feature (1132)..(1132): n is a, c, g, or t
cctgaaggccacacagatttggtacaaaaaccacagcaggtggtttgttctttaaaaacgggacggcagtaactataacggtcctaaggtagcgaggctgggtggcgaattcggcacgaggccgagcttctgcctcaggcatctccgcgatctcctctcccctccaatcctatccgtgatggacgatgcccacgagtcgccctccgacaaaggtggagagacaggggagtcggatgagacggccgctgtgcccggggacccgggggctaccgacaccgatggaatcccagaggaaactgacggagacgcagatgtggacttgaaagaagctgcagcggaggaaggcgagctcgagagtcaggatgtctcagatttaacaacagttgaaagggaagactcatcattacttaatcctgcagnnnnnnnnnnnnnnnnnnnnnnnnnnnnnnnnnnnnnnnnnnnnnnnnnnnnnnnnnnnnntgagattcagaagatgcaaatcctggtttcttctttttctgaggagcagctgaaccgttatgaacatgtatcgccgctcagctttccctaaggcagccatcaaaaggcactggatgtgtgtgagaagtggggagagatgcaccatacaaccaaacatatgagggaagccgttagaaggttacagtcaaaaggacagatccctaactcgaagcacaaaaaaatcatcttcttctagaccaaagtctagaaaggcctatgttactgacggaagaagtattggttccagacttcctataagactggtctggcattgggtgctttagtatctcaggcttccaaggattccatgatgattttaatgtctttctcaaaactctgatatttgtcacacctagaaagtatgtagcctgattgatacttgccttgactaaattttgggacctcttggggcattttgaagtatttaactgtcttgaccagttggaagaagataccgtgggccataagcatcttctggacaggggaacttgctttcagagagaaaacctttccaagagagttttggtttggtttgggttccgtttggtttgagaaagggcctggcncaancacctaggctggaantgcagcggcatgactgnagcctggaacncctgggctaaagtgaccctcccacctcaagtctcctgagtagctaggactacaggcac

SEQ ID NO: 132300 - DNA, 998 bp, Homo Sapiens
  misc_feature (594)..(643): n is a, c, g, or t
tcttctgccaactgtcaagacagtgaatacttcaagtgccccaagaggtcccgaatgtagtcaaggcaaggatcaatcaggctacatactttctaggtgtgacaaatatcagagttttgagaaagacattaaaatcatcatggaatccttggaggcctgagatactaaagcaccaatgcagacagtcttataggaagtctggaaccaatacttcttccgtcagtaacataggcctttctagactttggtctagaagaagatgatttttttgtgcttcgagttagggatctgtccttttgactttaaccttctaacggcttccctcatatgtttgggttgtagtggtggcatttctccccacttctcacacacatccagtgcttcttctaccacctccccgacgaaaaccttggaaataccagacatagcaataacaacattctgagacacagaggtgccagtgatggactggatcagccttttgatggctgccttagggaaagctgagcggcgatacatttcataacggttcagctgctcctcagaaaaagaagaaaccaggatttgcatcttctgaatctcatcttcatctannnnnnnnnnnnnnnnnnnnnnnnnnnnnnnnnnnnnnnnnnnnnnnnnngctgcaggattaagtaatgatgagtcttccctttcaactgttgttaaatctgagacatcctgactctcgagctcgccttcctccgctgcagcttctttcaagtccacatctgcgtctccgtcagtttcctctgggattccatcggtgtcggtagcccccgggtccccgggcacagcggccgtctcatccgactcccctgtctctccacctttgtcggagggcgactcgtgggcactcgtccatcacggataggattggaggggagaggagatcgcggagatgcctgaggcagaagctcagaaacccgagctgccctcgtgccgaattcaacccaaggctcgtactagcctagttt

SEQ ID NO: 132301 - DNA, 920 bp, Homo Sapiens
ccggccagggcttagtgttataatagggctccccttagggggcccctttggtcaagagaaagccgggtacggcctaagtttgggcccccgggggggattctttagagcgggccgccctttatggtggtcttttctgttttaaaactttttaaacaatccattttaataatctaaattatttacaatacaataacatggattcatcctttttaagacatgggattgtaaaaatcaacaagtgaatgatgcttcaaataatacatttaaatacattaatcaaattttttcagtgcttaaaactttttctccatgggacagcaggctctggacaaaagtgcctagcatacaagttttcccaatttccttctatcataccagctgcacataaaaaggttcatcacctcctgtctccaaagtgtctccctactgagtgttcccaggcagacaatagttcctgggatagtgctgtttggtaacagaaaagcccaagcgtagaggacggattaaaaggcagggaccagaccaccatggatacaaatcccaagacagaggatgccccatgccttccccatgaagcttatctgtctgcctgtgtctccatgattgcaggcatagagctacttgggacctccaggatgatttacttagcgatatgctttttacattctaagaatcaaaatggtcctgtaattcccaatagagaaaatagagccaattcattgttctcccctctcccctctgaagccagtttttaaagatgagccttacccagaaaataagccccaaagaactctcatctaaatgatcagacccttcctaaattacctttggcaacctaggtaattcttttttattacaccccacgcgtccgcggacgcgtgggcggacgcgtgggtcgacgatatcccgggaattccggc

SEQ ID NO: 132302 - DNA, 1037 bp, Homo Sapiens
  misc_feature (979)..(979): n is a, c, g, or t
  misc_feature (1020)..(1020): n is a, c, g, or t
ttcttgaaagaaaactcaactgactcaggccatgagcatcttttacactgaagcaagcatctcctcacaagtgcctcctacaagtcactagagtcatattcaacattacaaaatgcagtgctacttaaattttaaagccctgagggtcccagaaatgggctgatccagtccttggccactcactgttaagaggcaggatttacagatcaatggctgttcctattgtccaagaaataattttctagcaaagcatacacactttattaaatttcacagccagcagcgctttcagtccacaacagatttctcagaggaaacatggatattttgcgtaggcagaaacagtgaggagtacaaagcaaagctataaataccaccaatggttctgctatgtgcatccgatattttttgcccgatctgaaatactgcaagggcttaaccattcaaacaccgcatgacaacgaacccagtggactgtgaaactcaggctgcaggagggtggcttgtcagctggtgaagccacttggctttggactccatcggtcatctttacgcaagagcagagatgaacggtgggtcacggctatgacgtgaaggagaaagagaagacacactcacagaacaggatggagagcttcaataattttttaaaagcttggaaccaccacctgctttcccaatcttgggctggggttttgacttttcttgatcatcaatctgacttgaagccttttaccagttacaatacagacatggccagatgacctgcttgttaggaaggctgtggccatctttgtttctgaaacagtcttatctcatctgtccactgctgctctggaagggtcaggaccagcactgcagacactcggccatgctgtgagtgagcccagacatacgcgtggaatctgaacacccaacgctggcgttcccgtgccagtctgagggctgcggctccagcgcttgtccacacacacgcctngctctctctagttcctccactgcctggcttctcgcttgcanacccagcatgtgaatga

SEQ ID NO: 132303 - DNA, 775 bp, Homo Sapiens
  misc_feature (746)..(746): n is a, c, g, or t
ttttttttcctgaagatatttattcccatccaaacattttcaacagggaaagacacaatccccaatttccccctaggattcacattttcaattttccagggaatctctctttcctggaatgctctcgttcctctggagtcaggaacaagactccagagctgtttatttttctcacacaggtggggggaatctcattctccacaaagggttatcagacacctacttcctctgccaattcctgggctgacctgcaaattccaccttattattgcccttgggcctctggttcctttttgtctgaggtcatatttacattgtgtaatctgccaatgggcacttcctgttaggccatcgtagggcacggtggtggctttgatctggactgcccatggcttcccaactggggccttcgggacagctgcaactcacaaccagtcttttgttgaccttcagctgatttcccagggtacttggcccctcttctttggtctcaggggccccggaagcccaaatgctcctactgaatgtcccaaatgaggaagaagtatcaaaaacatcacatggattcccaaacttgttaaggtaaactggacagtcaggtgcccaaatcgcaccttgactttaaaaagaccaagagggtaggagcaccctggggcagggtggacttaacagagaattccaccctgaggtcacctcagagacttgccatcctttctcatgcagacagactccttttcagttttatngcaatcctctgctggctctgcacctcctc

SEQ ID NO: 132304 - DNA, 850 bp, Homo Sapiens
tttttggaaacaaaccaaaaactttatttacaaaagtaaattttaacttgcttttatatgtcatataccgttaatgatgacagcaacagatttaaaatacattgaggtttgtgcagctcatttccccctagttataccataaaactttataaacattgctttagctttgatgtttggtcacgtttgttgtgcagaagtcacgtttcagggtaggttcaccgccagacacggtcacatcaccattggctgtggatttccaagaagcaaaggagccaatctcagcaaagctcgcactggcatttttagctgcttaaatttgaagagcagttcagcaaagcttgtgctcccttctagtcctataggtggcaggtgctgtggagctggcacagagtggtagacgaggaagcaggccagcatgctcagctgtgattcctccaagggctgcccgctgaggtaggcgtgcacacacatatcacccccgacttgtagccactggtccagggtattatcaatggtgcacttcacaacagggaggaattccgagttcataaagagcccccgcttagggtggttctgcagccgctcctgatggcttcgggagctgaaaaactctaacaccaactttatctgccaaagttcagaagtctcagacatttctcttctcccaagtctttttatagcctgatccattgctatgtatgcagggcaacatctctggggtctcctgggtacacattcatagagtactgaaggaaagagatccagcattttcctgttcttgacccatggtcacaggtggctttgcagaatattcagcaaattgacgaagtgctggatcagaagtgattgc

SEQ ID NO: 132305 - DNA, 821 bp, Homo Sapiens
  misc_feature (766)..(780): n is a, c, g, or t
ctacttaaaatgtgtctatattcatggtatttccattcagtgtagatggtaaggaaaacatctagtcattaaagatttacttatagcagactccagaacactacctacaatggggtttcagtgactagaaatcttgaaggtttatgattgcatcaaattgagcctgtactaatatctaaatatctgctcttatgttctgctttatcccttgggattaccttctaaggtttggtcacaccagcaaactgaaacagatcttaatgtacataaaaaatttatactaatattactcatctgtgttacagtattttgaaaaatgtttcaggtgtcatctagtcgtctttcatgggtgtgattagttacaaatgttatgcttatgttttcatacttaatatcaagctttctttgtaccttacaagatagtatttttggttctaaaaaaaacaagcaaacttcatttttgtagtatccagaaattacctggagtcagtatttttattcgccttctagaacttgtgatccacacatcacccatttatattagtggtaaaattatctgctaaaatctaattgtaagaaaggcttaccttctgtcatcaagtgattgtatcatcctggatcgtcatttccaaggaactagcctttcttttcctaagcgtctgtatgtgttctaaaacttccagtatatatttatagaacttagaaaaaatgttacattattcagagtagcaagtcttactggagtacctatgtttgttttcttggnnnnnnnnnnnnnnnaagtttaaaagtagtaattaaacctatattttgtgattgtt

SEQ ID NO: 132306 - DNA, 1059 bp, Homo Sapiens
  misc_feature (30)..(31): n is a, c, g, or t
  misc_feature (36)..(36): n is a, c, g, or t
  misc_feature (68)..(68): n is a, c, g, or t
  misc_feature (80)..(80): n is a, c, g, or t
  misc_feature (116)..(116): n is a, c, g, or t
  misc_feature (128)..(128): n is a, c, g, or t
  misc_feature (159)..(159): n is a, c, g, or t
  misc_feature (202)..(202): n is a, c, g, or t
  misc_feature (206)..(206): n is a, c, g, or t
  misc_feature (215)..(215): n is a, c, g, or t
  misc_feature (221)..(221): n is a, c, g, or t
  misc_feature (285)..(285): n is a, c, g, or t
  misc_feature (738)..(740): n is a, c, g, or t
tggaattactgagatctcaaattcgtatcnntatcntaaaaaggtagtgcatataccgatgtaagttntatgttgtacantggaagtattgagagacataaaagtcagaatctagngaatctttcacntgtgaatccagtacagcaaagtctagtgatncacatctaaacatttttcatctcattaccatgtatatataccntacntgcactatntctacntgatcatgaaaatgaaaaaaatatactaaagtctttgtactctcttagccttttctgtattctnaaacaatatatttatactttcagaatagtattaagaattagtttaagtaactccagctaagttttaaaaggaaaaagaagactgcactgattccctgaggagaaatttatttgcagttacttagatgatgtaaaaaggtaaggatttacggttgtaacttggtgaaagcacttttgtgatctgttatatgttgtggttttaaggatggcgtatattacattaatctataatcacacacattgttttaaattgtttatatttttttcttaaagaagtctgtcttcagagtacaaccgaatgtgattaattgtgcctttaacaaagtcattcaatgtctaaacaaattcagtatctgaaacatcttcatgaggaaaactgaaggaaaggaatgttaaaaacacagaccaggagaacaatcacaaaatataggtttaattactacttttaaacttnnnaaaaaaaataaacctagaaaacaaacagtaggtactccagtaagacttgctactctgaataatgtaacatttttttctaagttctataaatagtatactggaagttttagaacacatacagacggttaggaaaagaaaggctagttccttggaaatgacgatccaggatgatacaatcacttgatgacagaaggtaagcctttcttacaattagattttagcagataattttaccactaatctaaatgggtgatgtgtggatcacaagttctagaaggcgaataaaaatactgactcccaggtaatttctggatactac

SEQ ID NO: 132307 - DNA, 747 bp, Homo Sapiens
ttttaatttaaaattcttactgtttatttatatattgcatagctcaaaaagtttgaaaaaatgaagttttaacaggaagtcagtaaatgctcatagacccccttgtctctagcacttggggaaaaagagtcttggagtccttagagatgggaatcttgacagcagaatttcagatgtttcaatcacttgccaaggaagtgccacacttgctcttcttcattactttctttatttggtgaagatgataccgattcaactaatgatcttgcttcctcttgagtgcaacggaaagggctatcagatatctgcacgtttgtgcaatttatagctcctccattacacttcttcataagcaatgctttccaacattgatgagtggatttaataacttcaagagcaaaagccttgtttttgaattctccattaaaagcaaactggttttctggttttccatctggtaccttatataatctaaaccaattaagagtagcttccaggtaacccggtttgaacttcttaacatcatcaatatcatgaaactttgaggcttcaggatcattcgcattgatagcaattaatttccaatctgtttcaccttcatcaataagagccaaaattccaaggatcttcacatgaataacttctcccacagacagaatctttgagcctattttcaacatcaatacgatcattatctccaaagcagttcgtggctctatctttttcatggggatctttccaagtctg

SEQ ID NO: 132308 - DNA, 1267 bp, Homo Sapiens
gccgacacgattttatttggtctggtttgttgtttgtcctagtttaaaattcttactgtttatttatatattgcatagctcaaaaagtttgaaaaaatgaagttttaacaggaagtcagtaaatgctcatagacccccttgtctctagcacttggagtccttagagatgggaatcttgacagcagaatttcagatgtttcaatcacttgccaaggaagtgccacacttgctcttcttcattactttctttatttggtgaagatgataccgattcaactaatgatcttgcttcctcttgagtgcaacggaaagggctatcagatatctgcacgtttgtgcaatttatagctcctccattacacttcttcataagcaatgctttccaacattgatgagtggatttaataacttcaagagcaaaagccttgtttttgaattctccattaaaagcaaactggttttctggttttccatctggtaccttatataatctaaaccaattaagagtagcttccaggtaacccggtttgaacttcttaacatcatcaatatcatgaaactttgaggcttcaggatcattcgcattgatagcaattaatttccaatctgtttcaccttcatcaataagagccaaaattccaaggatcttcacatgaataacttctccacaagaaagaatctttgagcctatttcgcaaacatcaataggatcattatctccaaagcagttcgtgctcttatctttttcatggggatcttcccaagtctgagggagggtaccataattccatatataacccttgtaagggaagatattcgccacatagcgtagctttccatcctttacatattgtttaatgggattcattggctccttggtggcaatctccattttagcatttgtccaccgaggtatttctacaatcatattaaacagattctcatattcatcatttcgtgctttcttcataggaatgccattttcctctttagagttcaccttcagaggaatatcatgaaagggggaaatgtagtgaccagttacattcttaaagaagaggcggtaattctgcgagcagggctggccgcgctcctcagtgtggtacagggccatagcacggcgcgacccggtccctgcactggtccccaaccgcaggcacgcagcggctggggcacccgtgcgcagcagccgcagcagcgcgctcatggcgtcaatccccggccgtaatggccgaattcccgggcatatgtccggtaccgtcgactg

SEQ ID NO: 132309 - DNA, 1063 bp, Homo Sapiens
gattacgcgccctttatttgccgccagcttgttctaagggggcaatcgccccgtgtttccaccccgagtctcgcaattctgggggtgtaaacacccccgactcatatctctctgtccgggtaacgctccatagtcgccctattggcgtatcccgcgccatatggctcccgaaaaccatgggccgtctcccttgggctcggcaaacttctggcgcccccccgaagtcccgttagctttctgggggcattgttcaaacctgtggggaggggaaaacggggctgccgtccctgggacccaaacggaagcccttttgggatggtggattgcacaactcaggggttaaacttcgtggcgtacccaagcaaagcttctgtggggaaagaccttatcaggagtccccccgctaaagagacgcgctggattaggcatcccgcaaagttccggcctgcctctccgaacgtcagggagcttcccgcagtaggaggtttcttacgcctctaggaaggccggccgtgtgcgcagggctctgccttcccttcctcactgagcttgtgtgaaccgggtaacggcggccgggccggctaatgtgctgcaggccgccgcggggtggccgcttgcactctgccttaccccctcggggagggcggctcggcagggcaacagggcgctatctacccccccagccggcagccctgcgcctctgctctccagctttggggtcttgatcccgccgcctcctcgctggcagttctcgtgactcggtgcagcgctccccgcgggaagtaaggtggcctggaccgcgcggctaccgctgagggcctaaagaagaggcggtaattctgcgagcaggtctgccgcgctcctcagtgtggtacagggcacatagcacggcgcgacccggtccctgcactggtccaccaaccgcaggcacgcagcggctggggcacccgtgcgcagcagccgcagcagcgcagccgacgcgtgggtcgacatatcccagggaattccagaccggtaccagcctgctttttgtacaactgttctatattactatgccgccagg

SEQ ID NO: 132310 - DNA, 478 bp, Homo Sapiens
tttatttataacatttcctttatttatcaacagcaacgatatgacattacaaagtgacccatgacatcttttttaatcttgcacacgcactgcagcaaggttaatcctgtatgtgaaaacctctgagtgactatctcaaagtgtatatgtcatataacctgctgagttttctgatattgtaatactagatacaagatgtctgaataactccttacatttataaattcttatttaattttatagctttaatgcggtccatcatttctaataatgatattggctacaagaataatgatcatattatttatcatataatttaccattttgtaaagcaacaaattgcccattaacaatgaaattgtagttacagcatctaaaattattagaaaattatattagcatggaaatatgttcatgatatatcactgagtgaaaaaaatctggctaccaaatatgtagtctgactcattcttatttc

SEQ ID NO: 132311 - DNA, 694 bp, Homo Sapiens
ttttttttgtgcaccactgaaaattcttatttattcactttaattctgcatttacacaaaaatgctgtaataaaatatctgtacactacttctgttacaaatatagatatttaaagtgactttatatattctaatgtaggagtttcacgctctaaaatgggaatgaacacatgataattcctcaccagttgtctcaataaacagctccatctgtttcccttagtcttaaactattgtattataagatgttaatataaggcaatgaaatgaagttatgttaatccccttaatttttctatcaatttactaatggcatacaaccaaaataattagtaacacattgttctctgtcattaagattaatatgaattgaaaaccaattgcacagcacactaacacatttttaatgttgcatcggttgttaaaaccagcactaaagattctggaacccttctatgttcctctatggttagcagcatagttgctttctagaaaaaccatagtcaacatggggtggcatcatcatttacttatagcaacatgaaaatattttataaaaggtcaaaaataagaatgaaaattgaaatgtgcattaaatataatttctttataaaatttagggacattgcttcatatatttgccatttactcaattgtagaaacaattttagcaggaaaatatatatgcatatta

SEQ ID NO: 132312 - DNA, 503 bp, Homo Sapiens
ggaacgaggttcatctcggacacgtttattgctagaatcaggtcttaagttctaaagcgggtcagaaatatcccgcagtgaggaaatgttgtaatcattgtaaaaataattagcaggtgactaagatcatgaccacaactgacaaagacgtgtgcagatcccacgaaaataggaacatttgctcgactgtcaactttacaaataaaatcgggctccaacccaggagtggccgaggggcactggcgagggaagggctgtcggcgctgccgcccgatgcctagcacgactgagacccctctgccacatggcggggacgcggggttcccaccgcgtggccgagcagaaattccttgaacttctcccccatccaaggaattgtggcatctcggagggctggaccggcacacgccggctcaggagggtgccagggtctgggaatgttctcttcacaacagaacaggaatgtacagtcagcttctgtaaagtgctccgatactcagtac

SEQ ID NO: 132313 - DNA, 840 bp, Homo Sapiens
  misc_feature (37)..(37): n is a, c, g, or t
  misc_feature (61)..(61): n is a, c, g, or t
  misc_feature (143)..(171): n is a, c, g, or t
gaatcttccctctagggaaaacccaaggttattgggncccaatgttccaccttaccccttnctgggggcccggccgccgcccaaaccgaaatggtctaagaaaagcttctcgagggggcccgaggccggcccgacatgttttnnnnnnnnnnnnnnnnnnnnnnnnnnnnngggggaaaagctgtttactgcgttctcccgctgtgtgtaattgggttcagtgtggctgaaacacagctttgccccaggctttggcacttccagccccaggagaggcgctgaaccccagcaaaggaatgtgttccctgtgggcagccggtgcccctggtcactgcagttgcccaaggctgatatttccctgggatccagctggagatgttgggctgggaggccctgtggtcactcatacaccagtggccagcagatcatccacgacgaccaccctctgtcctggctccagggcgtctttctgaatctccagctcagccttcccgtactccagggaataggaggcccacagagtggggcctggcagcttcccccgctttcggatgagcacgcagcccagtccaagctcctgggccagggaggggccaaagaggaagcctcgggagtctaggcctgcgatgtagtcgatgcggcccccgtgggtcgccttcaggtgtcgcgccaggaggccgatggcggcgcggaaggaggcggggtccttcaggacgggcgagatgtccctgaataccacgcctggggtggggaagtcggggaagctgcggatccgctgctcaaccagctgcagctcggagtcggccatggccgcgtgcgaagagccagcggcagcccccc

SEQ ID NO: 132314 - DNA, 868 bp, Homo Sapiens
ccgctcgtgttgtgtctgaggagtagtgtgtgtgttgtagggagacgatgttgtttttttgtgggaaagctgtttactgcgttctcccgctgtgtgtaattgggttcagtgtggctgaaacacagctttgccccaggctttggcacttccagccccaggagaggcgctgaaccccagcaaaggaatgtgttccctgtgggcagccggtgcccctggtcactgcagttgcccaaggctgatatttccctgggatccagctggagatgttgggctgggaggccctgtggtcactcatactgcaggagagagaagaagggtacaggtgccagcttctccctgcccttaagcgaggtcagctccaccaggctcacgcactccaggacctcagcctgcaggcggcccagcagctcacaggcagcgttcatggttccaccagtggccagcagatcatccacgacgaccaccctctgtcctggctccagggcgtctttctgaatctccagctcagccttcccgtactccagggaataggaggcccacagagtggggcctggcagcttcccccgctttcggatgagcacgcagcccagtccaagctcctgggccagggaggggccaaagaggaagcctcgggagtctaggcctgcgatgtagtcgatgcggcccccgtgggtcgccttcaggtgtcgcgccaggaggccgatggcggcgcggaaggaggcggggtccttcaggacgggcgagatgtccctgaataccacgcctggggtggggaagtcggggaagctgcggatccgctgctcaaccagctgcagctcggagtcggccatggccgcgtgcgaagagccagcggcagcccgagcgcccc

SEQ ID NO: 132315 - DNA, 948 bp, Homo Sapiens
agctcgcaatatggtaaagttgagaaccactggcctagaatgagttttacctctaatcttagcccactattctgtgactggttctattagaactagttagctgctagctaacctcaaacttaccttctgatgtgtttataccaataggccaaaatctggtttaattaaactggggatttcaaaaaagtggcctttattttccaatttctatagcaaaaccagccataagtgaacatggatgctcttcaatatttttccagtattaaatgaaaaaagacctctgccccagcccacatttcctttgttgaatgagtagagaagactgagaagtatcactcacccgtgatgtggtttgtcccttttccagccagtgtgttggtaataaaagtcacctttcagagctttggtccctgtaatgcccgtctttcctgtgtccaggaataacctttgctactaggcagtcctctgaaagatttgtagaaggttaaagtggaaagggacttggaagctcatagaatccatgcctcttcttttagcatcaaggaattagaagtcctgagagatgaagaatgttgtcttccaactcaaaccatttctgaagccatttccctgttactgcattgcccacaacccttccccattgctatcctcatcctgctaatgctgtttttaatgactgacagtctgatttgtctttggcagcaaacattttgcttcacagattcctacttaaggaagagaggggctcctcattgtcactgtacagagcaggctggtcagctttacacaggtgtcagatgaaccgtcacagccagatttgcatgttgggctcaggagggcttcaaggtccaccatctcgacgttaggagcgtttcagttctttcatgctcagatacagtgctactgcagctgtttcatcccaatcctattggggttttacatcatcat

SEQ ID NO: 132316 - DNA, 738 bp, Homo Sapiens
tttgttattagagaaaaaggctgctatgaacattcttttgcaactcttttgtgaacacatctattcatagcatctctgttggatatatacctaagaatggaatggaattgctggacattgggtaggtgtatgtgtttggctttaacagaaaatgccaactgttttccaaagagttccagtcggaaccacatcctccagacaattgaaaaccttgacaactttccaaactcctcctagagggttgtattgccttcaactagcattcactggttaaagagtgccacaaggtcctgactctctccctactttcttctctcttccaagcctccctctgtgctgccactgccctcagataggcccctgcatgtgaccaccagtcagacagctgtcagcagctccaggttttcatccttactgcaccaagcctcgaggaaaatgaggcatttctggccactttcccagtctctcctgactaaactgaaggtttccctctcactgctgtttatcatgtgactatctgtcaaccaaccagagatggggggtgcaccacactctgattggtcaaaacttggttacatgcacatcccagaagggaagtggagtcaattccacctacagttctgtagggagtgaggaagggaatctaacagaggaaagtcgtggtgctgttactggaagagtttctgggtgggaagatatcacatagcactacaaggtcatatgctaactgcatgatgt

SEQ ID NO: 132317 - DNA, 770 bp, Homo Sapiens
  misc_feature (215)..(245): n is a, c, g, or t
  misc_feature (550)..(550): n is a, c, g, or t
tttttttattaagtaaaaacctgcaaactctttattaaattctcccatttcatctgtacagaaaaaaatgcacattatgttcagaacatatctcagtaacatctcaaaattacacagcatgaacatgtaaaaacaagggaccaccacgattttatacatagaaaggaaacccatttacaaaagaggcttgttaattgtatttttttctttctttnnnnnnnnnnnnnnnnnnnnnnnnnnnnnnngcctaagatctcacacagcatttgctgtacagactgttttccggatggactggtttgggaacactgtgctgggggaagctgcccaggaagcgctcccgctgccggctttccggaggtctctgcccagtgcactgcagggggacctggagggcccatttctaccaccctagcatgtctgacagaaagccctgctgggctctggggtccagatgtcaactctacattggaggaggcaaaacacaatctagaggcactgtctgaactttcccctggcccagggagatttctccactgcacacagcacnagtgtcctatacatgtgtcctggtggagcagagggagcgggagaggaccacgggtcaggatcctgtcaccaccagcctgagcagacagtcccatctttgtgatccaggtgacaaataatcagtccctggtccccacaatgacctcaccagatggctttggggagctcttcaccctaaagattcggtctggtttgctaatgacttatctattatcatgaag

SEQ ID NO: 132318 - DNA, 1120 bp, Homo Sapiens
gagcaggatcgtgcagcaacgactttgcttaccatggataagtatgcacctgatgacattccaaatataaacagcacctgctttaagttaaattcattacaacttcaagccttattacagaactatcactgtgcacctgatgagccttttatcccaacggatcttatagaaaatgtagtgactgtggctgaaaacactgccgatgagctggcccgcagtgatggaagggaagtgcagttggaggaggatcctgatctgcagctgccgtttcttttgccagaagatggttattcttgtgatgttgtcagaaacattccaaatggtttacaagaatttttagaccctctgtgccagagaggattttgcaggttaattcctcacacacgttcaccaggtacttggacaatatattttgaaggtgcagattatgaaagtcaccttctgcgtgagaacacagagctggcaagtattttgagggtaccatgaagtgaaatggatccttaggacttgaagatgtgatgcagatttgtttctttcttacactgaagattggtgtgatggcagagttttaaaatcgctgttaaatactgatattcagaaattttcaagccataattcatatatatgtattttttcctcccaagccatgtctattacagttttgtctgtaagcagtggtgctttttaaaataaagaacacttatacccatggttgtaccagtcttaatacatattttaaaacatattaatatgataaccttaaaatattttcttaaaattctttggcagaaatatttcattcttttatagtcagttctgccttgtcttaaatatatatcaagccatttagtaatattttatatctttttgaaagagtggtaaatcccaaaatttcccagtttcatacatgttaagaacaattctactttgcctcatatagacagttttaaacacaaacaggaatttttgtatattcaaagtaattaatttggcttcctggcataccttaggtttgagcatcatatcatggccatctccagaaattgaattaattgatgatcgttcttttgtaccaaatagatgatcacattgaactactgacaaaacacatagcctaccc

SEQ ID NO: 132319 - DNA, 654 bp, Homo Sapiens
gtgattgagctctttatttttcagcgttttccagaaagacagaaccagcaggatataagaaagggggtttattaggggagctggctcacaggctcacagaggtgaggtcctctgacaggtggtctgcaagctggagaccagagcatggctcagtccaacttccagagcctcagaactagggaagccagccaggttcagggaagccagctcaggcccaagagttcccaaaaggccgctagtgcgagtcccagagttcaaaagcagaagagccaatgtacaaaagcaggaggagaaaaagcactcctctccaaaaggtagagaggaacagcagagagagagtgaatcccccttcttctgcccatttgttccagctgggcccccagccgatgggatggtgttctgcccacactaaggaccggtcttcctctctcaggccactgactcacaagtcctcccagacacaccgagatacaatgcttcaccagccatctaggcatccctcaatccagctcagttgacccctaaaattaaccatcataagctccctagagggacaggttgggggaggaggacacttcaaggtctaggtctatgcagaagtttcccagaccatttgagaacacaacagttgaaaaccaaacacgaaaatcaggg

SEQ ID NO: 132320 - DNA, 1124 bp, Homo Sapiens
tccgccttggcttgtccagattagcacgagttaaacctttgcatccaaatgccactagcacctgagtgtggtacaggaggaatgtttggttgggagaatcacagctttacaagggtgtttatatttgatttgtgtttatatttgaggcaggtattgtaatataaaggaatccattaccatgtcctataaatgacctctagccattttatgattatgttctctgtaaaactcttcaagacttcaatgagaagtttgtttataagaattatcttctcatacctttccttgtgaagagcgtattctgtttttctatcagttcgacatgaagtccacatcacatgctgttcttttctagttacatgatgtgcctttctagctttgtctagtttatagcaccttaactttaactgttcagttttatctggcagaggaaaacattcttatttctttcagaagacatttctgaaatcttataagctacttaagctacgttgtcagttttatcgcaaagatgttttgtattttagccaaatctttttatagtacaaacttagaattattttacacactaaaatggttgcagttttatggcatatgtctccgatttagatggttattctctagaaaatagtatttaaagacattttatgaaatcttcattgtcaaaacctttaataaaagtggaaatattttgaaatgccctttttcttgataccactcatccacgtgttcctgattgtccacatttcatgataaaatgagagctctgcagagaatgttagcctttctgttgtaaatgtaatcttcaagtagtcactttttgttaagttctttagaaagtagttgtcaagtacttagtcatccctattatgatatgagatagtacagcttttcaggaagcttagatctgaatttactttgaaaaacaattgtaatgaatattttatatttacattgagaatttcaactagcttctgatcaatttttaataaaaaattttcaaatcatgttagctgttaaaaaatgtataataactcagtttttcttggtttatggaaatatctatattaatgtgaaaataattaatttagaattgtgattaaagtgagcatttgtctaaaaaa

SEQ ID NO: 132321 - DNA, 982 bp, Homo Sapiens
  misc_feature (959)..(959): n is a, c, g, or t
tttcagatggaactatttttaaaactagactgggtggctccaaagcttttaccccataaagtgccttccccaaagccccatttggtcttgttctgggtccctacccttcttcactggcttctatccatcttaccaaagctatgtgaggctggggtctttatcccattttggcatgagatctatttactgctcccatcttccacacagaatagctaagcaagttttcactgcctccatttgttaaaaataattgttcttttatttctttggaaagtagtgggccctgccctatggattttcaggtcaaactagggtaatgaatgctcccctagtctttgggctggagcactatggtcccagctttcccagggcccagaagcaattcctgtattgtccaacccaagcaactaggacccaaattgtctgaaggctcctatcaggccttctctcctgaccacccacttcccaatctttcctggctttccctctgggcagggtatttttttcttctaaaaccagtgctggaacctgtgctgtgcagaagagaggacaagacgagggatgttcccaaattcccataagaggacacagcccctcagtcagtccttcctctctgctggcttcagtctgcactcctctgcaagcccccactgtgaggcttgaagatggacaagaggaccctcataaaagggaggtgagagataacacaccatcccaacccctcctcaggacatactccttgtagtctcttgtcctagttctcaagggagcccttcagacagggatggggaaggctaggtgagtgggcaagggccccctgaccccagccctgcgaggctataccaggggagtgtccattagccccatcagtgtggcatggccgtgatgcgcatgctctgggaagcgatagggtaagtcaccatgggagtggtggtgtggctcattgtgattccctgcangggttgggccatcgatacagcac

SEQ ID NO: 132322 - DNA, 1538 bp, Homo Sapiens
  misc_feature (60)..(82): n is a, c, g, or t
gtgccaagctaaaattaaccctcaactaaagggaataagcttgcggccgcctgctcaggnnnnnnnnnnnnnnnnnnnnnnngtcacagccaattttcacactgttgtttcacattctcacagccctcagcacaggtcacgtcccagcccagctctgggactttggttcagggctcagagcctctggtctgggctgatcgaaaacctcctttgaccctgtggcagcaggcggaccttggctcttctcgtccttacccagagctcagggcagtgccccgtgcagtcgccccacttccacgaaggcctccacgcagcggtcaatgtcttcctcgctatgcactgctgagatctgtacccggatccgggccttgcccttggggaccacggggtagctgaacccgatgacaaagatgcctctcttcagcatgtcatccgccatgcgagaggccagccgggcatcacccagcatcacagggcagatggggtgactggctcccgagatagtgaagccagcagcttccatcttactacggaacctctgggtcttggcagccatagactggacaatggtgttactccccatcagcagatctagggccttggaggcgcagccaacgacagcaggtggcagactgttggagaagaggtatggccgggcgcgctgccgcagcagggacaccaggggcccaggccctgtcgtgtagccccctgatgctccacccagggccttccccagggtggagttgatgatggtgacctggtccatcacacccagcagctcatctgtgccccgtcctggtgggccccaggaagcccagtggcatggcattcatccatgaagaccagggcaccatatctagaggcgaggcagcagatctcctgcaggggtgcgatgtcgccatccatggaaaaggccccatcagtggccaccaggcgcagccgatgcttctgggcctcctgcagcttggcttctaggtcggccatgtccaggtggcgatagcggtacttgtgggccttgcacagccggatgccgtcgatgatggaggcatggttcagctcgtccgacaggactgcgtcctctggggtcagcagggcctcaaagaggccggcgttggcgtcataacagctgggatagaggatggcatcctcccgctggtggaagcgggctatttttgcttctagattcttgtggatgctctgggttccacagataaagcggacagagctgaggccagctccaaactcctccagagcctgcagacctgcctggatcacctcagggtggctgctcaggcccaggtagttgttggcacagaagttaaggattcctccggagacgccgtccacgcggatgtgcggcccctgacgggacgtgatgacccgctcactcttccaagtgccagctccgcggatgccttccagctccccctccagaatgccacgcagctgggccagcgctgactgtgcgcggcggccgcggggcacccagaagagtgcggcgcgccaggcgttcccaggccacatcgctcctacctccc

SEQ ID NO: 132323 - DNA, 648 bp, Homo Sapiens
  misc_feature (176)..(224): n is a, c, g, or t
gggtggagaaagttcccaagccccctatgttcaagtggacccggaatttttcccttagggaaaaccacgcttaaggggcccattgttaccctttaccgtatcttggggcccgcggcgcccaaatggaatgggttttggaaagcattctccaagggcccgaggcggcccgacacggnnnnnnnnnnnnnnnnnnnnnnnnnnnnnnnnnnnnnnnnnnnnnnnnnaaaaataaaattgattcataaagtgcaagaagaagtcatttctttccggtagtctatatgcatcttcaacaagcaacactccaggaagagccggccatggcaggcggggactgtgtggcaagcctggttctgggcgccggcggaccggggctccggcgcggacatggcaaggtggccatgagggggacagaatggggcggaaggcgcagagtctcaggccaggtccagcttcttctgcgtcgccgccagcttgtcctgcagcctccttttcctccagtccaagtagcgcctccgcagtcggttcgcctgccagcccaggagtactccagaagcgaaggctactagcacggacaactgcagtgtcctctctgacacatccgccatggctgccgccggcgtgcagcgcggtctacggcgcggcccc

SEQ ID NO: 132324 - DNA, 852 bp, Homo Sapiens
ccctctcctttgtcaagtttattttattaaaatatacaggactgaatattagtggatgctgagaacaggaaccaccctcccaggccgtggccaagggagacgcttctgccatgcagacatgcggccggtctgtgtcccagcgtgggaggcagacccctcctggttgggctgtgcagccagtctggccccaaggccaaggccggcaggggtgtggtggtgatgctctcctgaggccttggccttagaggcagagtgacaccagctgggagggctgggcagcgggtgaggggagggagaagatccctgagccagggaaagctgatgccctcctggaggcagaggcccccagtcagcctggagcctggagccaggcgtccatgcagctccgcaggggaggccaggctgtgtgtgaatgccgaggggcccccatggcctccgccatactgcctttcctctgagggccctgctcaccctggggctagcctcttggggcacacggggactccccgggccagccctgagtggagctgggctggctgtgatggaatgtattatgtgggaatgttcctggaggggccatgcggcctgggaccgggttccttctgggtgaggccccaatcaggcgggagcagcatctctctcctcctgggggtttctgctgaccacccagccacagccctctcagccctcaccattggctccagctttgggctggcattctccatccccagatggaggggacagccaagcagagtccccagggtttgtgcttttgaatgttggtcagccgggctgggctttggggccccactgatcccaggcacagagcagacccccaaggcctcttcccca

SEQ ID NO: 132325 - DNA, 1636 bp, Homo Sapiens
  misc_feature (176)..(203): n is a, c, g, or t
tatattagccaacaatgttttaatatactttataggccataaggttttttaacaatattttatttactcatctacccataaaacttttctaggaattcaacaataaaccaacattaaaagctttctagcataaatcaccaatttccaagataaccacaggccatctttaaaagacnnnnnnnnnnnnnnnnnnnnnnnnnnnntgaaaaggtttgtggttatgtttctttaaaaagctgtttaattatatatgatgacatttttataggtgaaatgatttgatgtctaggattttcttcaaaataaggtaagggtacagaagatacatgataggtcgtcagttgataactggtgagctggatgacaaatagaccagattgttttactccttattctaaatagtaaaaaatctatcaccatgtttgggcacaagctttctctgcaaggaaatattaaatatatttttcagcactttttctatttcttcctcactcagagtcttgaactctattagatctgtattgtccttataattgaatctcctatgggtgagggtgaagcccaccaaacagtgaaccccatctggggtctgcaaggaacacaatgatttactagtacacacagatgatggagatgtctgcaggtatgtattcatagactcaaaatcttcaattgttcgaggcttaggagtaaaggggtggatttttcggtatttgctgtcttctaggagatcagaatgaagaaattcttcatttggaatgtactgttcccttctgatttggtctagataccagaatccattctcttccgtcaaacggaagacacaaggcacctgaggctgatccttcccagaaattaactccagaggctgccacatctggtatgagcgtccaaacccagcatcgacaatgtagttcctgccatcaatggtcacctgcaggagaaggtgaatcatgccagtgctgtattttttggctggagtgctgtaaacataccctcccaacatcgtggtctcaaaaccaatagtggtcagagcccagtacagaagatgattgacctggagacaccatccaccccgatttcttctcacaacttgatcaaaaatggcctctaagcctaagtccatggcatccccacaatggatgttaaggttctcaaagggaacagctcggatctggtgttgaagaatgtcagttaatgtttccaagtccaatttgttcctagacttcttatagccaattctttcaagatatgcttcaatgtccatgatcccctttcttagtaagttgaaagtaggttgatcttcagttttaatccagaagacagattgctgcttcttcctggcttgaattcataaaaaagggtggagagttgtattgtccgattatccccatgccaccggctgggaggactgtgctcttatatttcacctggttcctgctctctgggagcctgacactagatgtcccatgtgtgatgtggaacgtgagagcttggaacaggtccaggaaaagcagaactggtaacacagttgctttctgttcctgggatggtcactggaagttcagatcctgtcgactgggtcaatctgatttgtgcagtttggcctaggctttattgatcccgggaattccgg

SEQ ID NO: 132326 - DNA, 1608 bp, Homo Sapiens
  misc_feature (273)..(273): n is a, c, g, or t
  misc_feature (580)..(589): n is a, c, g, or t
  misc_feature (617)..(643): n is a, c, g, or t
  misc_feature (961)..(963): n is a, c, g, or t
ttcctacgctgttcttcgggtcatggtgtctagttgcttctcagggtcggcagtcgttggctgtggtgcctggtaggctgcctctcgtcgtgatcggcttgatgtatcacctgacgtgttcctggtgccatggtctggtttactggctctgtctctgttccgtgcgcttgtggttcgctctttatttacaacaccccacgtaaagttgtccagaaacagtcccgggtaccaaattttcgtcaccgcgagacgatatgtgcggtgtggagttancagccgataagcaccgctcatgttaattatgtccccctcgcggccagtcaatcgccccctgggggggttgggcgcccgacgatcgtcgcaccccgcgccgaatgtgggggtctctgcccccagaggtctgccgcgaacgcttcgtttccgaccaccgagacggtttgttttaaggccgcgcccggtgcctgctggctgttaattatacggcgctcccctttaaggggccacccttgtttcacaaaaaaccgtggggatctctcatattcttgggcgcctccctgagggataaattttttatggccgnnnnnnnnnnttttgttttgttgttttgttggtgtggnnnnnnnnnnnnnnnnnnnnnnnnnnnaatcgtttcaaactttattacttaatgaaacagtttctatatactgcttccaattactttaatccttttttctcgttaaattttttttgttgttcttcagttgagctgagatacttttaattactttttattaactgcttccagaaaccgtaacaggtgcaggaatagattgatgatatccaagtagaggctgatggcagctaatacgtactcttcaggtgacagtttatgcatcagtgagtgtgtgtcatagatgatgaatccacagaaaagaagggctcctgcagcggctaagaccaactccattatctcactatnnnaataaaaacttcaagaatcctgacaggcacaatatccacaaaagagcaaacagccctgctccaaatttgctgaaatccttcttagattgtagagtatacacagtcaaaccaaaaaatactgtagtagtcagtatgaaagcttgcagaataatatatacatcatagaaagtaacaacaactgccacagtcagagcttccaacagcgtaaatccaaaaagtaggtacaggttaaggggatacttatgtctgtttaaaatcaacgcaaaaatcaaacccagagatccgagggcaaacagcaaaattaaggcaggactctcatgtacaaatgtccgtacagactcaaagtataaaaaaactgttgaagtcactgtagttaagagaacctgcagagaaagaatgctgtagacttttctcagaaaggccattcggatgtgcacggtggcggaggccacgctgctgccatagttgaagtcgtcctcgatcgaggagcgagggtaccgggggtcggggtcagccatgatggcaacagcacccctaccggtcccggtccactaaccgcaaccgcctcctccccacttccgcgaggaagagcccccccggccgtaatggccgaattcccgggcatatgtccggtaccgtcgactg

SEQ ID NO: 132327 - DNA, 515 bp, Homo Sapiens
  misc_feature (218)..(422): n is a, c, g, or t
gttcttactgtctttaatagtttcctaacactgccacagaagatatctgcttatatctcactgtctaaagttcagtcacatggccacaatctcaaggaaggctggggtactttaatctttattgagggcagtcatgtgcccagctaaaaccaggggttctattactaagaaagatacagctgccccccaccccaaaacaattcaataaaaatacaaannnnnnnnnnnnnnnnnnnnnnnnnnnnnnnnnnnnnnnnnnnnnnnnnnnnnnnnnnnnnnnnnnnnnnnnnnnnnnnnnnnnnnnnnnnnnnnnnnnnnnnnnnnnnnnnnnnnnnnnnnnnnnnnnnnnnnnnnnnnnnnnnnnnnnnnnnnnnnnnnnnnnnnnnnnnnnnnnnnnnnnnnnnnnnnnnnnnnnnnnnnnntacatgtttggtagagaactagttgtctctacctagtctccattctggtcacttctttagtttcctaatttcagagtaaggccagtctccttc

SEQ ID NO: 132328 - DNA, 1299 bp, Homo Sapiens
ggccccggcccctccccaagtcctgccccaggctccagcccctgcccctgctccagccatggtatcagctctggcccaggccccagcccctgtcccagtcctagccccaggccctcctcaggctgtggccccacctgcccccaagcccacccaggctggggaaggaacgctgtcagaggccctgctgcagctgcagtttgatgatgaagacctgggggccttgcttggcaacagcacagacccagctgtgttcacagacctggcatccgtcgacaactccgagtttcagcagctgctgaaccagggcatacctgtggccccccacacaactgagcccatgctgatggagtaccctgaggctataactcgcctagtgacaggggcccagaggccccccgacccagctcctgctccactgggggccccggggctccccaatggcctcctttcaggagatgaagacttctcctccattgcggacatggacttctcagccctgctgagtcagatcagctcctaagggggtgacgcctgccctccccagagcactgggttgcaggggattgaagccctccaaaagcacttacggattctggtggggtgtgttccaactgcccccaactttgtggatgtcttccttggaggggggagccatattttattcttttattgtcagtatctgtatctctctctctttttggaggtgcttaagcagaagcattaacttctctggaaaggggggagctggggaaactcaaacttttcccctgtcctgatggtcagctcccttctctgtagggaactctggggtcccccatccccatcctccagcttctggtactctcctagagacagaagcaggctggaggtaaggcctttgagcccacaaagccttatcaagtgtcttccatcatggattcattacagcttaatcaaaataacgccccagataccagcccctgtatggcactggcattgtccctgtgcctaacaccagcgtttgaggggctggccttcctgccctacagaggtctctgccggctctttccttgctcaaccatggctgaaggaaaccagtgcaacagcactggctctctccaggatccagaaggggtttggtctgggacttccttgctctccctcttctcaagtgccttaatagtagggtaagttgttaagagtgggggagagcaggctggcagctctccagtcaggaggcatagtttttactgaacaatcaaagcacttggactcttgctctttctactctgaactaataaatctgttgccaagctggaa

SEQ ID NO: 132329 - DNA, 227 bp, Homo Sapiens
gcttagcttggcaacagatttattagttcagagtagaaagagcaagagtccaagtgctttgattgttcagtaaaaactatgcctcctgactggagagctgccagcctgctctcccccactcttaacaacttaccctactattaaggcacttgagaagagggagagcaaggaagtcccagaccaaaccccttctgtcgtcttctcgcagccgtatagtagtagtaggc

SEQ ID NO: 132330 - DNA, 980 bp, Homo Sapiens
gggggtgcgcccccctggggaagggtggtttggactccagccgggggtcagaaagattcccaggtcgcacaaagaagggaaaaggtcgtcaattttcccgaaaagaaggcccattgggggaggccccgggggcccccccattggagcctggagcttggttccgggggggcctttggggcccctttccacttgggcgagttagtagcctccgggttgctccatcggcctgggttcagttgtgtgggggggccacaggtatgccctggttcggcagctgctgaaaactcggagttgtcgacggatgccaggtctgtgaacacagctgggtctgtgctgttcccaggcaaggcccccaggtcttcatcatcaaactgcagctgcagcagggcctctgacagcgttccttccccagcctgggtgggcttgggggcaggtggggccacagcctgaggagggcctggggctaggactgggacaggggctggggcctgggccagagctgataccatgtctggagcaggggcaggggctggagcctggggcaggacttggggaggggccggggccaaggccgaggcctggctgatctgcccagaaggaaacaccatggtgggaaactcatcatagttgatggtgctcagggatgacgtaaagggatagggctggggtgctggcttggggacagaagctgagctgcgggaaggcacagcaatgcgtcgaggtggaggccgggggtcggtgggtccgctgaaaggactcttcttcatgatgctcttgaaggtctcatatgtccttttacgtttctcctcaatccggtgacgatcgtctgtatctggcaggtactggaattccatgggctcactgagctcccggtcggaaggccgccgcagctgcatggagacacgcacaggagcctgcagggtggggtctgcgtagggaggcctcgtctgagaacgccacccaggcctcgctacttagga

SEQ ID NO: 132331 - DNA, 695 bp, Homo Sapiens
ttttgaagattttgcctcaggcaactaaatttattagcaagaaaaaatttttgtcagcccagtgctgaccaacaaagtacgttaataaaggataacaaatctgtcacttaattcataaaacatacctcaagcagttacaactaaaaataaagttggatttttgtttaatttaaaagcctcaaaaataacaagcaatgtgtttttaaacatgtagtagacacaattgtctattatacaatatacactgtacacaagtagagcttgggccgggcaggggtgaggtgaagggagagggaggaggtgcaggatgtgcaggtgctgttatctgaatccagatttgagtttaaatgctgtgtcatttagaaaagggaattgctagagtgagaaaaaattcatatgctcatcattgcccccaaccctcaactgaaagcaggcatcagggaggtgaataacaaggaaaaggaagaagggagcaattaaataaaacttctttaaagcacacacagtacacagtgttcatcatctgaagtagagtataaggcaacgttctccatagaaaaagagggggatcaggagtcggtgggtgtctttactttttacatagagctggaatgtgctggaggagaggttgtggcggggctgggcacatggagtggaggtggccccgagtttctccagaggtgggtgccaagccc

SEQ ID NO: 132332 - DNA, 1606 bp, Homo Sapiens
ttttttccgtgtccaacagccaggagcctccaccctccaggagggaagggatggacagagccacactcgccgtctttattttgcactcaccctgggtgacactgggcaggccgctcctgcccacagccagactgaggaagaacacagcactcggcaggcccagtggggtccgtgcagggaggaccccaggaccagccttactcccgagcaggggacacagggccccacagagaacccctccgggaggttctctcctggctgggggagggctctggacccccacaaacactccccaacttgcggggctggggcataaaaacagccactcccagcaggccccctcagctttttgcatcagtcagctccctcccgggggattagggtgaggtgaagccaggcccaggcgtggggtataggtcttcccccgcaggcctcagccctgtcccgaggctgcatcacaatccagggcccccgctggcctttgggaacatggcctgggtcttcctcaaggcaagatcagccccagaccacttccggggtcacggggtcacggggtcacagggcagaagccagatggcagccatggctgacgggcctcctcctcgatggggcggagacagccacggggtctcccgagggtcccacagggctgtcctcatgcagcccaagccagcctgagcactggagccccaattcccaaccaggtctccctcagaccccccagaaagggcctcgaaaggccgccgctgcgccctgtggaaaggctgccgctgcagggcctgggccagccgggctgccagactcccctccaaagcctccggatgcctacgcttttccagacatagaggaaagtttgtcttcgagaaaacaaagtaaatagaagaaccccaaagcaaagcaaacccaccccccagatcagcagcatgggagccaacaggaggccactcctccagcaccaggggaccagccgtcccgacggcagcgcggctgcgcctacgtgatgtccctctgccgcggcggccggtgcacattccgcacgacacacttcaccatccactcgatgccctcgcgcacccctttgcctgtgagggccgagcaggcctgggtcaggcaatctcgcctgccgatcttgctggtgcagtcgctgaaggccgtcttgatgtcagggattgagaggcacgtctccacatcctgcttgttggccagcaccaagacggggacaccgcacagcgcctcgctggtcaccaccttctcaaacgcctgcttggactcagccagcctctcctcgtcggtggagtcaatgacgtagatgacgccgtgacactccgcataatacttgtcccacaaagactgcagctcttcctgccctcctaagtcccagaacatgagccgagcctttcccacatccacagtgccgatgtttaggcccacggtggtggtgattttggatagactcatccccttgtagttcttgttaaatcgggttttcgactgctccaggaaggtctgcgtccgccgcgccctcgtgccggattcgccacccaggcctcgctactttagtgtttgttaggtggcggttgggttggataaaggaggatggagatgg

SEQ ID NO: 132333 - DNA, 1156 bp, Homo Sapiens
  misc_feature (223)..(223): n is a, c, g, or t
gggttccagccaaacccaaatggcagccatggttgcgggcctcctccttcgatgggggcgaagcagccacggttttccccgaggtccccacagggcttcctcatgcagccccagccagcttgagcactgagccccaattcccaaaccaggtctccctcagacccccccgaaaaggggctgaaagcccgccgctgcgccctgtgaaaaggctgccgctgcaggncctgggccagccgggctgccagactcccctccaaagcctcccggatgcctacgcttttccagacatagaggaaagtttgtcttcgagaaaacaaagtaaatagaagaaccccaaagcaaagcaaccccaccccccagatcagcagcatgggagccaacaggaggccactcctccagcaccaggggaccagccgtcccgacggcagcgcggctgcgcctacgtgatgtccctctgccgcggcggccggtgcacattccgcacgacacacttcaccatccactcgatgccctcgcgcacccctttgcctgtgagggccgagcaggcctgggtcaggcaatcgcgcctgccgatcttgctggtgcagtcgctgaaggccgtcttgatgtcagggattgagaggcacgtctccacatcctgcttgttggccagcaccaagacggggacaccgcacagcgcctcgctggtcaccaccttctcaaacgcctgcttggactcagccagcctctcctcgtcggtggagtcaatgacgtagatgacgccgtgacactccgcataatacttgtcccacaaagactgcagctcttcctgccctcctaagtcccagaacatgagccgagcctttcccacatccacagtgccgatgtttaggcccacggtggtggtgattttggatagactcatccccttgtagttcttgttaaatcgggttttcgactgctccaggaaggtcgtcttcccagcattgtccaggcccaggatcaggatgcagtactcgtccttctgaaacatgtacttgtacaagcccgacagcagcgtgtacatcctgcgtccgccgcgccctcggagccgctgctgctgacccccgctgacctccgctgaccccgcgctaaccccgcgcggcgcctgaccctcgtgccgaattcgccacccagc

SEQ ID NO: 132334 - DNA, 1110 bp, Homo Sapiens
agcggagcgcggaggccgctgggacgcggttcagctcattccctgaggccggcccgcgtcccgtcaggcgccgcgcggggttagcgcggggtcagcggaggtcagcgggggtcagcagcagcggctccgagggcgcggcggacgcaggatgtacacgctgctgtcgggcttgtacaagtacatgtttcagaaggacgagtactgcatcctgatcctgggcctggacaatgctgggaagacgaccttcctggagcagtcgaaaacccgatttaacaagaactacaaggggatgagtctatccaaaatcaccaccaccgtgggcctaaacatcggcactgtggatgtgggaaaggctcggctcatgttctgggacttaggagggcaggaagagctgcagtctttgtgggacaagtattatgcggagtgtcacggcgtcatctacgtcattgactccaccgacgaggagaggctggctgagtccaagcaggcgtttgagaaggtggtgaccagcgaggcgctgtgcggtgtccccgtcttggtgctggccaacaagcaggatgtggagacgtgcctctcaatccctgacatcaagacggccttcagcgactgcaccagcaagatcggcaggcgcgattgcctgacccaggcctgctcggccctcacaggcaaaggggtgcgcgagggcatcgagtggatggtgaagtgtgtcgtgcggaatgtgcaccggcggcgcggcagagggacatcacgtaggcgcagcgcgctgcgtcgggacggtggtcccctggtgctgaggagtggcctcctgttggctcccatgcttgcttgatctggggggtgggtttgctttgcttggggttcttctatttactttgttttctcgaagacaactttcctctatgtctggaacaagcgtaggcatcccggaggctttggacggggagtctggcagccccggtggcccaggccctgcagcggtgccctttccaccagggcgcagctggcggcttgcgagggccttcctggggggtctgcagggaacctggttgggagtggggtgcagttgtcagctgctgtggtgcttaggacgctggggacctcggagaccga

SEQ ID NO: 132335 - DNA, 452 bp, Homo Sapiens
tttcacgttgctgttgttttaagaaataaaacaaaacaaaacaccacagatcaagttttctaacacctcagtttcaagattgcacgtttcacatttctcagtaatttacaggcgtccacagcgagatgttgcttagtgctagctggaggggcaagctcaggtctagaagggagagatgggtccgggtggagcaacacagttgggccccagggagtcttggagggacccaaggaagcagagggttttgtctccagtcctttgggaggggtcctctcctcctccaggactcatggctctttagcctagggatgggggaggccaggactgttggcagcaacctcaccaagcctggatatgggttccagagtttttttccagcttttccatggaaggggcagtttgatctaaaggggaaatcttccccactctagccccagttgggtggtggtggt

SEQ ID NO: 132336 - DNA, 1005 bp, Homo Sapiens
tttcttgctgtatggcaaatctcaaactacagagttctttttccaattcaagtatttcatgctttaactgcgattttatttcttctttttcagatattctcttttgtagtacactagccttatttttcagttttcgaatttttactctaagttgctcacagtggttatctttaagttttattaatcttttccataaacaaaatgtatttttaattttcaataggtgaacacaatctttacacttcatttcatgttgatcaatgagtaatatgacattcttacaattacagcaaagcgagtcaccgtcctctgagactgtttgagatgactgaattatgtcatcaaggtcatccctagaatgtatttggtttttcacctgtggctggttattttcatattcttcaagcctcttttgctctccctctgatgccatttctaagtcttgttctggtgtggatgtttgtacctccttcattttggtggctgtattcagaacagaatctttattttcaattgtagccttcaagggtgcgcagattctcaggatactctgttccagatttccaccgcccgttattcttgtggcactattcaaaagagaaactttcttttttaatataaccttctgggccgattgtttctggagggacactggtccagatttttctcctcgttccgaattcttggccttcaaggccaattccctatagggagtgtattaattcgtaacatgtcaacctgtttctgtggtaaatgttatcggccaaattccacaaacatacaagcggaagacaaatgtaaagctggggtgctaagatgagctactcaataattggttgcgtcatgccgctttcaatgggaactgtcggcagtgcttaaaacggcacgccgggaaggggtggcttggcgtctcgctccgcactatccggccggcttgctggggagttaaccacaagggatagttcacaacgggaacaggaaatggcaaagacaggcaaactaagg

SEQ ID NO: 132337 - DNA, 1076 bp, Homo Sapiens
  misc_feature (673)..(729): n is a, c, g, or t
  misc_feature (956)..(990): n is a, c, g, or t
  misc_feature (994)..(1036): n is a, c, g, or t
ctctttttggtttacgctgtcttgtttcgtccgtccttgtggtgtcttcttctgggctctgtgggctttctttacgctgtgtagtgctcggtgttgctttcctatctgtgtggtttcatggtctccctgcagggcgcgcctgtttgtcctggccctggtattcagtttttttgtcttcttctgatgggatgcctttggtcatggtccctttgggcagccttcagtcgaccatggtatgattgcctttctgtttcccatcgttgcctgcttcgctctttgcttctccagtttgtaacggagcgttgtgttgtcatctgtcagagcagctagctgtccactattaccaggctatcgtttttgctaatgtttccccattccgttttagagccttttgaaggtcttcatgctttcttttcacaatttcaaagtcttgttaagtatttcttttccaggttttggttttttattgtgtctttttccagcctgagcctggcaatttcatcttgcatcaagcggttttcatgcagcaggtcttctttttcatcagtttcagaaacctgatttgaattatttcctcctgtcttcaattccacctctgctgatttgagagccggtttaattggttttgtcacatcagcttctatcctatattgctcttctgttattcttaacnnnnnnnnnnnnnnnnnnnnnnnnnnnnnnnnnnnnnnnnnnnnnnnnnnnnnnnnntgtatggcaaatctcaaactacagagttctttttccaattcaagtatttcatgctttaactgcgattttatttcttctttttcagatattctcttttgtagtacactagccttatttttcagttttcgaatttttactctaagttgctcacagtggttatctttaagttttattacccggccgtaatggccgaattcccgggcatatgtccggtagccgtcgactgnnnnnnnnnnnnnnnnnnnnnnnnnnnnnnnnnnncggnnnnnnnnnnnnnnnnnnnnnnnnnnnnnnnnnnnnnnnnnnnaaaccgcgatgcgccatatgatggtcgtacgtcttcgggt

SEQ ID NO: 132338 - DNA, 761 bp, Homo Sapiens
  misc_feature (15)..(15): n is a, c, g, or t
  misc_feature (43)..(43): n is a, c, g, or t
  misc_feature (57)..(57): n is a, c, g, or t
  misc_feature (87)..(87): n is a, c, g, or t
  misc_feature (99)..(99): n is a, c, g, or t
  misc_feature (105)..(105): n is a, c, g, or t
  misc_feature (107)..(107): n is a, c, g, or t
  misc_feature (114)..(114): n is a, c, g, or t
  misc_feature (319)..(564): n is a, c, g, or t
  misc_feature (582)..(617): n is a, c, g, or t
tccagactggtatanctggggaatcttcaggccttttcctagntcccacatcaagtntcggatcccattccaggtatgatacatganagggaagacaantgcaancntagctgngtggatctcattgttgatatacctgaatttactttgtaagagattttaacttcacttcatgctgatgatgtatcaaattcattttatagaaagatttaaagtttttttctggaagtgatatatgtcaaattactatttcctactgcagtatttgagcagggacagtcattttttaaatgtttttggccgggcgtggtggctcatnnnnnnnnnnnnnnnnnnnnnnnnnnnnnnnnnnnnnnnnnnnnnnnnnnnnnnnnnnnnnnnnnnnnnnnnnnnnnnnnnnnnnnnnnnnnnnnnnnnnnnnnnnnnnnnnnnnnnnnnnnnnnnnnnnnnnnnnnnnnnnnnnnnnnnnnnnnnnnnnnnnnnnnnnnnnnnnnnnnnnnnnnnnnnnnnnnnnnnnnnnnnnnnnnnnnnnnnnnnnnnnnnnnnnnnnnnnnnnnnnnnnnnagagcgaaactctgtctnnnnnnnnnnnnnnnnnnnnnnnnnnnnnnnnnnnnatgttttcacgcctgtaaacctagcacattgggaagccaaggtgggaggattgcttgaggccaggagttcaaggctgcagtgagctatgattgcacactgtactctagcctgggagacagagtgagacactgtctctaaaaaaa

SEQ ID NO: 132339 - DNA, 1963 bp, Homo Sapiens
  misc_feature (46)..(46): n is a, c, g, or t
  misc_feature (69)..(69): n is a, c, g, or t
  misc_feature (77)..(77): n is a, c, g, or t
  misc_feature (113)..(113): n is a, c, g, or t
  misc_feature (209)..(218): n is a, c, g, or t
tccccttcttcgaccccccagctttaactggctgggccaacaactngaaagtgacagatgagataagtnctctattnccagagttcccaaaaaactatcaaaaccagcatgcntgctaaagctggccctatagggattttaaaagcagcaagttttctccattaaattatacatttttgccagggttttcaacaatcccttcttttttnnnnnnnnnnctctatgcttcattcaccccaagcctataacctcaggtcatcatcccctagctgtcaccaacactggtcctctgtgcccctcaatgaatcataatttgctgaactgtaccatgaagcttataatcagtccttaatgggattttggtgcctataacccaaaagcactctacatgcgtcacttcttttctttttctccttccttctctgaggcttttctgtgatatttaaatctctggctaagttctatctgattccctgaaaacttttccaatgatgagatgtaggagaactgtttccctcctggtaaaggtcagattgcggggagagggaggatgtaaatgcctgagacccgagggaagaggaggaaattggttccttcccaacagccattttcttggtttctctagatttcaaggagagtcaaagataaaatgagtatttaattcagtttcagaaaaaaagggtacattacttcgatgagaaagcataaaattaagaggcttttctggaaatccaagaaaaagaaataaccattaatatgttcaatgataattttctagatcttcctcgtgtccaaagctatatattttctcctcaaaagcagctgctccaagaactaactagccctctttatctccctctagctgggacagactaattcccctccacccccacctctcttctttcaataacactgtgtaggtgttaatggcctgggctctcaccaatgaagagaattgtcctttaagccagcaacccacaggcagtggcacccaaagcctcaccaacccaccccccaacccggcccatccccagggcagaagccacagagctggcattgtttccactgtctcaggaagaaggagccaaaagctgaccctcagcacaaatcaaagcccaatatggagagagaataactgcttctaggccgagagtaggcaagctgtgggcaaaaaaggggagtttttgcagccacctcatctttagaaacaaggggaaaactagacccttttccactattatggtctaccaggtactctactgctccaaggagatctgaaaatacaaaaggatctaaacaaataaggagaacttttcccaggctggagataagaatgacaaacagaaagatgggtgaatgtaataatgtgtaggaagatgatgctgggagcctcctttcttcacatggctgccagccccatagaggacaacacagtaagaaccaggacaaccactccagactggtatagctggggaatcttcaggccttttcctaggtcccacatcaagtgtcggatcccattccaggtatgatacatgagagggaagacaagtgcaaacttagctgtgtggatcagtgctggccccagacacagggacttcacaagttccaaataagactcaaagttcccagggagtaacagggccgacatgccaaaaagagagacccctgcactcaaagcaataccagtgccacggtggcagatggacatcgccatgggaagagaccaactgtagatagtaatgtggggagacagaggacggtttgaacctatattcttattccagaaccgctccatctcttctttggccgtggttcccaaaggaacagcatttctgatacagagctgagggctaaagtgggctcggaggcaatgacgaccaacgtgtctcagcaacagcgcagccatcttggttccgcggacgcgtggtcgacgatatcccgggaatccggaccggtccag

SEQ ID NO: 132340 - DNA, 922 bp, Homo Sapiens
  misc_feature (20)..(20): n is a, c, g, or t
taggcgcgcgcccattcccncagggcaagaagcccacagagcctgccattggtttccattgtcctcaggaaagaaaggagcccaaaaagctgaccctccagcacaaaatcaaagccccaatatggagagagaataactgcttctaggccgagagtaggcaagctgtgggcaaaaaaggggagtttttgcagccacctcatctttagaaacaaggggaaaactagacccttttccactattatggtctaccaggtactctactgctccaaggagatctgaaaatacaaaaggatctaaacaaataaggagaacttttcccaggctggagataagaatgacaaacagaaagatgggtgaatgtaataatgtgtaggaagatgatgctgggagcctcctttcttcacatggctgccagccccatagaggacaacacagtaagaaccaggacaaccactccagactggtatagctggggaatcttcaggccttttcctaggtcccacatcaagtgtcggatcccattccaggtatgatacatgagagggaagacaagtgcaaacttagctgtgtggatcagtgctggccccagacacagggacttcacaagttccaaataagactcaaagttcccagggagtaacagggccgacatgccaaaaagagagacccctgcactcaaagcaataccagtgccacggtggcagatggacatcgccatgggaagagaccaactgtagatagtaatgtggggagacagaggacggtttgaacctatattcttattccagaaccgctccatctcttctttggccgtggttcccaaaggaacagcatttctgatacagagctgagggctaaagtgggctcggaggcaatgacgaccaacgtgtctcagcaacagcgcagccatcttgggttcccc

SEQ ID NO: 132341 - DNA, 1748 bp, Homo Sapiens
  misc_feature (154)..(169): n is a, c, g, or t
  misc_feature (1728)..(1728): n is a, c, g, or t
aattacaatagtgtttatatatctttgatcattttttaaagttctttgaacatgttagcaaactttatacttcctatcttttaattaaattttctttaaataactaagcattgaaaactttacaaaccatcagttatcttaaaatggttgagannnnnnnnnnnnnnnncccttaaagagtctacaccagggtgggtcttttagacacccctattttctaagggcatgtaatcgattctcaaatcaactttttccaaatacaaattcctgtatgaacagggccagtctatggtaaattaatttagatgatggtgttagttttccaaacgtctttaataagtaaataaaggagcaatgtaaaatgttgcagtttgcttggtaaatcttaattgcgaaatttcttcttctttcggaacttttttcctgctgcatttgctgctttttcagccatgatctctgagtacttccttcggttgtatcttctgaattcagaatcagccagcagttcttccacaatagttcttttcctttgcttcttgggaattcgtgaatggtagaaatcagctggattgtcaacaatggttccaatctggaagtacttggggaagccatctctatcatttttcttgtaaaatcttttcgggtccatgctggctctcatcttcagtgctttgagatcatttttcagttcatttgtcatttctggagctttcataccaaaccagccatcccctgctgttttttgtcgttcttttctgcgttttttctgaagttgatactttgattcactatatggtggaacacagtggtttttttcaaaatcaggtgtaatgacggctttctgcagaagctcatttttctttttctccttgatctgtgttagggttctcttgttagactgtagtttatctgcattgaaattaatatacaaaccacccaactgcttgatactcagaccagggtctatgctgctgcttgtcaacttcagaagtttagcctttgtgctatttaggaagtcttcttcatcactaaactcatcttcattttcgtcatggtctgatgaatcttcttcacttttttcatcctcttcctcttctttttcttcctcaatggcaacctcacttgccttgtcttcctcttccaagtaaaaatttttatcagcactcattccaggagttgtgtcaattacaaacaatgcattgtcacatgacagacttcctgtgtctccacttaatgactccctttggccactattttcaacaaaacataaagtatcctcttcattctcactgttttcagactgttggctttcatcactgctgagaactagtaagacagaattatctttaccctgagatgtgttgggcgcagacgtgtatagtttggtatcacattcaaaatctacattcccttcactgttcatgtcttcactgacacttataactgtggactcttcttcatcatcactaccaccacaatcaccaaactttgtcaagtcacttgcttttatggggctctttttgttgttattccatctgcctacttccacagttgcaaatgtttgagttaatgatttcattacagcctcagagttcagattagagtgcactgatacagcatttttattttggggggttgaatgtctctgagaaactaactgttgaaggctagtgtcctgaagttcagaaagattcttcagctgagaacttttctcattaatttctttcncatcatctgttattccattg

SEQ ID NO: 132342 - DNA, 1208 bp, Homo Sapiens
  misc_feature (1150)..(1150): n is a, c, g, or t
ctctgtgtcctttaaaagtcgcagaggagccttcccccactttttaaaggccctttttaatctatcggcgataccccagcctgcctcttcccattctgcgggcattcaagatcattaacaggggtccgtctccaccccggcccaccgaggtccacggtctacactcgctgtactctccttgatagctcttactcactgcgtctgatcctgctccttcccagacagctgccagaacctggttcatctgctcactggagccctttgccagcagccagagaccccgcccagccatggcctaagagccacagctgggaacttgggctcatccccagctgcgtctgtcggcttggcggccaactggaaacccagggcctccatggcgctctggacagaggaggccccgatcccagccccggctgccagccaatgccagcctgtccacttgacagaaatacacacgctggccgcctgccccagggtgtttccagaagagaaatttaatctaatttacatacttctaggtacatcgataaccaaaatgtggccactgaaaaaagttaaaaggtcaatcagctcctggcttctagctggcccaggattgcaaaataaaaagatccacgttccttattctctacacaaaacgcgtttttaaaaaagtgaaaggtctagggagctatacatagaaagcaacagtgaaaagggagagggagcaggagtgggggaggagagtcccaccccccaaccccaccctccagggccccagagcccctgaggctctttggggggccttgacatggcaggaggcagctgtcagctctgagctcttcccagctgggaaggcccctctcgggggcagccaacaaggatttccgtggcattgtgggctcagtggggggctcccaggccccagcaggccccacagagggagcgtggcttcccctgagcaagcaccgtggcatgatgtggtcgttcaacccaggaactgggggtccggggcaggtcccgggtctcacgaggtgcgtgttgtgtgtgttcgcatgtacatgtgtgtgagaggatattcatgggggagagagggaaccagaacaggggtctttggggtctttgcaaatggccacggatggcagacatcgccctgcctggctgctanacgggggagtgctgtcctccccctgtgacagaccggctgccatcagagacctggctgc

SEQ ID NO: 132343 - DNA, 537 bp, Homo Sapiens; identical to SEQ ID NO: 119564

SEQ ID NO: 132344 - DNA, 756 bp, Homo Sapiens
tttttttggcttttaaagcatttaataagtcaaaatcaaataaaagtgatttttaaaaagaataaatttacatacggtacataagcaagacagctgaaggtttctaaaatagaaacctggtgcatatggccccaaaacaccacatgctttgattacactcaggaagcatgagttgcctatttgggtgagaaaatcccatgttacagtgcgatcactgggcacgttttggagtaattccagccactgctatgtaagtgtttttaattcaggggtgtcttctacgttttcatcttctgaatatcttgtgacggtgcaggtttgagcaaaactggcatgaaatgagagctgttttagatgaagattgcaagatggatggcttggcccacagtggcagtgggttgggggtggaatgtggacaattaggaaaaaggcatgtcattctatctggctcctggagaggcagatagtcctgggggctttggtgtcacagttcccaaaagcaaggttggccagaccataggcttacattgtggtgagcttgccttttaaattaatctccaagatgccagatcgagagggatggtggacctagactgaagccaaaccagtagggggctctctttccccagagagaaactccaaatgtcttgaaaggagcctgaaccataccctttgaaggggcaagcaatggtctgagacagagagaggatttaacagagcaaagtgctgtgtgagaaatgaatggaagagggctag

SEQ ID NO: 132345 - DNA, 471 bp, Homo Sapiens
gggcttttaaagcatttaataagtcaaaatcaaataaaagtgatttttaaaaagaataaatttacatacagtacataagcaagacagctgaaggtttctaaaatagaaacctggtgcatatggccccaaaacaccacatgctttgattacactcaggaagcatgagttgcctatttgggtgagaaaatcccatgttacagtgcgatcactgggcacgttttggagtaattccagccactgctatgtaagtgtttttaattcaggggtgtcttctacgttttcatcttctgaatatcttgtgacggtgcaggtttgagcaaaactggcagccttctccttagccttctggaatcatgtattctgacctctcaagttggctaggtgtcacctatatgccctgctcaccagtccaccagctcctctttttaaaatcctccctatagtataaccccctcagcctgccatgaaagg

SEQ ID NO: 132346 - DNA, 803 bp, Homo Sapiens
tttttcaattctattactttgtgtatttgtttgccagtcattacagatgtcctaggcaggtgatatgctccacattttgcagctgaggaaattttaggtccagagatgttaggtgaatgacccaaggtcacacagctagagaggggtggtgatgaggactgcagctctgggtcctggaagagctctcattcttttgcacggcactgagatgaccctctgtctccacccaactgccattcactgtgttcctcccaccaagggccaagagggagcaggaggtgacggtgctgaagaaggccctggatgaagagacgcggtcccatgaggctcaggtccaggagatgaggcagaaacacgcacaggcggtggaggagctcacagagcagcttgagcagttcaagagggtaatgctttttggtgatgctttttggtgatgacacataagagtgacatcagcagcctcaaattactacaggtcagggtctggccggggagctgcgggtcctgggccaggccaagcaggaggtggaacataagaagaagaagctggaggcgcaggtgcaggagctgcagtccaagtgcagcgatggggagcgggcccgggcggagctcaatgacaaagtccacaagctgcaggtgaggaggtggcgcggtggtgtggtgggcagtgctgggtggtgcccagttctgtggggaggagcctcttcccggctcgctgaggtctctcttgctgcaaggcaagtcctttcctctagttgcgttcctggaggagaggcgatgatctccctgttcaattaaatatt

SEQ ID NO: 132347 - DNA, 1077 bp, Homo Sapiens
  misc_feature (276)..(293): n is a, c, g, or t
  misc_feature (340)..(935): n is a, c, g, or t
  misc_feature (961)..(962): n is a, c, g, or t
  misc_feature (994)..(994): n is a, c, g, or t
  misc_feature (1010)..(1010): n is a, c, g, or t
cataaaaatcaattttactgaggtataatttaaacaggatatacccattttaagcaaacagtttgatgagtttgaaaaatgtatacacttttgtaattactgcaatcacaatcaggatataaggcatttctattatccccctaaattccctcctatatagtgtcccagtcaacatctatctacccttaacctctggccctaggcaaccactgatctgctttctgtgactgtagattcatttgctttttttaggattccaaataaatagaatcattnnnnnnnnnnnnnnnnnngcctacagccgcggccgctccaacatcagcctcgtgccgaattcttnnnnnnnnnnnnnnnnnnnnnnnnnnnnnnnnnnnnnnnnnnnnnnnnnnnnnnnnnnnnnnnnnnnnnnnnnnnnnnnnnnnnnnnnnnnnnnnnnnnnnnnnnnnnnnnnnnnnnnnnnnnnnnnnnnnnnnnnnnnnnnnnnnnnnnnnnnnnnnnnnnnnnnnnnnnnnnnnnnnnnnnnnnnnnnnnnnnnnnnnnnnnnnnnnnnnnnnnnnnnnnnnnnnnnnnnnnnnnnnnnnnnnnnnnnnnnnnnnnnnnnnnnnnnnnnnnnnnnnnnnnnnnnnnnnnnnnnnnnnnnnnnnnnnnnnnnnnnnnnnnnnnnnnnnnnnnnnnnnnnnnnnnnnnnnnnnnnnnnnnnnnnnnnnnnnnnnnnnnnnnnnnnnnnnnnnnnnnnnnnnnnnnnnnnnnnnnnnnnnnnnnnnnnnnnnnnnnnnnnnnnnnnnnnnnnnnnnnnnnnnnnnnnnnnnnnnnnnnnnnnnnnnnnnnnnnnnnnnnnnnnnnnnnnnnnnnnnnnnnnnnnnnnnnnnnnnnnnnnnnnnnnnnnnnnnnnnnnnnnnnnnnnnnnnnnnnnnnnnnnnnnnnnnnnnnnnnnngctacgggatactgtcgctttctccnntcgggagcgtgggcttctcaaactcacgcgtngtactcaatcgggtangtcgtcctccagcgggctggtgacgaacccgttaaccgacgtggcctaccgtactactctgatcacg

SEQ ID NO: 132348 - DNA, 714 bp, Homo Sapiens
  misc_feature (313)..(323): n is a, c, g, or t
ttttgcaggtttacaacacagtttattcggtctccctaaaggaaaaaacccattttaaaaagccatccagcagaatgccacatccctagaaagatccacttcctggcccttcagctgcttctgtttctcttcacctacaaaaataaaattacagtatacaataaccttttaaaatacagcatcattaagtgggaaactgaaagcctgccattgttgttgccgtttaacagctgatacaggtttctggtgatgctactgttgcctagctaccctgaccacattattttttcactgtatcagtggtgtgtcatannnnnnnnnnngccatccttgttcctgtgcgagttatgtcatattttttactgttaagtacttatgcatgaataagtataagaaaataactgcttattggtagcatatacattcagtcaggaatgatggtgacatcaaccaaccacaaattacccacatgagtggctgagataatgacacctttgctttctgatggttcaaggtatgcaaacttggtctcaatgcacaaaattattaaaaataatgttatataaagttaccttcaagctatgtgcataaggtatatatgaaacaagtgaatttgtgtttaaacttgggtcccatctccaagatatcttattgtgtgtatgcaggtattccaaaatttggaaaaacatcccaaatccaagatgcttctactag

SEQ ID NO: 132349 - DNA, 1231 bp, Homo Sapiens
tttccaaaacaccctaacagttaaatttcctcagtccagaagctgattgcagtccagttcgcaattggccaggctctagtttatataggacctgaggctccacccatgtgcaggcaccgcccccgtggcgtcacgagcgagcaatggcgtcattggaacgacatgagcatgcgcacttccccagcacaatcagggaagacacgcgtgacccggaaggtcttcccgccacactccagagcggatgtgaggggcgccgatggcggagggaacggcggaggctcctctagagaatggtggtggtggcgactcgggagccggagctttggaacgaggagtggcgcccattaagcgtcaatacctcaccaccaaggagcagtttcaccaattcctggaagccaaagggcaggagaagacttgccgggaaaccgaggtaggagaccctgctggcaatgagctggctgagcctgaggctaagcggatccgactggaggatggacagacggcggacgggcagacggaggaggcagcagagcccggggagcagctacagactcagaagagggcccggggacaaaacaagggccggccccatgtgaagcccacgaactacgacaagaacaggctgtgtccctccctaatccaggagtcggctgctaagtgtttcttcggtgatcgctgccgctttctgcacgacgtggggcgctacctggagaccaagccggccgacctgggcccccgctgcgtgctcttcgagaccttcggccggtgcccctacggcgtgacctgccgcttcgctggggcccacctggggcccgagggacagaacctggtgcaggaggagttggcggcccgcgggacccagcccccgtccatccgcaacggcctggacaaagccctgcagcagcagctgcggaagcgcgaggtccgcttcgagcgagctgagcaggccctgcgccggttcagccagggccccacacccgctgccgctgtccccgagggcacggcagccgagggcgctcccaggcaggaaaactgtggtgcccagcaggtccccgcagggccgggcactagcacccctcccagcagccccgtgcggacctgcgggccccctgacggattgaggacgtggtcaggcctgcggccctgtgagaagaagcgggtacgtgttgaggacaacgtcagtagcagatctgtccatctggtgtgcgtctattaaataccagctgtgtcc

SEQ ID NO: 132350 - DNA, 1728 bp, Homo Sapiens
  misc_feature (1108)..(1515): n is a, c, g, or t
  misc_feature (1521)..(1521): n is a, c, g, or t
  misc_feature (1528)..(1528): n is a, c, g, or t
  misc_feature (1530)..(1530): n is a, c, g, or t
  misc_feature (1536)..(1536): n is a, c, g, or t
  misc_feature (1540)..(1540): n is a, c, g, or t
  misc_feature (1546)..(1546): n is a, c, g, or t
  misc_feature (1565)..(1565): n is a, c, g, or t
actttaaattgggaatttaatatttttcaatcaccaaaaattcatttgcatgaatcatttgtggtataccagaataagaaaatacacatgatacagagttatggaaccaatagatagtcatgatatagttgatagaaacatcaagacaaagcaattatgtacagatagagacaagggttgaggaaagagtaaaggtgcatagaaatctgtgctgtaaataaagtagctatagaaaacagtataactgatcactagtaatagataactaacggccaaaaataatatcaactttaaattagataaattttattatttttaaagtaatcattttatttaatctattgaaaactgataaactattagattatgaatttttggtaaaacgttagaagacaaggttagagaaataacctatcatatggttgtatagtgtaatttacatattttagcataaatataacattattttaaagtatatctagggttatttttaatgttttatacttttatattctctataaaataacctatagttaagaaaacataccattctctcaaagcaaaataaaacaaagctttctttaatctgaaactaaagatgagctttccatttcttgtcaggatctgtgttgctaaatatttttccttctttttctagttttttcaaatgaagtaagagattatgtttagccatttcatgtaaattctcaggagtattcttgtaaataatttttacaagctccattactgtaaatgatttctcaaagttctcacgaaataatgtaagaatttgctgctctcgaatatttctgtgagaaatgtattgttgaattttagcttcagcattatgaattactgggccatgtcctggatatataatatcagctttgattttcaataactcttttaaagagttcatataatcatagaggtcttcaaataccgttgttccttcccctaggatgcaatctccagaaaagatagcattttcctcttctaagagtagagccatgtgatcatcagtgtggccaggggtatatagaactcttagagtggctccctcagtcttaatcacatctccatctttcagcctcgtgccgaattcttnnnnnnnnnnnnnnnnnnnnnnnnnnnnnnnnnnnnnnnnnnnnnnnnnnnnnnnnnnnnnnnnnnnnnnnnnnnnnnnnnnnnnnnnnnnnnnnnnnnnnnnnnnnnnnnnnnnnnnnnnnnnnnnnnnnnnnnnnnnnnnnnnnnnnnnnnnnnnnnnnnnnnnnnnnnnnnnnnnnnnnnnnnnnnnnnnnnnnnnnnnnnnnnnnnnnnnnnnnnnnnnnnnnnnnnnnnnnnnnnnnnnnnnnnnnnnnnnnnnnnnnnnnnnnnnnnnnnnnnnnnnnnnnnnnnnnnnnnnnnnnnnnnnnnnnnnnnnnnnnnnnnnnnnnnnnnnnnnnnnnnnnnnnnnnnnnnnnnnnnnnnnnnnnnnnnnnnnnnnnnnnnnnnnnnnnnnnnnnnnnnnnnnnnaagggncagcaanangggcangaancgtaanaaggcggcggttgcttggngttttttccataggctccgcccccccttaacgagaacacaaaaatcgacgctaaatcaaaaggtgggggaacccgccggactataaaaaacaaagggttcccccggaaagtcctcctgggtctccggttcggacctccgcctacggggactttctgctttttc

SEQ ID NO: 132351 - DNA, 587 bp, Homo Sapiens
tttttgcaaaataaaatgtttttttaatggactgaaaaagcaaagtgagtcaccttcgtttttaaaggtgagatttagcaaaggaaggattagaagcagttttttactatttacaaaatgtcatttagagtggaggtggccaccttcagtagctgaggcaatgtctttcacgtgagatggccacagaagtgtggttcctggaactggctcacaaaggccacaggctgtcctgggtgagggagagttcctctgagggagcaccaaaaaggctcagtcttctgtttcttcatacgtcgtctcgtcaaagggcctgtccagtagaggtaccaaccgatgacgggaatacttcagctgcaataggtccccaacttcatctatctcctttaaagcagtatcaagtatttctttggtatgagctgctgacaggcaaaacctggctctggactcaataattggggtggcaggaaatccaaccacaacgacaccgatgttccgcttcagcatctcccgtccaaaggcgccaattttggcaggcatgtagagcatcaaaggcactactggagagtcttccctcgtgccgaattctt

SEQ ID NO: 132352 - DNA, 1292 bp, Homo Sapiens
  misc_feature (436)..(450): n is a, c, g, or t
  misc_feature (559)..(579): n is a, c, g, or t
  misc_feature (1243)..(1243): n is a, c, g, or t
ggggtgcaatgtttatagtaacaaattggtgagacactaaccgagttgggtagggtggtcagccactgcaggtgagccttctgttcttacacgggctgggttcgaggtgtttcttttcaagagcccggtcttgtacaggtatggcttcttccctaaggtaatgatggtcacctcacacaaacaagcagctggaagcttagttcacattttttaataacatggcacagtttacattacacaagaaggctccgccgatgagaacatgctgaagattcagttgcttcacttttcttttcacataggatctagaaaggactttattacatacaggataaacagcaaaaaggtccgtatagaacaatctctttacaatactgaaagctaccactacagttccagtgtacatattccttgcatttttttagttgttgtcttnnnnnnnnnnnnnnncaccgcacaacatctggagttcacaaaatctgaagctcacaactaaaccttcagtttactactaaaatagatctctctgcttattagaaacaatggtctgtagttaacnnnnnnnnnnnnnnnnnnnnngcaaaaacaggataacaacgtcagatagcactttaatatactagaagaccaaatggaactaattttatttcatacatatattttacagtccagtagacaagatatattgtatttctctgctagtaaagtcatattctctccaaatatgtagacaagaggcttaatgtattataaaagtattatgaagagacattaagattgatgcaaactcaaaaaacacactcacacacaagacttttttttctgccatctttcaccctctaactcgcgatggctccacaaggttgacctgttacggctgttcccagacttgatcaccagctggaatacagtgcgtcacatcaggaaacgtgcaccttacatccgtcagttattgaatacagtgaaaacatatccatcatctgagaaaacttgaagctttctttcaggatctgtttgggtgtaagtaaatctcattacaaaacgaggaagtgtgtacaggtatgaaataggacacactaaaaaaggcatggttctcacatgaggtgtgtgtgaagtcactggcgacctgtgtgtgtctgacagacaccaccacccgtcccctgattttggcatctggcaaatcccaccctccctggcactggttgctcatgtcctcagttacctctccggggctacactttcncccagagcccacaagcggcaacttcagatgctaagttccagcctggggt

SEQ ID NO: 132353 - DNA, 1134 bp, Homo Sapiens
  misc_feature (113)..(121): n is a, c, g, or t
  misc_feature (270)..(286): n is a, c, g, or t
  misc_feature (355)..(366): n is a, c, g, or t
  misc_feature (370)..(438): n is a, c, g, or t
  misc_feature (440)..(440): n is a, c, g, or t
  misc_feature (442)..(442): n is a, c, g, or t
agaacccccacataaaaaggccccccaaggaaaccgcgctcttggggtgagggttgtttcaggagaggaaacccgagggttctccccccgcggaggggtgttgtttttttgtnnnnnnnnnaaggcccgacacacccgtgggtctgttggcgccagaggtgtttccgtttgagaaaacaggatttgtggggcacgtgtttcttttttttcccttttgggggccgccccgggccccacaaaaagaagggggtttgaaagaaatttttttannnnnnnnnnnnnnnnncccgcaaaaaaggttttgtgtgaaagagaatgaaagaagaaagaagagagatgagggcgaaggtttggnnnnnnnnnnnngtgnnnnnnnnnnnnnnnnnnnnnnnnnnnnnnnnnnnnnnnnnnnnnnnnnnnnnnnnnnnnnnnnnnnnngntngtatttcacctttataatacttatataattttcacatagcttcgtttctacaatcacaacaatcctgaggtaaacaggcagggtgcaatcattctctttttagagggagaacaaggaacttagggaaatcaaaatggggatacgaacaggatttctgtggaaatttaaatgagaatttgtggtaaatttttttatcctaaaacaactcaccttggccgaaaaatgggatgttacccaaggtcccctactaggccggaggagaaaaggacctacctcctacaggggcacaaacaagggagactaggactcaatggtcgcccaaggcccaagggtctccagtgagtgcttgagactggcctaaggtataggaagagccgtgaagagaagaaaatagacaagcaggggagggaagaattattaaacatggtcaaggagcactctacaaagcctcaggatttcttcaagggatactgctgtgccaggtctcgagggcagaaggatacaagtgtgagacaccagggccaccaagttgatggggttactgagcctctggatcagcaccctctgataggaagcaaggaagcacactacaaaggctgcaatcccagaggctgagacagtcaagagggagtagaagggcctctgctgctctgggaaggttcttatagggcaaataagctattactgtgcct

SEQ ID NO: 132354 - DNA, 345 bp, Homo Sapiens
catttttcagatttcactttaagaaaattaataaatacagcaaacattaacaacactgtgatgggacgatcatcagaactgtggtaactaatcagcaatagctctcaacctttgcacagcaaagttaggaaatttgactcgttaatcaatatgccatatgcctatctttaaaatacaaaaaaactaagatttatacatcttagttcattagttttaaaaagcatcttcattttaaaagttggcccaattaattatagatttagtcttttcttgatgtcaacaaagtctttaaaccccatagcactgtaactatcttggcattaaaatagtttctatacactttct

SEQ ID NO: 132355 - DNA, 1383 bp, Homo Sapiens
  misc_feature (688)..(1202): n is a, c, g, or t
  misc_feature (1207)..(1207): n is a, c, g, or t
  misc_feature (1210)..(1210): n is a, c, g, or t
  misc_feature (1228)..(1229): n is a, c, g, or t
  misc_feature (1258)..(1258): n is a, c, g, or t
  misc_feature (1287)..(1287): n is a, c, g, or t
  misc_feature (1348)..(1348): n is a, c, g, or t
ttggaaaactgtctttgttttgaattgaaacatagggcattcttcccccattataaaagatgtatttctaacatgccaccaccatgcagccaaagcttgaaggtatccagacgtcttgcatttacttgtgcattcaaggttcattcaggtggtttaatgtgaagctaaaatgtctggtcctacattcatcttcaggaatgagatgattttaatttcatggtgcagaaataaggccaaataagaaaaagcagacctaaaaaatgttaagtgtttaacttactaatccactagatccttgagagcaattttagattaaaatggtccagaggacaaagtgcataattaatgatgagaaaatgattccttcaagtcccacaataaggagttctgcctgcgttaaccatttgtctagagttttatttatgcaaaagtggcagttacttcttggttctgtctccttcattccagtactgttcagtctgcatttccgtgagtcgggaaattgtgcgctgaaatgcaaagatttcctcttctccggtaaacatggagagtccttctgctgaatcctggctcagccccaaatcatccatcagtattctgctttgctccaactcactgtcatgatgttgatgcaaaaataagcttgatataggagtcgacgcagagcaaacctcgtgccgaattcttnnnnnnnnnnnnnnnnnnnnnnnnnnnnnnnnnnnnnnnnnnnnnnnnnnnnnnnnnnnnnnnnnnnnnnnnnnnnnnnnnnnnnnnnnnnnnnnnnnnnnnnnnnnnnnnnnnnnnnnnnnnnnnnnnnnnnnnnnnnnnnnnnnnnnnnnnnnnnnnnnnnnnnnnnnnnnnnnnnnnnnnnnnnnnnnnnnnnnnnnnnnnnnnnnnnnnnnnnnnnnnnnnnnnnnnnnnnnnnnnnnnnnnnnnnnnnnnnnnnnnnnnnnnnnnnnnnnnnnnnnnnnnnnnnnnnnnnnnnnnnnnnnnnnnnnnnnnnnnnnnnnnnnnnnnnnnnnnnnnnnnnnnnnnnnnnnnnnnnnnnnnnnnnnnnnnnnnnnnnnnnnnnnnnnnnnnnnnnnnnnnnnnnnnnnnnnnnnnnnnnnnnnnnnnnnnnnnnnnnnnnnnnnnnnnnnnnnnnnnnnnnnnnnnnnnnnnnnnnnnnnnnnnnnnnnnnnnnnnnnnnnnnnnnnnnnnnnactantanatacaagcgttcccctgnnagctcctcgtgcgtctcctgttcgacccntgcgctaccgaactgtccgctttctcctncggggagcgtgcgcttctcatactacgctgtagtactcagtcggtgtaggtcgtcgtcaanctggctgtgtgacgacccccgttagccgacgctcg

SEQ ID NO: 132356 - DNA, 1580 bp, Homo Sapiens
  misc_feature (133)..(246): n is a, c, g, or t
  misc_feature (1020)..(1042): n is a, c, g, or t
caaaagggggtatttttttccgtagccttgggggcctttccccgaggtaagatctggggacccaccaaggccattgcgcccaaggaccgccggggttaatttttggttatttttcagtagaagacgggggttnnnnnnnnnnnnnnnnnnnnnnnnnnnnnnnnnnnnnnnnnnnnnnnnnnnnnnnnnnnnnnnnnnnnnnnnnnnnnnnnnnnnnnnnnnnnnnnnnnnnnnnnnnnnnnnnnnccaactagaactgtaattttcaaaatacagctggagaggaggagagaagacccctcagaaagctatagatgagtctgcccaattcagtagatctactttttcaagggacctggaatcaaaccactacacttacccaaattatgaggcaaaggttttctcccctctctgtgccaccacctgaggcggtattccagacaagagtacacaattttcactttttgtttttaagcaaggttttaattaagctgcatggcatccagaagagagaaatgtaccaaagaatccaacctgagaccagattatacattttagaggggggaaaaaatcaatgctatttgggagagggagcactgtaatcagaatataactccaaaataaatcatacaataaattattttctaaaagaaattgatccacatgcagacagatgaacacacacacgcacacgcgtgcgcacgcacacgtgtcattctagtcatttattcagtgttgactgtgacttccatggagggcaccatgagaaaggaaaagattagacatgtgaaaagaaggctaggccccatcttgccaccagtggaatgagatttaagaccactagagaaggaacccactaaattgccagaaacaagagtagaaagaaacagcagttatcaaggaagattttaattgcttcaaagagggaaaggaagaaagcacagaaatctaatgcaagtaaaggcacaatgaatgtggagttgaatggaaccaaacccttccttcggttaaagttatccnnnnnnnnnnnnnnnnnnnnnnngcgtgtggttttgatggtggttgtagttttgtttcgttttgtttttaagagatgagtcttgaaggcagagttgtaatggccctcctctctcccctcccattcccgaaattagggtagcttaacagaaagccaccttgaccacatggccagggactgagattcaatggggaaagaaagactgtagctggaatgtgaagaatttgatttgcagttgattgcaggttgggtttccggaagggcagacagctcaatgtagtgccatcatagggcctcagatgcccacactccacccccagagcttcacaaaatggaaggaccctggagtcacccttctcccccacccccataagcactcagcctacagattatttcaagtgatcaggagaattaaaacacaccccaaccctgagttgctctttagcaagtctatttacaatttttttctcacctctccctggaggtaaatctgggtttcaagttgggaagccatggggtgagggagttccccagtgcaatggccgatgacgagtatccttgc

SEQ ID NO: 132357 - DNA, 1283 bp, Homo Sapiens
  misc_feature (668)..(692): n is a, c, g, or t
  misc_feature (1073)..(1073): n is a, c, g, or t
  misc_feature (1089)..(1089): n is a, c, g, or t
  misc_feature (1095)..(1095): n is a, c, g, or t
  misc_feature (1104)..(1104): n is a, c, g, or t
ttgaagtgaaaatatgaacattatttaataactgatcttctgtaataaaccatttgaaaatattttacaaggaatcacacacacgatattttacaaagtttcttgacttttttgtcgctgttgtttttccaacttgtctgtacaaaatagaacaacaaaaaaagggcagagaaaaggaaatggccccccagtcccccagcccaaggtgaggggcagccaggtcgggtgggtaatgagaaggattagacccagctgggggttagacagctacctgatggggattgttttgtctgtttttctgttttttaaacttaaaatatatatttttctgtatatgtttatattctccattgagcacctgactacactacagttacacgcacgcccccgaaggacacagctggcatccaggccgggtgcacatggacacccaccctggcaccagcagtgggcatggaccacacacacacactgagaaagcgacaagcaacatgacattaattaacgaagccattaattaatgcatcaccctccccctcctcccagtccatctgagccccatcactatatccccttgccctcagttccccactggcccccaggctgggatgcctttgggggaaatgaccagaatgaatggtgtgaagagctgtgcccagtccccaccnnnnnnnnnnnnnnnnnnnnnnnnntcagcaagggagggacagtttggcctcctgcaagcagggagtgtgtgtgtaggggtgggaaggagatagggagtgggcacaggcctgagtgtgtaagggccagattggcggaaggatggcccagccaggagagacaaagtcacccctgctaaggcaaagggtgatgtctggtgggggttcctctgccgaaaggtgcaggcagtggcatgtggtcccactgggggcctgacactagtgagaaatggttacaatgagcacctggagaggtgagggggcacttggaggacactggtggctaggggtgggacagagggttcttcaccccctgccccagcatttggcactgtttgacattcagctttagaatgggagggacagcangctgcagctcaaatanaggcangtgtgagcngagatggatgtgcagggcaccctcccaccaccctcgcctgtgtaaggcttgtagccctaaccacccacccatatgttgtgttgtgctgtcccatgggtagtccatgtgatcatttcatctcatgtccaggttagggtaggtcgacggatccgtgacactggactgtgggctgggatggg

SEQ ID NO: 132358 - DNA, 1099 bp, Homo Sapiens
gggggcaagacagcctgccacacatccaagggtacgaccagtgggaccctggcctgagtctgttctccgaggggcctccagcagcttctgttcctccctgcagctgtgtctttcttgtcctgggtttaggatgcaggtgggccaggcaggtgttgttaggggaggcacccacttcaaaaggagggccacagtggggacacagagtccagcacctgagccctccaccctccccattctggttggttccatcagccacacttagaatctcccaggatcccttggactccgtcccccaacttgtcacagcagcctgagcctacccaccccaggagacaagagctggcaggaacatctgcctatatggggggtggcgttggccccaaagaggcttcaccagcaaaggaactgtgtgtattttaatgccaggggacggaggatgtgtgagctgttcagcaaggtctgcccaaggcctaaaactcaatttccttattcttttgcttctgctcgtccttaacaactaacagctcaacccacacctctagacaacagtagtcgtgctttctgctaacggtgacattttcagctcttaaaaagaagcaaggagattttcaaatgctagagtatctctatcagaaggcataggacattgtgtccaaagtctcaagaacaaacaacactttccttctgacctggtccaaaagtcagcaaacagcaagcaggcagaggccctcataaggacttttctgtcctcctttgaccaaactgtttaaccgagcctaggggtgacggggagcgacccaagctggcatctttctctacggagacagattttagaaaatacttttcttgcccatgaatttcttttctggttgatttttatcattttccctttacttacaagaaaataagattgcaaccactcctgctaatgatttagtagttccttttcatttcagtttttgtaaattaggagataattctaagagttactaaaggatgatttatttaagagaactacgtcaaatagcgaatgagttatgggtaacattagacgaaaataacctttcccgtgggaaaggtttctcgaaggcatggatgc

SEQ ID NO: 132359 - DNA, 1067 bp, Homo Sapiens
  misc_feature (55)..(55): n is a, c, g, or t
  misc_feature (117)..(118): n is a, c, g, or t
  misc_feature (121)..(121): n is a, c, g, or t
  misc_feature (127)..(529): n is a, c, g, or t
  misc_feature (564)..(582): n is a, c, g, or t
cagggaacgcctgatcttatatctgtcgggttcccacctctgactgacgtcgatntgtgtgctgtcaggggcggacctatgaaaacggcagcaacgcgccctttacggtcctgcctnntgntgcccnnnnnnnnnnnnnnnnnnnnnnnnnnnnnnnnnnnnnnnnnnnnnnnnnnnnnnnnnnnnnnnnnnnnnnnnnnnnnnnnnnnnnnnnnnnnnnnnnnnnnnnnnnnnnnnnnnnnnnnnnnnnnnnnnnnnnnnnnnnnnnnnnnnnnnnnnnnnnnnnnnnnnnnnnnnnnnnnnnnnnnnnnnnnnnnnnnnnnnnnnnnnnnnnnnnnnnnnnnnnnnnnnnnnnnnnnnnnnnnnnnnnnnnnnnnnnnnnnnnnnnnnnnnnnnnnnnnnnnnnnnnnnnnnnnnnnnnnnnnnnnnnnnnnnnnnnnnnnnnnnnnnnnnnnnnnnnnnnnnnnnnnnnnnnnnnnnnnnnnnnnnnnnnnnnnnnnnnnnnnnnnnnnnnnnnnnnnnnnnnnnnaagaattcggcacgaggcggccgcggctgtaggcnnnnnnnnnnnnnnnnnnncatttcataagcatttattaatcagaggtacatgagcaggctcagcctaggggaataattgccaacaaacacttttgggaagcctgggaccatggctctgccaggaatctgtgacatctccagggcatcatttgagtcctgccttctcaaagtacttgtgacaggcagacgtgattgcagccacgaacacgatgaactcactgaagtccacctgggcatctccattggcgtccaggtccttgagcaatttatccacggcatccttgtcttttccactctgcaggaagcctggtagctccttctccatcagcaccttgagctcccccttggtcagggtctgcgtgctgccctcgctgcccgaatatcgggaaaagacgtctatgatcatgcccatggctgtctctagttccgtcatggtgctagattcagacccaccttcctcctgggggctggcagggccgagaaaatcctcgtgccgaattctt

SEQ ID NO: 132360 - DNA, 821 bp, Homo Sapiens
  misc_feature (727)..(727): n is a, c, g, or t
  misc_feature (754)..(754): n is a, c, g, or t
  misc_feature (799)..(799): n is a, c, g, or t
ttttttcaacatagagactttaatataagaagctggttaaacaggcatgggactgagactgaggaggcaaagaaggcatcggggcaaccaaggctgtacccacagaatgctgcttctacccccgtgtctggggtaacaaacggaagggtgaggccatcaggacctagagttgggaggagggacgccacagaaatgggacccagatctctaaggagagatttttgtttggctggttctggtgtctcaagagcttagaagtgaggggcatgaatcaaatactcaggcctctgaggtcagccagtgctctgctggggaggggcataatgaagctggctctgacaatgccggaaaacgagctggtgcttggcatatacagacaatgtgagcattgctggggtgatcctgacaggagccagaagcacactggaaggagctgctccttcttgatgccccaggtttgtaggcaccctctagagtactctaatgggagccagtgggcaaaggagaagtggcatttgcagagtccagtcccagcatcacagagcagagcatagaaaggtaggtttggagttgagggacaatggcttaataaagggcaaagggggttatgaccactatcatgtgaaggaaccccttgactgaaggcacaagctttctgtgtcttgcaacctgaatgacgtgcataagcagggtcaggtgggttatctgacattttccttgagaacangagggagcctctggattccagcacaanaagaaaatacccactcaacccgtatgcgtgggagctatcctttanagagaaagtattcccttttgac

SEQ ID NO: 132361 - DNA, 879 bp, Homo Sapiens
  misc_feature (30)..(30): n is a, c, g, or t
aatttaataattgccatataatagggtgtngatccattccccttaaaatacctagtagttcactaggagtaactgttgtttgacagtgattaaatgttataaatgcactgtacagtatatttaagtagtcacatgtgataaaatttgtttagtaattctgggaaaaaagagtccccaaatgagccaaaatgattagccctagaagactagagtataatgatctgctttatttgacaaagatgttaaatactgccttatgtttggcaaatttaatgaccataaaaaaacggaccacaactttcttcaaacttcttcaaagtttgcatgtctgggagaccaataaagggcagggcatacgaagtaagtctgtttaggtcagttgtttatgggtaggtgcgacttcattcctgttcgccctacttgcagacatggtaacttagaacagttcttcagaagctgttcgatggcaacgtggcggacatggagctgtgaggccaaagaatctttttcttgcacttggtgagttaactcttcaaaaacttcctggatttgctgtaggagctttgcattcagttgctctacctcaccaagagtcatcgaattcaattcctctctgctgtaatgtggatgctaggtctggacattagcctctggactagagattgtctcttcttttttctgtgcctggttgtgactatgaggccacaatacactgttacgacataaagtggcacctgaatcttgtaacatagaaagtccaaagtctgtattttccctctgctccaaaattctttgtgtacagttagagatgccacctgcacttccatctatccattttgcagaatattttggtacttgggagtcaaactgcctcgtgcc

SEQ ID NO: 132362 - DNA, 1053 bp, Homo Sapiens
  misc_feature (516)..(526): n is a, c, g, or t
  misc_feature (843)..(861): n is a, c, g, or t
tttcatttagtctttttgttttattcaaatgtcaaaatgtaagttccaagatacaaattatgtttgatttaaaaacatcgactatgctttgttaacaacttccaaagccaaatgtaagttgttgtgactaaaatgcctccccagtacatttctggaggattaaccttaatatgtttagcagctagtctgatttccactctacaaaaaggaaaatgatgctataagggaaagataatgaacaaagttataatatgtaagacttcctgggaagaacttgaaccattactagggagaccaaggagaggtgtttctgttccatactatagcaaccagccttaacactctgtaatacaaagtgcatttctggtcctacccagccataaataccatacatcccttttattaattatatcaaagaaagcccaactcttcatcaacaagatttagaatttcctaatagctttagtttttccctaaaaaaaactgtgtaaaaggaaagctcgagtctataaaccnnnnnnnnnnncccacaaatatttacatgtactctgatttaaacaatttcaaatgagattaaactgaatgaatatagaacttgtaccaccattatagaaggaaagaaaaaaagcttaaaaggtacccaaatattttaatatttatggaattaaatgatacaattttcattaagaccccaaatatcccaccactttttagctttgctgtataatgaaggttagtaacttatatgttagtgtgaacacatttactttggctgatagcaaaacatagattttttaaaatgttctaagaagccaaagaattagaccaaaatgttcagcaccnnnnnnnnnnnnnnnnnnnctagctcaatacttcaggttaaatacacaatatcaagaaattttatttaggtcagcacatggctgttactatgactgatactgcatgctatttctagaattagatatgtatctttctggctggatgcggtggctcatgcccgtaattctagcactttcagaggccaaggtggccgattgcctgagctcagga

SEQ ID NO: 132363 - DNA, 772 bp, Homo Sapiens
  misc_feature (757)..(757): n is a, c, g, or t
aaagtcacaagaattttctttattatagcaaatactttcacggcatttgacagaactcagaactatttacaaagaaagaaagaaaaatcaaacaaccaaaagatacatttcatataataggaaaatataaaaatcgaagccaagtgacagaatgaaaaagttagctaagcaatggatttgaaaaacttcgattctaactatctgacttgttgctaattgtccaaacatataataatttaagatggtcttttgagacttcctagaagtaaaaaggaattattgaaaaaatgttcaaatatttcataaataaataccaaaaatatttattttcattgtactttccgacttgcttcagtgaaggtgtccttttacaacactctgtttcttgtttcaaattctcatctggagatgttactttcttccagagtgatactcccagcttaccacaatattcctgattaagaaaatgctagagctgtcctacctgaggaaaagaagagagaactgcagaacaatctgtaaagttcctagacagttcaatcaagttaaggatggtccaactgagatattttgttactccagcacttttcaagtgttattatgaaatcacaattctatctcagtgtgagatttcttatataagtaggaagaatttcatttctgtaaacatttgcagggccagctgtttctctaaatagatttgtttctccttaagagagctgctccagtgaaatcttttcttacatttcatgtccanacccagagagaaccc

SEQ ID NO: 132364 - DNA, 761 bp, Homo Sapiens
  misc_feature (150)..(150): n is a, c, g, or t
cctttagaatatctgagagggaagggtcaggaaggtccaagcgttgagtcacccctctgctggctggccgcacactgctgtaagtcgaatgcctctgcattggagagacagcagctgctggagcagtcctcactggtatcccacttaggngacttctgggggtcttatggacagaaatattctgtccagctccacctgggcgtcccaagtcaaatgacttgataagtgacttaacggtggttgccgactctgggggtgttggagatgttctgctaacacagacaccaggccaccgaccagcagcatcgacctcagaggactctggctcttcatccacaggtggaggggcggctctgctggtgaccaccctgccgtggccctgcacatcccccagctccttctgcaaccgggcattcttctcctcctcctccagcagtttcctcttcacggtgcgcagctcctgctgggcctcacacttgatgtcattggccaccaccactgcggtctgcagatccgcctggaaccgcctccattcctcggtctcctccttcatctgcttggtcagagtcttcagctgcctctccaggtctgacttctgttcctccagcttgatcacactactttctagctcactgatgagttgattattgtgtaacttgacagcccggtgctgttccacctgatcttccaattcaaatatggtttctttcatgtctttgatctctgcatcactctctgatgctttttcttgcagctttagg

SEQ ID NO: 132365 - DNA, 855 bp, Homo Sapiens
cgcaaaatgagttgtacactaacaagaaaagttcaactccttcactcttaattatctattccgtacaaaaaaaagcatgagcgagttatttgtgggacttgttggttttgaaggaaacctgtaagattttgtcccccaggcggtagccgttcaggctggctatggccatcgcggcttcttcatagtttgtcatggtcacaaagccaaaccctttgcacttgttggtgttgaagtcgcggatcactttcacattggtgacggcgccaaacggcccaaacatctgccagaggatcccctcgtcggcatcctgccccaggttgtagatgaaaatgcaccagccggaggaggcgtttcctggcacgttgacgccagagagcccgctcatgtgatcgacgcccatgggggagaacctgaatctctgcgcctggtggtgaacggggcctccgaaccgtcgcgctggcgagtggtacagctgcgagaggagtgccacgtttttgttctggttggggttggctgcaaacttcactgtgatgggctcagaggaacctgggggtttatgaccattgaaactggtaattgcctcttctgcctccgaccgtttgtcaaaccggataaacgcaacccctctggacaaacctgtagtctgatccacgaggacccgcgagttgatgatccgcccaaaccgagagaacatgtcttctacgtccttctgggtcatggtccgcgggagcccgctgatgtacaagttggcgtctttgatcacctctgagctcgggcgagcatacgacaccttaatggtttttgactggagcctcaagccgttcagcgtgttgatcgctctctctgcatccttcg

SEQ ID NO: 132366 - DNA, 1035 bp, Homo Sapiens
  misc_feature (815)..(815): n is a, c, g, or t
atccagatttttgaaaaatacaatgtctaatggttatgaagaccacatggccgaagactgcaggggtgacatcgggagaacgaatttgatcgtcaactacctccctcagaacatgacccaggatgagttacgaagcctgttcagcagcattggtgaagttgaatctgcaaaacttattcgggataaagtagcaggacacagcttgggctatggctttgtgaactacgtgaccgcgaaggatgcagagagagcgatcaacacgctgaacggcttgaggctccagtcaaaaaccattaaggtgtcgtatgctcgcccgagctcagaggtgatcaaagacgccaacttgtacatcagcgggctcccgcggaccatgacccagaaggacgtagaagacatgttctctcggtttgggcggatcatcaactcgcgggtcctcgtggatcagactacaggtttgtccagaggggttgcgtttatccggtttgacaaacggtcggaggcagaagaggcaattaccagtttcaatggtcataaacccccaggttcctctgagcccaatcacagtgaagtttgcagccaaccccaaccagaacaaaaacgtggcactcctctcgcagctggtaccactcgccagcgcgacggttcggaggccccgttcaccaccaggcgcagagattcaggttctcccccatgggcgtcgatcacatgagcgggctctctggcgtcaacgtgccaggaaacgcctcctccggctggtgcattttcatctacaacctggggcaggatgccgacgaggggatcctctggcagatgtntgggccgtttgccgccgtcaccaatgtgaaagtgatcccgcgacttcaacaccaacaagtgcacagggttggtttgtgacatgacaatatgaagaagcgcgatggcatagccagctgaaaggtacgcctggggaacacaatcttacggttccctcaaacacagtcccacaatactcgtcatgctttttgcggaagaattcacggacgggtgcactttcac

SEQ ID NO: 132367 - DNA, 692 bp, Homo Sapiens
ttttgaaaaggtttgtccagacttctagcctggcccacagtagactgacctgacttttgcttttcagttttgaaagtcctagcgtttttccccctaactccgtttttgttgatttgttgaaaaggtttgtccagaggggttgcgtttatccggtttgacaaacggtcggaggcagaagaggcaattaccagtttcaatggtcataaacccccaggttcctctgagcccatcacagtgaagtttgcagccaaccccaaccagaacaaaaacgtggcactcctctcgcagctgtaccactcgccagcgcgacggttcggaggccccgttcaccaccaggcgcagagattcaggtgggtcgggagggtgtgcgctcctgaaagccatacttagccccgctggcaggcgacggcacagccacagaatagaaaccacggggatgatagactgatcccgtcagagagcgcgtttcagaatcattctgcagctccacaccacaacctccatcagaaaggtgtctgtaggaaagccgtttacttccgatggggcgttgtctttcatgggaatcaaaacagtgactccaggctggacacagtgacttatccctgtaatcctagcaccttgggtggctgagagaggaagatcgattgagcccaggagttcaagaccaacctgggcaatattgcgagacccca

SEQ ID NO: 132368 - DNA, 1136 bp, Homo Sapiens
  misc_feature (767)..(789): n is a, c, g, or t
tcaatggaggaaatttatttattacagggaaattggttatacaggcattagagggctgaaaagcaaaatacaaaggctgaaaaaccaaaagtcatctagaaataataacttcagaaagcagctaccacctctagggctggaggaacaaaaggaaaaatatgaagtaaccagaacttagaagcccagaattgcaaccacaatctttgtggaaggtagaaccatctggctgctgtggataatctctgagcgggtacagggggaatcactgaggctgattccagtagtgctgaaagaagctgaagtggcactgccactgctgggagaagtgtctctaggtgaagaagcattgctggtcctgtaagcaacattaacaagaacagaaaaaaacaggaagcatattctctccttctgcctcccagtctctctctagtgacccctattggcagaactgaacaggaagcaagcttaaaaagaagtctgagaaacagtttgaggacaactagccccatcattacagggaagaagagtacagaaggtagatttagaggtgaggggcaataagtaaatgactcgcacagatggtgttcatgctcaatgtttctcttctgaacaattttcagatttggtgttaaagcaccttctggccaggcgtggtggtttatgcctgtaatcccatcacttcgagaggcggagtcgggtggggattgcttgaggccaggagttcaagactaccctaggcaacatagtgagatgctcgtctctatttnnnnnnnnnnnnnnnnnnnnnnnggggacccaaggccatatatctgtttcattcctagaaactctccacagtgtcagatgaagactgcaaatccagtggtcctacattcacagataattcctagcctttggttagtgaggagaatgggatgggaggacacaaaatgagaacttttttgtggtatgctcaattcgtatctggcagtacccaggaatctgcattctcgacaagcgtccgcgccgacggggctagtgaagtttgagaacaattgcttcctacccagccgctccgccgacgcgtggtcgacgatatcccgggattccgaccgtaccagcctgctttttacaccactggtctatattcacatacg

SEQ ID NO: 132369 - DNA, 939 bp, Homo Sapiens
  misc_feature (654)..(662): n is a, c, g, or t
cacccatgaggcaattattgcatttattattcaccataaaagtgattaatatcattgtgctcattagtctttccaaggggaagataacttttatcccacagttgttattaaaacattatctatattggacggagtatatagaaacacaatagcaacacaccaagtcagtcacgactaacagtttatgcacacaggtgcaagatagtttctgcaccacattttgtctttgtaataagcatattctttcctcagtggctcactaaaacaagttatattttgtcttcaccactaatttactcagaatttattagtgaaccaaaagtttcactgttcttattgaactaaatctgagatatcatattgctgttttggcctgcaacaatttcagttactcttttgaaaagcaccttaggttttttcttccaaattgctcgtaattgaaaactttaaaacttctttttttcataatgaagtcataattcttcctttattactatcctacagccaggatgagttttcgtagctttaatgtactaagttgtattataacacatacattgctattaataatcttggtaagctaatcaactttttgctacaatataatccaaaaaagtatgtgattgataaccacattcattactgtgctatggnnnnnnnnncaagatcttttattttgtgaagttttctaagaaaatcatttgcatatctagaattttattttcaaactaagtggcatgaagaactgcttcaaactgcccccaaaggcattttaaactacaccagaatgtggagctacaataaaacattttagcaacatgcaggaaatacttgtactatgcctgtgtcaggttttatataaacgacgcgtggtcgacgatatcccgggaattccggaccgtaccagcctgctttttgacccacttgttcttagccaca

SEQ ID NO: 132370 - DNA, 966 bp, Homo Sapiens
  misc_feature (350)..(416): n is a, c, g, or t
  misc_feature (606)..(662): n is a, c, g, or t
  misc_feature (700)..(715): n is a, c, g, or t
  misc_feature (718)..(863): n is a, c, g, or t
  misc_feature (865)..(875): n is a, c, g, or t
  misc_feature (935)..(935): n is a, c, g, or t
  misc_feature (937)..(937): n is a, c, g, or t
tgcaatgatccaataattatatcaaagctgtttttttctccctacccacactccacctaatgagcctgtcccctctgtttcctctgtctaattctgtaacaaaatctgaaatccagcctccatcagattcgggctagatatctctgacctttgaatattgtcttattttagcccataatgagatcagcagctactgtcagtgctatgtcagtgctaaaaatgggttacactttgcaaaataactttattctttaacaatcttgtacactaggcaccaacactgaggctcagctgcctgtggtcataaatcaaatagtacgtactcaacaaataatagctgacaagtttgnnnnnnnnnnnnnnnnnnnnnnnnnnnnnnnnnnnnnnnnnnnnnnnnnnnnnnnnnnnnnnnnnnncttaagagaccacctacctccattcttcttcgaacacatgtttttcctgtttgccacctgaatacgtggaaccaccatccacccagctggttaaaccagaatcactcagaaatctacctctccttcatattattcataactgccagtgttaaaattctaattgctggccaggcacggtggctcatgccannnnnnnnnnnnnnnnnnnnnnnnnnnnnnnnnnnnnnnnnnnnnnnnnnnnnnnnnaccatcctggctaacatggtgaaaccctgtctctactnnnnnnnnnnnnnnnnttnnnnnnnnnnnnnnnnnnnnnnnnnnnnnnnnnnnnnnnnnnnnnnnnnnnnnnnnnnnnnnnnnnnnnnnnnnnnnnnnnnnnnnnnnnnnnnnnnnnnnnnnnnnnnnnnnnnnnnnnnnnnnnnnnnnnnnnnnnnnnnnnnncnnnnnnnnnnntcggacgcgtgggtcgacgatatcccgggaattccggaccggtaccagcctgtttttgtnanccccacctggtggttgggggggtggggtg

SEQ ID NO: 132371 - DNA, 1021 bp, Homo Sapiens
  misc_feature (64)..(66): n is a, c, g, or t
  misc_feature (73)..(252): n is a, c, g, or t
  misc_feature (256)..(268): n is a, c, g, or t
  misc_feature (931)..(931): n is a, c, g, or t
  misc_feature (949)..(949): n is a, c, g, or t
  misc_feature (966)..(966): n is a, c, g, or t
tcttgggggggccgccgccccctaaaaaaagttgtttaaaaattttttttgggggccgaggggnnnaaaaaannnnnnnnnnnnnnnnnnnnnnnnnnnnnnnnnnnnnnnnnnnnnnnnnnnnnnnnnnnnnnnnnnnnnnnnnnnnnnnnnnnnnnnnnnnnnnnnnnnnnnnnnnnnnnnnnnnnnnnnnnnnnnnnnnnnnnnnnnnnnnnnnnnnnnnnnnnnnnnnnnnnnnnnnnnnnnnnnnnngagnnnnnnnnnnnnnctttattggactttgttacatttattttacagtttagtattgtttgtattttgaattacattaaggcggaggatggggcactgtaatgtttttgaagtttaggacctttaaagctcttaagctgactccgctactgtaaagaaaagcagggtatctgcttcacactggcaaaataaggggctacatttccccatctgaccctcaaatcccttgaaacgctataccctgacataaaccactggtttaaaagacaatgattccaataatttatatcaagtcctgcttccctaccccacacctccaccctaactgagcctgtcccctctgtgttcctctgtctaattctgtaacaaaatctgaaatccagcctccatcagattctggctagatatctctgacctttgaatattgtcttattttagcccataatgagatcagcagctactgtcagtgctatgtcagtgctaaaaatgggttacactttgcaaaataactttattctttaacaatcttgtacactaggcaccaacactgaggctcagctgcctgtggtcataaatcaaatagtacgtactcaacaaataatagctgacaagtttgatagccggaaaacggcaaagctgggatgcaaacccaagcagtctgactcccaagcctcttaanccattcttaagagaccancctagctccattcttcnttcgaacacatgtttttcctgtttggcacctgaatacgtggaaccaccattcaac

SEQ ID NO: 132372 - DNA, 583 bp, Homo Sapiens
  misc_feature (396)..(445): n is a, c, g, or t
agaatagatttcataggtttaaaattttatgatgcaagtatattttcgaggaatggaaatataggctgaagagccagaacaaacacctaaaattcaatactaataacttcaagccattatatgaaggtttcaaataggtgatttaaagcagtgcaatgcattttatgctaattttcgttatgctatttgaaaaataaaacccttcttaatgctcaaaatttgaaataatgcaaatgccgcagatttgtttttagcctgaattatacactgcactgatagtatggccacacggtggcattgccgtggctcctgagcagcagccctgcctgcttgcctcaatgccttgcagccagcacttgctcagcccgtgggacttctaacagcactaatgttggnnnnnnnnnnnnnnnnnnnnnnnnnnnnnnnnnnnnnnnnnnnnnnnnnncaccctgtaataagcgtaatagaagcattcattagtaacttccatagttagaaaattctgggtaacaaaatgccctaaaggatgccggacattgtcacagtatgttagagtgctgttaatttggaagagagaactatg

SEQ ID NO: 132373 - DNA, 1422 bp, Homo Sapiens
ttttcaaataaaccttttatttacaggcaaaggatatagtacaagaagaaaaagagaatacagatgacatcgggggtccaagagacattccatatttaagcttcataatgtccttatttgcacacatataccacactgccttcattttctccagctgatagatttgtgtaagaaatcttgactttgagagttcaatgtcattcccaacagggtctttatgtctgtctggtcatgttatcagccagtcttacttaatgtattaggccagttggaaaccatcattaaagaaactgaccctggtgatcaccagagtagtttcagactataaacaacacatcataaatcccactgcccttatcttggcccaaagacaaaactggacattctgatgaccccagagattatgacagtgttttctggtctaattaaaccatagtcttcatatacctttaccacgcctccttcctccaattaggaagctaagtgggtaagaaagaaaaaataaaggcagagcataacgatgtcacccatctttggcctcttagccggagctgatccttacatgggcagtagactataagtgtgttaattatttttcctactgcagagcttcttcacgttggaatggtgaataggtacacatttctcaaagctcaaagtgcaagtctaggtatattctctagtttcaatcttggtgaaatttttttctatgaattcattactttttagtttatttcagggagggggtggtgttttttaatgaattaatacaagtgtcagcatctttcatggacatccagacaatttctttaaagatgggagaggtaaaaaatcttcaggagaaactgttgcctgaactgtgagtatccagaagccattgaccatgttaatggtggagccaatatgaagtacttgctaaatcatgtggtgcgtgaaaggaagagcaatgttataattgcatcctcctaaagactacattaccatcatcactcatcatctctcctggtcccttccacctgccaaacccccataaaaacccataattgatgatacatattagtttataattaacggcgtacctaactgttctctactagtctgagcctctgtacagagaaatgtcagttttgtattcctggttcctggaaaagtacatatagaatagtataaatacaataaatgtttgaattatcgtataacttgagtctatattttaagttagtatcctgtattaagaactgggttgatcaaatggttctttctttgcacatatcaaggctttcgactattcccaatcaggtcttcccccggccgtaatggccgaattcccgggcatatgtccggtaccgtcgactgataaccttttcggtattagattgggtactggcctaataaccggagagtttaatggcgggcccggcc

SEQ ID NO: 132374 - DNA, 2213 bp, Homo Sapiens
  misc_feature (60)..(78): n is a, c, g, or t
gtgccaagctaaaattaaccctcaactaaagggaataagcttgcggccgcctgctcaggnnnnnnnnnnnnnnnnnnnaatttagaagaatcagaatttatttcactatgtgaacattaagaatttacctacatagttgaaaatattcacaaaggacttgatcattcacactcatacacagagaaagtctgctgaataaaaaaatgctcctttacccattcgacctcctctcaggggctgcagtgggtttgccaattccactgtggggcttcagtcttcatgaatgttgaatagtttggctacttcattgagatcttcatgctgctcaccgtccttaatgatcttccttgctattggcattcggttaaagatgttccatagcacaatccccacgaccactttgtccctgaggtagaagatgacacctttgccgtagtcctccccctggacgggagcctgtggaactgccggggtgctgggaggaatagtaatttctgaggcctcggactctgtctcactctctgatcggataccagttcctgactgctctgtggcagatttggggttgtcttgtgcagttgcttttgcaaaaacaccaactggtggcaaactacctgtcccaccagaccaatagcttcatagcccaacatcgggggccctgatcactccagaacattgacttgatagccagtacggcttagcagctccagtcatattttctccagccaatcttccactcacaacagcgtgatcatggtgctctacccgcctccttcccaactttatatcgtagatagcatgcagcatctcctgccacccagatgttagagcgtgcttgtagctctgcatttacccggaagccaccgaaatctgagtctatttccaggccaccagtcttggccaactcaacattgggctccaggcccacagctgccactatgtggtcagtttctaccttcctgccgtctttcaagcttgataagtaactttcccctgctgactccaacggattgcacaatagcattgggcatcaccttaaccccctctcgtctgactttttccatggtccagttgctgaggtattcggggaggatctttcccatatttcctttctcggggaagagttgaatcacttctgtgcccaaggctcgagcctttctgccaagagcacaggccagttcgctaccaaggaagcccccaccgataatcgtaattgatttgacttcccgtgaaatcttctccaagcttctaaagtctccaatctttctgaaaagcgttgttctactcttcacctttgctccagccctatcaatggcagacagacttcttggagtacctcctgttgcaatcaagcacttttcataggttatttgagagccatcattaagtttcacccatgttgtctctcacatccagctgtactaccttcttcccagtgaggacagccacaccaccattctcaatatgaggcaggtcctgagcagagacatagaaagaaggtggctggaaatatatgcttctctcttttccattccactgtttgaatcgcagtgtctttgtgacatttgggtcatctgaaaaccacagttcttttgaaagaggaggtcgcatgtacggcagctcaggatcttcagatacaatcagtaccctggccccaggatcccgagcccggatggatctggctgcagcaaaagcagctgtgcctccaccaattagcaggaaaggaacatgacttggcgccttgtcttgaggaacttcctctccttctgaagcagataacgcggcctttttctgtttctgttctggtgtcagccctaaccctgaaattctttcattgtatcttttttcgtcctctttcatagtcttgtaggcataggcaccagctcctactgttgataagcccacaataaggactaacacagaattatcgattttgccccctgatgcaccagagctagccatttgtcttgtcatctggagttctagaggaacatgccatcgctggaacaagttgcctgggagccggttcctctgcctcgggcttcggacgcacacggtccgcaccaagggcaccagcttctgcttcaaagcacccgccgccaggcctccacaccggaacatttcggcgaccgctattcgggacctcctccttccctttcctctcaacgcacgaccgaccctcgtgccgattttaccgcagcctctacctagct

SEQ ID NO: 132375 - DNA, 398 bp, Homo Sapiens
tgagactgtttctaaaaataaaaacaagaaataaatttcttcttgaggtggggtggaggtggggagcaagaatttgacctggctctgatccctggtgtgttgtgtgggcctctttaacgtttgccactgagccttaacctcactgtacttcactgtacttcacacgcattggtgttaacattttaatcttagaagaccctgacccactgagggtttgttgtgagaattgctgaagccacgtagaagcaccttgaaatctgtaaaaccacaagaaagtactttataaaaggtatccttatttgaagtggataaatcttgtaactcgaaaagttgtgatttagaagacaggattgtttttgaacattaggaattaaaggctatatctggtccttaaaaaa

SEQ ID NO: 132376 - DNA, 802 bp, Homo Sapiens
  misc_feature (628)..(628): n is a, c, g, or t
  misc_feature (731)..(732): n is a, c, g, or t
  misc_feature (742)..(742): n is a, c, g, or t
cgagtggcaggttagttcattatatagagctttttgcacttttggctcatatgcaacaaggcttataaattcagcttcagctttcattcaggttttatagcttttgaacaattgttttcacatttaaagcagcatccaatttgcactaggagtttgtggtgattataggaaagacaaggtcaggaggttatcgaaggggcagggcgggggggatacattccagtgtgtgtggtgatggacggaggatgccgtgggatagagcttaccatgatgaccccttgaggtagactgaacaccttacagcagactcaagacacaggtgtgactcgccctcagggacacatggtgcacaagatggacagggaccagaggggacgcccaggggaaacatgaagactaagacacacagcagccgaggcagggaggagcgcgctgcccccacacccgtgtggcagggatcccgcatggcccatcttagaaactcaactatttggtggatgctaaacacttcacttcaggcaatcccaaggcatttgctccagggtatccgatgagattacagctgttaagcttgctttccatttcataacttgctgtgcagctagttaccacccccatgctgaagagntaagcaaagctgccgtggttcggcagtggaatccacccccagcactctgctcgcactggagcgttcaagtccggttatgtgagaacagactaggactctcttnngctgctctantgcatttcactgtcaccctccccagtgctctgcactctcacttacattcatctcttccct

SEQ ID NO: 132377 - DNA, 398 bp, Homo Sapiens
atcatatagtctagtctttattgaaagacttacttcaactgttgtttacagctttggcttaagttggccattttagcctctcactgccagcagacataaaaatcaagtgggaatggcacgggggttgggagtgaaaatactagtagagaaattatgagaacaaagaatatggcagtcagtcagaaacacatcaccaaaataaatctcaaaataattatgaaataaaaaacatttccttgcatgcccaaaaagtctctgctgatgtttttgatgaacggggtggggagcaacgattcttaggcttaagttggatcaagatagcattgggtcatgttataaaatcatctgttagctcaacagccatacttttaattaattcatttattttttgagatgga

SEQ ID NO: 132378 - DNA, 963 bp, Homo Sapiens
  misc_feature (52)..(96): n is a, c, g, or t
ggtagggaagaggtctttctatattgcccaggctgctcttgaactcctgggnnnnnnnnnnnnnnnnnnnnnnnnnnnnnnnnnnnnnnnnnnnnngtgtgtgccgccatgcccagtctcttttttggtagggccaccactcactgggtttagggttccccaatacactgtgacctcatcttaactaattatatcatcaaaacccgtgtttccaaataaggtcacattctgaggtctgggtgcacatgaatttgagggacccctcgtctgctgcagggagccctgctgtaccccagccttcccaggacgtggtctccagcttcttcatcctgccagagtttccaaatggagcccggggctctgcagcattccagtcccctttgcagatccatagctgctctgcagggcggaagacacctggggcgggaaagcacccctgagttccatcttcctgacatgtcgcctgggatgtgacgggcctgacatctccccagggccggggcccagggctgcctttgctcctggccccttagtgtctggaatgtggccttccacggttgccccactttgtctttctaaggtaagaagccttcaccttccagcttttgtctggcctgtgctgcgtgggagccactggtctgtgcacatccacggtgggtgagtggccaagacaagcagtgtgatagagtccttggtgggtttagtcatctcggaagtcgtagggcagctatggaaaccactgggttctggaacgttccagccaggcagtggttgttcctcataggtaggtggccttggccttcatcccagcctgggatgctccattgcatttgtcacctagtcactgtatatacgtgcacatttgaccttttggcacagcccaggttccaggtgcgtgacctgccctttttctcattcccttaactgacattatttagtgtcagaggccgagcacagtggctc

SEQ ID NO: 132379 - DNA, 1030 bp, Homo Sapiens
  misc_feature (119)..(119): n is a, c, g, or t
  misc_feature (144)..(144): n is a, c, g, or t
  misc_feature (151)..(152): n is a, c, g, or t
  misc_feature (158)..(158): n is a, c, g, or t
  misc_feature (172)..(564): n is a, c, g, or t
  misc_feature (606)..(623): n is a, c, g, or t
acagttccgtagcgcaggtcaaacaggagacacgaggagctccaagggaaccctgaattttagtctgtggggtcccccctttgactgagctcgattttggatctgtcagggggccgacntttgaaaaagccagcacgcgccttntacgtcnntgcctntgctgcctttgctnnnnnnnnnnnnnnnnnnnnnnnnnnnnnnnnnnnnnnnnnnnnnnnnnnnnnnnnnnnnnnnnnnnnnnnnnnnnnnnnnnnnnnnnnnnnnnnnnnnnnnnnnnnnnnnnnnnnnnnnnnnnnnnnnnnnnnnnnnnnnnnnnnnnnnnnnnnnnnnnnnnnnnnnnnnnnnnnnnnnnnnnnnnnnnnnnnnnnnnnnnnnnnnnnnnnnnnnnnnnnnnnnnnnnnnnnnnnnnnnnnnnnnnnnnnnnnnnnnnnnnnnnnnnnnnnnnnnnnnnnnnnnnnnnnnnnnnnnnnnnnnnnnnnnnnnnnnnnnnnnnnnnnnnnnnnnnnnnnnnnnnnnnnnnnnnnnnnnnnnnnnnnnnnnnnnnnnnnnnnnnnnnnnnnnnnnaagaattcggcacgagggttggagcggccgcggctgtaggcnnnnnnnnnnnnnnnnnngtaatttcaaattatacttctttctcctgccacatgactgtaagtcatagacatggaaacctgaaattataatgctgctcctagctactggcctcctgccccacccatggttaatggctcagctcaatgcctggtggtaatgagtattatgtccagaaaaagagatgttcagattccatgacaaagctgcatttttgtaaaaatattggagaccccaaaatgaacttcatgctgaccatttcctcctctctgtgtgctttcccttgcaaagcccttcaaatatcctcttctctcgacgccatctcctctccacctgcacctcttgtgccctttgtacatctttgattgcctgatgataacagggtaaaaggacagccaacctcatgcctgattagactgaaccgaat

SEQ ID NO: 132380 - DNA, 1077 bp, Homo Sapiens
  misc_feature (694)..(805): n is a, c, g, or t
aggtcttagttctttttcttgatacaagtcagcagagactccaatttctccacttcaataaattaatggattctttaaaaagagaaaaagattaattaaagccacatgagccacagccccaacaatctacagttataccccgaattcaacacctggcagcagtcataactaggggtctcctataacacctaggcctggatgtccagctgcctggtttcctctggtttataaattcagaacttttagatttctcttttgctcattctcccttctctaccttttagacaagagagctctggacctcctctcaaggctatctttaccctaagcagatctgcccaacatcccttcctccctaatacctgcactgctgtaaacactatacagttctctcagaaataggtccaatatttactatgttaccaaaacaaaagaaaagcgtagggagggatatgttggttaaattatatttaaagtttagccatgaccacaagcatatcatgtcctcacataatgtcatcacattcacaaatacaaaaacttagaatgaaggtgataaacctggctatgccccctaactgctgcatggagctatgtctaacgttatcagaagactcctgcactggtaactaatacaactaattaggaatgtgttctcattatgaaaatattcggccaggcatggtggctcatnnnnnnnnnnnnnnnnnnnnnnnnnnnnnnnnnnnnnnnnnnnnnnnnnnnnnnnnnnnnnnnnnnnnnnnnnnnnnnnnnnnnnnnnnnnnnnnnnnnnnnnnnnnnnnnntttgccacttatggtggcacacacctgtaatcccagctccttgggattatatgcatgagctaccacgccaggctgtacccctacagaactttaacatccaagtatcaattctttcttccaagcaaaaacaaggtttccagaactcaacagataactgaaaaccacactgttgttaccagccatagtccctgacagtaactttaaattgcccaagagcagtgaggaagcattttaaattattttcacatctattgaaggattccagccaagag

SEQ ID NO: 132381 - DNA, 509 bp, Homo Sapiens
  misc_feature (75)..(86): n is a, c, g, or t
atttcgacattttattgaacttttcatattacacaatttacccaaaacatttaaagtaacagtaagacaaacttnnnnnnnnnnnngtcatacagacaaaacatctctaggtgaggcaatatgtaaatttcattgtcaaatcatgattttgttactctgctatacaacttggtaccatatcaatgctactaaatgactcaagagtaagacattatgcattccgtttatatgagaaaaagagattatttacaactacttgaaagagaaacagaaatgccaacaacagtatcattcaaattctagtgcaatgtcaattgttaccaagagatcttatttgcttatataaattttgcaaataattcaaacctggctatcttattagaagctgacaaagtatgcttttctgttgcaaaagatcagtggacaaaaatcctccacaacctcagctgataaaacaaatttaagcagcattttttttccatttcctgaacagatgtactaatacttag

SEQ ID NO: 132382 - DNA, 982 bp, Homo Sapiens
  misc_feature (882)..(891): n is a, c, g, or t
tgcagcagaagcttgtgatattatggtgaaaagggagacaaaaaaagggaaagacagatactgttccaacatcgacaagcactggctgaacagctaaaggtcacagaagaccctgctcttattctgcacctcacatcagtcctgttgtttcagttttcaacccacagcatgctccatgcacctggaagatgtgtcccacagatcattgcttttcttaatagtaaaattccagaggatcagcatgctcttttggtaaagtatcaaggtttggttgtaaagcagctagtcagtcaaagtaagaagactgggcagggagattatcccttgaataatgaattagacaaagaacaagaagatgttgccagtactactcgtaaagagcttcaagaactttcttcatccattaaagaccttgttctcaaatctaggaaatcatctgtgacggaagagtaatgatcttaatttacatttgtcatatagtaagcattttcccccaaggttgaaggtgagtggtcacaaaaaagtagtcactatacaactcccctctccctgcaaaaaccacctcatacacacacaattcagttaaaacagtagtattgtattaaatgtaaatcttaaaaagatgtgaatttttgtaaattgggttcttcatggaagtttttttccacctgattttcacacaaatactatatgaaatttttcacattattttcacataattttaaaaattacatatttcaggtttgttctctttccaaatgttgaatgaaaaacaaattttccaatccatttatccctggggaaggattcatttgttgcgagtgccagtatacttaaatgtatactttatatacatttaagcagaaatttaaaatgtggtcnnnnnnnnnnaaaagaaacacttctgtgtcagaaatgaaaataaatcatgttttttatttttaaatagaaagcacttcaaaactaaaatacagaaatttac

SEQ ID NO: 132383 - DNA, 442 bp, Homo Sapiens
gattttaaaatactttataaatattttgtggtcaaaaacattactgaaaggccatcctttctgtgatcaccagtttggaaaatgcaattattcccatgtgtgcaaaactgcataaataaccaaatgcttacaactacaatatattatgcagttatcaactacttagctttcatttgaagggttcaaacaagttagtgcagccccaattggctagcagcatggtgtaattatttgtagagctaattctacagcaaatttcctatggcaagagaaaaagaggacaaggctgcaacttgtgttaaatgcctacctgaaccagacaatcctaccaactgattttgactagtgaatctgtctcaactttggaaatgaaattactagattgaatagattagttttcttcccagtacatttagagaaaaaatttgcttcacctcgtgcc

SEQ ID NO: 132384 - DNA, 2074 bp, Homo Sapiens
gtcgttcctgtgaaaaaccttgcagttcattttaataaatcaaaacattcacataatctcatgccatccaacacaaggaaaacacatccacctcccttttaacaaggattgacccaagcaaaataaaatcctctttaaatttcttcgcttccacttaaattgcatgttttatttctcccaatcccagcaatagcacagaagccccatcatatccatcccaaaccggtttcgagtaggttaaggttatagggacccttgtcagaacattgatacaaagggctcccaaacgccgggcacaaatgtgtctgcaaacagatggaagtaaacagtgcactggcccaaatgcttcatgagtcagtttgattttgcaatgcaatttgcatccttgaaactgccagtctggagggggacggggtagcgtgagggagtgaagttgaaagtgcctcctattagctcaccctttcaacattaaacagagaccaagagagaaatggttccaacatttcaccacatatatttcttcttacgcagtctaagctgagaatgccatgtaaatgggtcactgcgaaatgcagcaatttaatttttctccaatcaaaataagaaacaaaccagtatgatctcacttctattaacttttgaaggtttacagcagttaaagtatttttgcttctatgtatgaaggttaaaaaaatcattttttttcataaaatacaagagcaaccaatttcaccatccagtaaaagtaaaaactgggattcttttttaaattagtccaaagtggcgtttaggaacttagttgtaggctgctgcgctgacaccatgacaaaccaaagtgtagggctgggtctggttttgtttcggttttcttttcaatatcccatgctcatggattaagttctggaaatgttccaattgtaaggcagggatctgtttggatttcacccatggttatgctccttgggttgggatgctggagggtgaaggcacgttttgccggacccatgtcgactacctagtagtcatcaaggtcaaaaaattcatcgtctcctccttggtattccattccctggaaatctactcggtaccgcaagatacctccaattccaccaaatcctttcacaaactgagacccttcttgtgatttatctgtgacaatttccaacgtagctccaaattttttatagttgttagcaaaccattcccaacaggggcatgctctcgataagctcatgttcctgtccggtctctttgtctgtgaaatgagatttatccttttcttgctctggagttagatagagaattttctcctcttctgtgccttggcaatgaagaacatatctcattatatccagattttcatagactattagaatttctacagctcccatttccaaagcctttagtgtatcttcaacgccaaaacagtacttgcccgtgtcctggctgatttcatcaaagtatcgtcctattaatttcttctcttgaatgaatttcacgttggagaggacttcagtagataactcaatagcttggttgaatccattttcaccaccataggatatatcaactaattttaaaacttttgattgtaacctctgatcaaacatatcagattgacttagttcagttttaaagtcagcggatccagctaaaactagaccagccacattcactttgtccccagaaataaacagctgcacagcagtctctgctactttccgaacatagttatgtcgcttttccattcttaaacgggcaaaacgcaaggctgactgacctcctctaccgtgtttctttgggagatccacagtgaatttgtgcaggacttctcttgtgtttccttggagtgtgccaaaaagtgcaccactaccatctattacaatgaatccaaacttgctatcatctgaaagtagtgctgtaagagcctctgtatggaatttgttgtcacacaaatacaatgacgtattaattggtttgaaaggttcaaagtcaatgttgactttcttttcctttccggacgcgtgggcggacgcgtgggtcgacgatatcccgggaattccggaccggtcca

SEQ ID NO: 132385 - DNA, 679 bp, Homo Sapiens
  misc_feature (324)..(324): n is a, c, g, or t
  misc_feature (660)..(660): n is a, c, g, or t
gggttaaagaatatatacacagaatctcatttaattatcatagccacataattataatgtgaggaaacagaggctcagagacattcagaaactgactcagggtcacacagctagtatacaagggaatggagattcagactcaagttactctgactccaacagtgaggttcttccctcttcactgcaaggagcagcctggctcgtttccacaccaggaccacgagaatcccagcctacagtggagaatcttagaagagggcagggatgccaaatctgggtgacatggacattttagccaccagggagccacgctcctatgtgagnggagggaccagtcaccagtccttcacctggctgggatacaatcacactccaccagagtgacatcaacacttgatataaagacaatgtcaattttctggagccacaaaatcaaggttcagctgtaatacccagtgatctggccaatgcgatgcccaggagcctgctctgagcagccagccatctcccagtccaatattcctctgttccattaggcacctagcatgaggcctgctcgataaatgtggctggaactctccaggcacttcaagttcagtaggactcaggtgttctgctcttagtcaagtgcttgcttctttactcgcagtgtcctcatangactctcgaggcacctgtt

SEQ ID NO: 132386 - DNA, 664 bp, Homo Sapiens
  misc_feature (262)..(323): n is a, c, g, or t
  misc_feature (618)..(618): n is a, c, g, or t
  misc_feature (624)..(624): n is a, c, g, or t
gtgtaagccacagtgcccagcctcatgttcttcatactctattactacccacctcctccataccttgctggtcttaaagtggaagtgatgttaggctttagaatttctgacatcagatagttgttgctggaagaatagtgagttcaatctacaaaggatccttttctgcatgttaggagaactagatcggagggcagttcctggtggcgcccactgtgccttaccactcctgggattcgtttcacttattcctcttccctgnnnnnnnnnnnnnnnnnnnnnnnnnnnnnnnnnnnnnnnnnnnnnnnnnnnnnnnnnnnnnngctaatacataggttttactctcatggtctgagctctgacttcagagctaaagcattctttgtcattggcacgagcagtggccagactccaagtacctctgagtctgcagaggaggtgcaataagcatacccattaagccaccaaattgaaaagtattttggaggaaattgctccagcagtagattctatgctccatgttagggggcagtgagaaaatcccacataaagtataatatacaacttagtaaactacagtaaagctggagggagttttggtttaggacatagatacanatgtantatgggatggtgctgctatagcttggatatctgaccctct

SEQ ID NO: 132387 - DNA, 697 bp, Homo Sapiens
  misc_feature (674)..(674): n is a, c, g, or t
gatctttgagggcatttattgcatataaattatacataaaaattgttttaaaaaactctaaactgccacatagaatcaaaaattgaagtatttcaggttctgtttcttgtctttacaatcatggtataatcattgtttatttcaaatccatcatttaaatgcaataatatatagtactacaggggctggagacacatgagctgacaccatatgtactgagagccaactatatagcaggatattccctgaattagtttccatgtggagtaaaatgattattgaagaaaaacagtacaaatgtgctactttgaagcttacatatatgtattatttaaaactcaacagtaacctcaggaattgtttagaacctagttcaataaaatattttgggggatgaatactttatcactgatattatttagaattgctggctcatggtggtaataaaaaatagaccaacttgtagtcagctttattattgttttcaaattctttccagtgtaccctctattccctgccctttgcgggatagacttgttgtctcatcacctgtccttgatattctactgctactcctcatcaacaattgtgggttactgggactctagaataatatcacaaagccagaggccagtctgacttgcagaatctttgaaaacctcattattattcanagagtattattgattgcctaccg

SEQ ID NO: 132388 - DNA, 842 bp, Homo Sapiens
gatttggtaattaaagtttatttgaacacaaaatactttctctgtctataaaattggctgttagcagtagcagcagcatgtcctggccaaggggagtagatttctccagactactaaagccatgtatatagccattcccacttcccatattctgtggatatgtacatgtgcatggtagctagagtccctccaccagagtatctctctcatgatggtttcttcagggagaggaagaggagacctgggtgaagagctgggatggttttgagtggggcaagccattaggctgtaccttgaagcccagtctctctggatagctgtactgcaggtgtcctctgaggcccttctctgtactctgtctgctgagggaatggggtattttgactcccatagaaagcactagcctaagtcaccaaatgactgcttggtccccactgaagcagtgtagctctccatagtatttttggtggttatggattacatgtgtggccagctcatgctttttcttgagcaggggctgtccatgacctgtgctcataccatgctttctaagttctctttggacagggcctcagctgctgcctcagcctgagtttcagagagtgtgtaggagtcctggtaatcttgaagcagtttgaccacctccagatggttgaactgcacagcatcatccaggggaatgttgccccacctgtccttggcaaaaggattcactttgcaagcctcgatcaggaatttaacaacttcgatgtgtccttcagctgcagcaacatgcagagctgtgcgcgagtcatagtctttctgttccatatccatggctgacaaggcaaaccttcgaagcc

SEQ ID NO: 132389 - DNA, 383 bp, Homo Sapiens
cacaatttaattctttattaagtaatctctacaggtaaaattaaggatgatacttttccatattccaaatgataagcaatgagcaactattcttctacagtcacaaacaatggcaacaacaaacaggcattataaaagaaagacgcctggcaaacatatcctaagcgtacctgtctgttttcaagcaacattttggcacatttgtgctcgctctctccatctcttctctctcccaacacacacttttttccccaagccatctgaaagtgagctgcaggcagatatgaatctttgccaggtacatccagagaatctaatgctaatattatctgttacacaacccacattcaaatttaccaattactccttttcctcctcgtgcc

SEQ ID NO: 132390 - DNA, 773 bp, Homo Sapiens
cttggggacatggttctctaattagacattcaaagaaattcccagaactttgtgggttagcagtgatgttaagttactattggcttctgcccctcctacccggccctgccctaagcatttttctggtgtttagttgttgaaacatcatcacaaatttgtatgatatgttttgatgtgacatcattgcccctgtgttaagggtgtggaaactaggcagggagagcagaaattgcttgctctaaaacctgaacccatgattccatttccttggatatatgcctgggttggggatttggaaacctgtgggaggctgtgttattgagggtcattgttctcattctccatcttccttccctggatccgtgtcctctgtccgtgactctgtagtttgtgcatctagaggcagagtctgtttccttgtcctgttgatgttggctttggttgtgtgacttgcattggccaatgggacgtcagcaggtgtgacgtgggcaaagaggtggcatgtgctagcacagctggtcttgcctgcttgttctcctgccttccatcatgagataaataggcctctggttgtccctgtccaaggaagataggagaccctcagtacagcagacctggacccaactttcagcttgcagccaagaaaagccagtcctggctcagatgtgatgaacccatcagacttaacaagacgtccagaaaaggcaactccaatttggcttactctgtagctctaggaagtctctgtctgcatctctgggattctctggtct

SEQ ID NO: 132391 - DNA, 227 bp, Homo Sapiens
ggcacgaggcagattcagaggaaaataatttttcctctgaatctgtaaagtctacagaaaggaatactgcaagtatgcctttaatagtttataaggaagctattccagagatcgtgggaagccactacctgcagtaaaacccgtaaagatcacaggagaactgtattttagcatttacctggtaaagagctcctctcctatcactaacccaaggattttcaaatctc

SEQ ID NO: 132392 - DNA, 837 bp, Homo Sapiens
  misc_feature (696)..(705): n is a, c, g, or t
caaaaggttaatccattttcacttttaatattccaggttttgaatgtacaaaatgcttggttaaatggtgattaaatgtttttcattatttaagaaaacaggatatttcaaactttttgattatggtatatgcattaatacattacatttaaaaaaaattaggttaaaccagttattcaaaaaaggcattaaaccattattaaaaactaaattgaaactttactttttatatgaaaatttatcatgccattgggattaattttaaaaaatcaaaaatgatttttgtcattgaaactgctgaggctttcaaattcagtagttgaatgatgactgtttctttagtgaaacaattcttgcaattggagacattaagtctaagagttttccttctgctcttgctgtagctgtttcttctgcatttcagcaacaagaatgtgaaatcagaaacattaggactctaagttgaataaaggcattcatttcatggtaaacctgttcttcacttgcaatgaaggatgtcagcttttcttacaaaacatattatcaatgaattagaatataacaataggttatctcagtgatacaaatacaactcataccacaatagaaacagaaacatggagaacaaaaacatgtcccctaacagaataatttgtatattgatgatacaaggttttatgcatgtatactaatttnnnnnnnnnngtaggccaagcaccttacagacgtgaaggctttataaataacaggttgcctaaattctttcatgaatatccttcccccggacgcggaacggacgcgtggtcgacgattccggagaatccggaccggtccagc

SEQ ID NO: 132393 - DNA, 1045 bp, Homo Sapiens
  misc_feature (782)..(782): n is a, c, g, or t
  misc_feature (836)..(913): n is a, c, g, or t
  misc_feature (963)..(963): n is a, c, g, or t
  misc_feature (975)..(975): n is a, c, g, or t
  misc_feature (1015)..(1015): n is a, c, g, or t
ttttttttgcaagcaaaatattttattgaaaattcagaaaagttacaacactttaagacagcgtttttcatattctgttataaagaaaaatgttaaaagaattgacttgaatgttatatttaggtttcattcaaactaacaaaatcattttgaaaaacaaaaatccacccacagctgaatttattcagggtgtaaacatatattttcctatttgttatcaagaaaacgctaatgaaatatttttagtgttcttttcaaaacagcatctttctggacccaatttaaatagtaatttagtattagtatctagttcacatagattactgatttgtgtgtgtgtctgcatatacttgtgcacgcatgcatgtaggaactagctaattttaatatgaaattttaagaatcaagagtgatttgctatttcacttatcatagggcaataaatagcatttctagccatttcttaggcatgtttccttatctcataggtcaaaaccaatcagtttcagaaagtttagcctagtaagtgccaatggcataaacaagactaaccataatgctgccaaagtattaactattacagccaggaatttaatgttaggaagtacaactacacttttcagatccaagtttctcaaattttcttattaagggaagctaggtgagccaaagagatcagactcattttttacaaagtcattattgtatattatcgatgttctgtatgttaccaaattattttattcctcaacagatggtattgagccactgatgctatttanataattttattttatatttacactagctctattcctcgtgccgaattttctggnnnnnnnnnnnnnnnnnnnnnnnnnnnnnnnnnnnnnnnnnnnnnnnnnnnnnnnnnnnnnnnnnnnnnnnnnnnnnngctcacaatccacacacatacgagccggagcataaagtgtaagctggggntgctatgagtgnctactcacatattgcgtgcgtcactgcgctttcatggaanctgtctgcactgcatatgatcgcacgccgc

SEQ ID NO: 132394 - DNA, 1945 bp, Homo Sapiens
  misc_feature (71)..(79): n is a, c, g, or t
  misc_feature (317)..(352): n is a, c, g, or t
  misc_feature (1364)..(1373): n is a, c, g, or t
tgtgtttcaacaaactttatttatgaacactaaatattcatgttaattttcaagtatcataaaagtctttnnnnnnnnncatttaaaattataaacacaattcctagctcacaggccataaaaagcaggcagcaggctggatttgatccacaggccatagttggctgtctcttaaacaggcttttatacgttatgcaaagtgtttcaaattccagagactttggagacttttcgttttttagatttctcattttaaaacacacataatacaagttttctttctggatcaatatactcacgagagaaaataattcagnnnnnnnnnnnnnnnnnnnnnnnnnnnnnnnnnnnngctatagaacaaatgtttcgtcttaaaatatatttaggaaatgtaaaattaaagattaaaaattttattctatgcaacataaaataatatgcataaatctggcacataatttctttgtttttactttagaaaaaagacagtaagaaaaaagtttataaatttctcagtcccttttatacaaagttgcaactaaaaccagcaatcacttatatgtacaaccatcaactctgaatacaatgtgaattatacctaggaactgtaatttacctagatgagttctgcctgctttatgaaaaacacacacttatatcacagaacaccgtggcttctacaatttgtaacaattttgaaaacgaaactcctgcctccataatataaggaaacaagagtactctttccatagtcatcatcctgtataaaaaaaacttcatagtctgatttacctttgtcaaaggtaaaatgattcacatttgcttggattactctgatcctcagtagttcctaaacacaaaataaagtttgcatgaacctttatctgggttttccaaagcaagtattatgctggcagaagtccatgagctgaataaaaagatactaaatataaaaggtttaccaactttatcctttcttaattttacgatagcttcaggtattgagacctaactggtttcctgtgcctatccattgtgaacacatctcaatcttctacttttaacactcctcagcaccatattttcgttgtttctttattgtgcgacgtagaagatcctttcgtccaacttcaatcatttgttcttcccaagacttcatttcattatgataacgagtttcgtcctctttagcatgctgaatatataattccttttcagagtcagacagatttttccagttttcctttacagtcttcagcttttcctgcggtgaatcacccttagcttcttggaatctttcagctacataaacgttataagctgaacgaggtctttttggttttccaagcagtgttaactcnnnnnnnnnngtcatagctttcctttttaaatgtttgtccatgatttctttttccaaagacataatctgacttggagttagctgttctttaaatctgcttatctcttctttatatacctgccactccgccctataagcatcttgatatatttttttctttgaatcaggaagttccctccaacgctgggcaattcttctaattagttctgtagtttttgcatctgggttctgagctttaaatatgggtagttgttctttagaaaatcgaaggtaagaacttacaggtttctttggacaacttgccaagacagatgaaaaccacctcggtaaatacacaaaactgaagggggagcgcagtcgacttccacagccggtgcacagctctgctccagaccttcccagggcactcagcacgccccacatgcttcggagaaacgccatcgctccggtggatgaggcagtgacccgaccccaatctcggagagcctcctggcaatacacaactccagcaatcacaactggaacccgcgtgcgaccctccggcgtgtgttatcatgcccgccactagcgaggcactatccc

SEQ ID NO: 132395 - DNA, 1709 bp, Homo Sapiens
gggcttgagtgatggaaagactgttctggcatcagatacacaccagcgaattcggggctataacttcgaggaccttacagataggaacatagtacaagaagatcatcctattatgtcttttactatttcaaaaaatggccgattagctttgttaaatgtagcaactcagggagttcatttatgggacttgcaagacagagttttagtaagaaagtatcaaggtgttacacaagggttttatacaattcattcatgttttggaggccataatgaagacttcatcgctagtggcagtgaagatcacaaggtttacatctggcacaaacgtagtgaactgccaattgcggagctgacagggcacacacgtacagtaaactgtgtgagctggaacccacagattccatccatgatggccagcgcctcagatgatggcactgttagaatatggggaccagcaccttttatagaccaccagaatattgaagaggaatgcagtagcatggatagttgatggtgaatttggagcagacgacttctgtttaacttacaattagtcgtattttaatggcttgggatttggtgcaaacaaacatgattgatagctggacagacatgctcgtcatgaaaaaagaaccatttctgaagcccgattggggccaaacatttacaccttgcttcatagtaaccagttgagatgaagcacgtcgttagaacgttgttggacaccatgttgaattattcccccatcggttgtgaagaactgtgctacattcaggcttacccattgaactcagtatatatatttttttccttcctgtcttttgtctggcaggataccattcttgttgctcttctgtgtaatgaagtttaaatgcttgtttggaaaactttatttaacagtttagaaggcttgatagaaagagtgcattagtctgaagagtatacattggataggaaagaatttccttcttttgtttctccaaatctttccgccttatttagcttgagatctttgcagcttggttcatggattctagccttgcccgttgcgcagtatatactgatccagatgataaaccagtgaactatgtcaaaagcactctcaatattacatttgacaaaaagttttgtacttttcacatagcttgttgccccgtaaaagggttaacagcacaattttttaaaaataaattaagaagtatttataggattaaagtgacttcatttgtatacatttggaatctaaaccagcttaaaaacagtttcctcaatgacttagatacacagtataactgatgctcttctggaataccacatgagacatggtcagaaacagtgcttggaaggacattacacaagaaattcagagtaatgctttgaagatttccccccttttgttttattcctgaaggaacatcagtacccgatcttgaagaaattcaagattcaaaaagaattttaaatacaccaacatgagacatcagtagtcagttggttttcagtaaagcttgttccaagttgttctcaacttaggaagtaattttggtgtgatctagcaaaagagtaggaatcagcgatacaaccactttggaagtttatagtataattgaaattattagaagaattcagcaggctacagacatacttaaactgggattaaaacctcatagtcatttttcttaattgcccttaatattttgacatatagg

SEQ ID NO: 132396 - DNA, 1008 bp, Homo Sapiens
  misc_feature (88)..(88): n is a, c, g, or t
  misc_feature (91)..(91): n is a, c, g, or t
  misc_feature (110)..(496): n is a, c, g, or t
  misc_feature (541)..(563): n is a, c, g, or t
cccacctttgactgagctcgattttttatgctgtcagggggcggacttttgggaaaccccagcacgccgctttttacgttcttgcttntgntgcctttgctcacatgtcnnnnnnnnnnnnnnnnnnnnnnnnnnnnnnnnnnnnnnnnnnnnnnnnnnnnnnnnnnnnnnnnnnnnnnnnnnnnnnnnnnnnnnnnnnnnnnnnnnnnnnnnnnnnnnnnnnnnnnnnnnnnnnnnnnnnnnnnnnnnnnnnnnnnnnnnnnnnnnnnnnnnnnnnnnnnnnnnnnnnnnnnnnnnnnnnnnnnnnnnnnnnnnnnnnnnnnnnnnnnnnnnnnnnnnnnnnnnnnnnnnnnnnnnnnnnnnnnnnnnnnnnnnnnnnnnnnnnnnnnnnnnnnnnnnnnnnnnnnnnnnnnnnnnnnnnnnnnnnnnnnnnnnnnnnnnnnnnnnnnnnnnnnnnnnnnnnnnnnnnnnnnnnnnnnnnnnnnnnnnnnnnnnnaagaattcggcacgagggatgttggagcggccgcggctgtaggcnnnnnnnnnnnnnnnnnnnnnnntgtcggccgtctacgaagtcccatggcttttccagttctctcttgccttgaggctcaagaacagtttgttttaactgagagtctgggaggaactacagttttccccagagtagtcttggcggactactggaagtcacagccaaagaaattctgtgattactgcaagtgctggatagcagacaataggcctagtgttgaatttcatgaaagaggaaagaatcataaggaaaatgtggcaaaaaggatcagtgagattaaacagaaaagcctggataaggcaaaggaagaagaaaaggcatcaaaggagtttgctgcaatggaggcagctgccctgaaagcataccaagaggatttgaaaagacttggcttagagtcagaaattttggagccaagcataacaccagtaaccagcactatcccacctacctcgacatcaaatcaacag

SEQ ID NO: 132397 - DNA, 901 bp, Homo Sapiens
ttttctttcttttctttctgttgatttgatgtcgaggtaggtgggatagtgctggttactggtgttatgcttggctccaaaatttctgactctaagccaagtcttttcaaatcctcttggtatgctttcagggcagctgcctccattgcagcaaactcctttgatgccttttcttcttcctttgccttatccaggcttttctgtttaatctcactgatcctttttgccacattttccttatgattctttcctctttcatgaaattcaacactaggcctattgtctgctatccagcacttgcagtaatcacagaatttctttggctgtgacttccagtagtccgccatgactgcgccagccgctctgcaagtcgtccagggttccactcagactcgcgctttcccagcgggacgagtcgagctcttccagccgcccgatgcccacccgaacctccctccgatccagacaccttactcagtccccgggaccagcgttccgctgttcccaactacgggtgcccagacgatccaatccgcgttcgaaatcgcctcctctcccctccccctacaggggcggtactcccggctccaaagaggtggggtcggtataaaggggttgaggtcaccgggaaggggtaaaagcgcgacgggacctgagctgaaggacgggatctcaagcctcaagtccctgcgccatcccgccgtctctgtgtcctcccctggggcccaaaactccatcctccttctaggctcgctggctcaagggcaaggagctcagcgcgccgcctccgcccggaacgcaaacagctgttcccagagacgtctccgctctcaactttgccaactactccgcacgcactttgaccagcggagcaaccgggacctgtgggtcggggtcctct

SEQ ID NO: 132398 - DNA, 970 bp, Homo Sapiens
  misc_feature (678)..(678): n is a, c, g, or t
  misc_feature (713)..(713): n is a, c, g, or t
  misc_feature (740)..(740): n is a, c, g, or t
  misc_feature (772)..(772): n is a, c, g, or t
  misc_feature (793)..(794): n is a, c, g, or t
  misc_feature (852)..(852): n is a, c, g, or t
  misc_feature (875)..(875): n is a, c, g, or t
aaaacaaattttgtaaagttgaatctagtgaaaataatctttatttgacatttagagaacaggattgtggggaatattcttattaagaactttggtacaatgtactacatgtggaacagtcaggaactgcctaggtccacaaagaaccatttactcagatagtctaactgtaaacaaataaataagctgcctaaggaaacctcagcaatttaaaatcatttatataatttatagctaaaattttttaaagttgtatttcataatagagcttactcttatgttaaagaatggcacaaaattaagctaaccagcttgaattacattttctttacttccagaattgtcctggaaaaagcagtaaattcgacctctcctcagctacttgctcttcatagaaactggcctcagtcaaatgcacaaaggctcttcctcctggaaaccagtactgtgagcctcaccacccagggcttttagccagcactcacagtcagtctcctacttcagttggcacagactggataatgagctcctgggatgggaaaagcaggccactttggggttttcttgtcccaaagcctgcttttgaggtattgattttttttacaaaaagggaatcctttttcctaaagtttaactcacatctattgtcaccagttattatcttcccagttcagctcnccttcttcttcccagccttcagcctctcgctcagntatttctgctgcagcaattttgagganactgcatcactggggagaatcatcttttttgngacatttctgtctcagttcanngtatatagaaagcagcagaaggttaattctgggatatatcagcaaccaatcatctcangatctttactggctctttttacntgatggtgattccctcgtgcgatttctggctcagggcaatcctaagtgatctataatcgatcagtcaactgttctgtgtgatgtatcgccacatc

SEQ ID NO: 132399 - DNA, 604 bp, Homo Sapiens
ggttgatgttttctttcctacctgacatatggaagacaatgttttctccagctgggttcattttctctttgaaaaggagacactttggtgtctgccagtcatatgtgagctacacacacgtatacaccttttaaatgaaaaatgctgtgatagcaggagggctctgcttggctaactggttgtgtagcaagtcgggccccctcccctccacttagctattttgttacttgtagatcctgctctaattatttagcattaaacggacactaactctgtagggtgtgtaatcgtatttatagtactgttttattagtttgcattccatcctggtagtgtagtgatgtcataaataacagaaacatggtatccgatgcttgggaaggggtttacccggtggccaagccatattttacttgtcattattccgtgtggcggaaggtgggaaaataccgtgtgtgctgttaaacatgccaggtccctgcactggttagacagagtctcagtgctgtgctccgttgggaaagaagtgccctgcgaatgtgatgtggtttagatttatagcagcgtggcttgcagtgtgtttgctcctcgtgccgaattcttg

SEQ ID NO: 132400 - DNA, 696 bp, Homo Sapiens
cacattttgggagatactgtttataaaaagacaaatatagtaaacagtaaaatgcttactagtcccatgtcctgtgaccccaccttgcccaacaacaggaaaaccccaccaaaatgaaaatatgaaaatcaactcatgtaataaacctcttcagaggcaaaagactttagaggcaaaagacttaatgattaacggttgacttttaagactttactgcacattcagatatgttggaatcaattgagtttttatactctgaacagcaattaaatccagtctttacccgtcctattgctaaagaatatgacaaaagagtcttggtctcagaagtaggagcagcaagtgattactcatgatggcaatgatgcaccacattctgcagtgatgctcacatgcctgaatttcatctgaagcatgaaagttcccaaatcctgcaacagggtttcctttgttggagtccccgtccttgccgtcttcacttctataatcagctatgtgcctttgcagcaaatcaggaaaagctgtgttgagggttacaacttccagacatttaggtcttaacttccatcacagaaagcaatgcacttttttgaatatattaagaaaatatttattcatcccttcaagccactcactttcagaaagacaattgaacatccattttatcaaccttcatttaacccttttcctgtttag

SEQ ID NO: 132401 - DNA, 611 bp, Homo Sapiens
  misc_feature (204)..(212): n is a, c, g, or t
  misc_feature (216)..(252): n is a, c, g, or t
  misc_feature (255)..(353): n is a, c, g, or t
ggccattgctaaatcttctttggagaaatgtctattcaagtcctttgcccattttttaattgattctttgtctttttgaggttgagttgtaagagttctttatatattctggatactagtccttgtcagatatatgatttgcagatattttcccattctgacgttgtcttttcattttctttttaaaattgttatgccctattnnnnnnnnnaaannnnnnnnnnnnnnnnnnnnnnnnnnnnnnnnnnnnnatnnnnnnnnnnnnnnnnnnnnnnnnnnnnnnnnnnnnnnnnnnnnnnnnnnnnnnnnnnnnnnnnnnnnnnnnnnnnnnnnnnnnnnnnnnnnnnnnnnnatgagcttccacacccagacttcattttcttgataatgtcctttggctcaaaaaagtttttaattttgataaagtccacttttttagtttgtttctatgcttttagtgttatatctaaaaaattattgccatattaaaggtgagatgaagatttactggtttccttcatagttttagctctttagtactttgacccattttttgttaattttgtagtggtaaggggtcttgttttaccttttaaatgtccctcgtgcc

SEQ ID NO: 132402 - DNA, 676 bp, Homo Sapiens
  misc_feature (614)..(614): n is a, c, g, or t
  misc_feature (632)..(632): n is a, c, g, or t
atcctcttcattttcactatctgctgtataaagactttgatctgcaaagggctgcctttcatctttaattattcttccatttgtcagcagtaatcgtagatcattatctttcgctctccattcaggtactgtggaggatggttggagatgtttgttgaattttccattcagtttagagctcaagatgtcctcttcccatggacacatctctaatcgtttgaggacctcccttgtgtggagctctaggatgtctaggttagaaggagttcggacattatgatctcgaagtttcctcatctttcttcgggaatggtatggggaagttgcttcatttgaggatcgtgaaactggacacacaataggaattccctgagatttaactggtttgccgttttcctcctctattgctcgaattactttagaaagttctttaataaggtgtccaggtctaacattgtctggaatttcaaaggcatgttcagatacaagttcttttttcatccataattttaaagcagtatgcagtgctttcactccctgtactaggtaagtttgaggctggaaaccatcttctctcagttctttcagggtttccagcaagtttttggctacanaccaacatatggcttcanagaaagggaatttgaaaagatctggtgtttttagccctcgtgcc

SEQ ID NO: 132403 - DNA, 514 bp, Homo Sapiens
  misc_feature (330)..(341): n is a, c, g, or t
ggcacgaggttttcttattcaataaactcttttattctagtccacagatttttccattacaataataatgaaaatagcactagtaatttgtaacactgtaggcccaaagggaaacccctcctcaaattataaggtaaatgacacaaagttgaacatagggtcagtgttgggcaaaaagcatttaaaatatagataacggggtcaagattttgtgtgtgtgcaaacactgggttttgtttttcaggatgacaccattttagaaagtgcatgattttgaaaactatatgtgtaattgtgacaaaactaaactgtagagaaaagacaaaatcnnnnnnnnnnnnccaagaaaccaaaaggaagcaaatcaaatacaaggggcggatatgcaaacctccgctcctttggccctggaatggcaagtgagtgggcttcatagaaattctctgtagaaaggaatgtgtgggccagtgtggccatggccctggcctgacatcgctgagtctccaagtcttgt

SEQ ID NO: 132404 - DNA, 2344 bp, Homo Sapiens
  misc_feature (85)..(85): n is a, c, g, or t
  misc_feature (628)..(775): n is a, c, g, or t
  misc_feature (850)..(997): n is a, c, g, or t
aggaccggaccatcagctcggacgcgtgctgcagcggtgccagaggagcccgccaccggcgtgtgttcgagatggtggaggcacntgcaggagcaccctcgagaccccaaccagatcctgatcggctacagccgaggcctcgttgtcatctgggacctacagggcagccgcgtgctctaccacttcctcagcagccagcaactggagaacatctggtggcagcgggacggccgcctgctcgtcagctgtcactctgacggcagctactgccagtggcccgtgtccagcgaagcccagcaaccagagcccctccgcagcctcgtgccttacggtccctttccttgcaaagcgattaccagaatcctctggctgaccactaggcaggggttgcccttcaccatcttccagggtggcatgccacgggccagctacggggaccgccactgcatctcagtgatccacgatggccagcagacggccttcgacttcacctcccgtgtcatcggcttcactgtcctcacagaggcagaccctgcagccagtaggagagcttcgggagtgggtgcccagggttaggtgtgggaggcatggggcaggaccatcagtaaagacagggccaggtgcagtnnnnnnnnnnnnnnnnnnnnnnnnnnnnnnnnnnnnnnnnnnnnnnnnnnnnnnnnnnnnnnnnnnnnnnnnnnnnnnnnnnnnnnnnnnnnnnnnnnnnnnnnnnnnnnnnnnnnnnnnnnnnnnnnnnnnnnnnnnnnnnnnnnnnctgagcaggcggccgctccaacatcagaatggtaacatgttaccattctgatgttggagcggccgcctgctcagnnnnnnnnnnnnnnnnnnnnnnnnnnnnnnnnnnnnnnnnnnnnnnnnnnnnnnnnnnnnnnnnnnnnnnnnnnnnnnnnnnnnnnnnnnnnnnnnnnnnnnnnnnnnnnnnnnnnnnnnnnnnnnnnnnnnnnnnnnnnnnnnnnnnactgcacctggccctgtctttactgatggtcctgccccatgcctcccacacctaaccctgggcacccactcccgaagctctcctactggctgcagggtctgcctctgtgaggacagtgaagccgatgacacgggaggtgaagtcgaaggccgtctgctggccatcgtggatcactgagatgcagtggcggtccccgtagctggcccgtggcatgccaccctggaagatggtgaagggcaacccctgcctagtggtcagccagaggattctggtaatcgctttgcaaggaaagggaccgtaaggcacgaggctgcggaggggctctggttgctgggcttcgctggacacgggccactggcagtagctgccgtcagagtgacagctgacgagcaggcggccgtcccgctgccaccagatgttctccagttgctggctgctgaggaagtggtagagcacgcggctgccctgtaggtcccagatgacaacgaggcctcggctgtagccgatcaggatctggttggggtctcgagggtgctcctgcagtgcctccaccatctcgaacacacgccggtggcgggcctcctctggcaaccgctgcagcaccgcgtccgagctgatggtccggtcctccagcgcacgaaaagcttgcagctgcaccacaaacacgttgccactctcggtgcccaggtagagcagctcgccaggaggaatgtggcaggaccacggtgatctgtgtggcactgggggcagcaccctgggggtccacgcaagtgtgaagctctcatcctcctgcagctccgatgccccgcccttgaccttcaggctccaaaggtgcaggctgttgtcatccagcagggtgaccagctggcactgccagggcaggaggtggatctgcgtcacagcgttgttctcctggtgcagccccatgaactccacgcctggggctccgtagagcttgatggctccagaacgggtgccgatggccaggatgcgcagggacgggctgtagccgagggcgctggggtggttcgtgaatccatgcatccaccgtcttgttaaactggaacaggtcccgcttgagcctctcccgcacagggtcatgccctggcctcaggaaccgcctcattttgcttagtctgcagcccccactggagaccttttagaaacaactttcaaccacggcagacatctttgctttgtttaaggatcacatccaacatctggaaccccgggccagcccccgcccgaggcctcggcgtccctcggcgtccctcggcgcccgccgccggccccgctcgctccgccgcgcctgcccacgggctgctgggcggctcgaggcctcgtgcc

SEQ ID NO: 132405 - DNA, 775 bp, Homo Sapiens
  misc_feature (126)..(126): n is a, c, g, or t
  misc_feature (153)..(153): n is a, c, g, or t
taggggtgatgtgagggtccagtcttgggagggctggctgggaggccaagtgcccacctgttctgcttggcttagaggctgggcagtagcagggctgagccacttgcctcagagggtggtagtcgngggtggtctgttttgacaagtggagangaagtgaaggggagaaggagagctcgccatccttcttgggcttgctgagtttatgcatttgttttgttttactggcctctgttagtccctgggcactgaagttctcgttggggtccgtgtcggtgaggaacacgcgcacagtgctgagtttgtagagcagccgcaggcagacacccgaggcatcccagaaccgcaccgtgccgtcctcgtgccctgtgagcagcaggtccctctggggtggggctggggtcaggctggtgccaccatcaattggccactccatggtggagaagtgtgcgttctgccggctgccggcggcaatgatccgctcccacagcttcagcgggatgttggagacgtggtgagagcaggtgatggcggaacagtgcagagaagccaggtagggcagctggaccggtggccagcctgctgtctgcaggtcaatcaccaccagctcctcctcagccagcaccaccagggcataggggtcgtcaaaggtggctgcagggtctgcctctgtgaggacagtgaagccgatgacacgggaggtgaagtcgaaggccgtctgctggccatcgtggatcactgagatgcagtggcggtccccgtagttggcggccgc

SEQ ID NO: 132406 - DNA, 1153 bp, Homo Sapiens
  misc_feature (652)..(729): n is a, c, g, or t
agcttctgagctgccagaggacaacggaaaggcactgagagattgaggaatgggggagatgctgcaaaggagtctggactgggggaaatgaaacctggagaagaccttgaaggtcatctaatccagtggtttctagccattatttttaaaacctcgaaatattctttaaataaaaatttaaagtgaaacccaatagttatatgtcatataatacacttttgttcaatgaaaaaccacagaaacaatagtagtcccataagattataatactgtaattttactgtaccttttctatgtttagatacacaaatactattgtgttacagtcacacatagtaacatgctgtacaggtttgtacctaggagcaataggctatgccatatagcttgggagtgtaacaggcaataccatctaggtttatgtaagtacattctgtgatgtttgcagaacagattgcctaatgatgtatttttcagattgtaacctgatcataaagtgatacatgaatgtatatacaattgacaaaaagggagctcctctggctgcagtagtgaaggagggcatggggctccatctgctgatctctttcttcccctcactcccaattccctttcacagtggtcccttttaaaaacctcttggaatcattgnnnnnnnnnnnnnnnnnnnnnnnnnnnnnnnnnnnnnnnnnnnnnnnnnnnnnnnnnnnnnnnnnnnnnnnnnnnnnnttttgatcagtatggctctcaaatctaaagcaattgagtggcggggaagactaacgtttcctacttcacattgaatgttgggtcaatccaatttctagtggttgttggcatcatgcacacagttcactaagtgtatttggctgtgccctacttggagcagggattccttggtaggtgaccactttccaggtcctaaatgggatatgagagagtgaggggcaatatccccctttggctctgctcttgcagttagcttcacttacctaatgtagtctttgctctttctctccttccatccctcccttaatccttctttcacaggattccctgacactagaatagacaagctttcacttctttcaagcctagcccttaatgttctaaaggggaaaataaagcaatttatatggtcctttacagcgat

SEQ ID NO: 132407 - DNA, 948 bp, Homo Sapiens
tttgacaagaagatacatttatttcactgcccaattattttcttaaaaaagcttaatgtttgataaaataaaacaaacttttagtaccatagaaacctttcaacatgtacaatgacatattattactatgtacaacttcaaaaacaaatgcttccagctgcaagtaaactgatgttgaacatcctgcctatatttcagctgtacgaaatttcctggatggccaatggtctccttggcttggaaaaaattatataaataagaccttcaatgagttgggaatcataaaaatgctatctgaaattcagtcatctggatcttgggaagtttgcaatagctctaagagttcaacaagcaaaataaaaccctgtggatatttaaacttcagttgtccaagacgtcttgtaggttcacagttggtctatcaaaaataaaagctattcctatcgtggcaaacaaaacttggtatctggttcaaataccatttttcaccagctcatgaactccattctcatcgatgattagaggtgcatggaattctttatctgccacataactttctaatccttctccagcataggagataagaggagagatttcacattggattggtacatcattggcatccttcaagttgtgattgacatcagctgtgatggtctctgacttcccatttgtagcactgcggggaattgctggaaggcgagagccattttcatctatgaaatggccccctgcattgaggacccagcaatgatgaagggacatccaagcatgccttgcagtagtagggttgtctttcccattctgactatcagcattctttagtgggggaaactcatcttctcgcaatacttcatataccacaaacttctttgcaaactggaagatgtcaaagacaaatttttccatctttattccattgggtttgtctggcttaattaactgtgc

SEQ ID NO: 132408 - DNA, 851 bp, Homo Sapiens
gtgtcggtgctgacaggtgtggtgtaagggtcttcagccgctgggtaagcccatgaggtggtagtagtggaggcttggggcacgtgttgctaggtccagcccagtcggggtctggcgcactctgtctgtccgcccgttcaacctgccagtcggatgacgagtccgatcggggacaatgacgccgagcatgtggaagtgaggccaggaccagtcgccttagagccaatggggggccaaaagtaccctcatccatataccaccagataaaccacgtgttaccgttacacgtgcacagctgctggatcaccacactggactcaaataccacagcccaatattggtatttccgagcatggatgtttttccggagctcgttccaggaatcgccggtccacatagttatcaggaaagggctgtcgctcatacaagaccttctgccacttgacctccttggtgttagtcacaggttgagcatacattatcctgttcatgtcaaactcaggccagtttaatcatcgccctcacagaagtccaggtggttcttgttctttatgaagttttgaaatgagacctccctggaaattccatgctgtgttgatgttctaccaacctttccttgttttcaaaggcaggggctaggcctacaatagatgaatttgtctctgaggcaggacaacacagccaagttcctacccgagagttcctagggttgcgcagctgggggacggcaggcacccagcctttttcccgcttcggggcgccggggctgcgactgtggccaagcacttccgggcctcgtgccgaattcgccacccaggcctcgctaccttaaacccgcttagagttactgc

SEQ ID NO: 132409 - DNA, 1504 bp, Homo Sapiens
ttttttggatgtgttatttttttaatagaaaccacatcacttcatatgttacagcatgtaattcaagaggtccccagaaagttttttcatctacaaaataacagaaaggataagcaccctcaccacccaagcctttggttcattttttttggttttgatctctattctcttaccacaatgacatgctgcttccagaatggaactctgtctttaagttctatactagttaggaggctaatctatcagcttgctttaataatgtaatggatgtcctaatttaactgaggaacctggacaagtcttccttgatttcagcttcatcccaaggcccatgaatgttttctttaaaaagctgcaagcgaatgaggtagaatggacacagacatgagatagacatcagcagaagggcaaagagtacggctcccacagcactaatggacagtaggcctcccacggctgaaaatgcaaaaagcagtgtgacccccacatagctccggggagtacatgcctttagtttcttctgcaacatgggccacagggcaaaaatctgaatggcaaatgtcaccatgatgaaggcatgcagggaccggggaagacgtgatgccaagcatacagaagcaaagatggccatgttcaaggatagtgtgctggatacaatggcagcattggcaccatagtcaaaaaagatgagatggcctaacagcatgaagactgacatggcatagatggtgtcagtgctgacagactctgtaagggtcttcagcactggtgaaaacccataagtgaaagtaatgaagactagggcactcttcaggtcagcccaccgggtctgcccactcttcttccgcccttcacctccatcaatgagatcaaacaaaacatacccaatcagtgaagaagccaggccagtccctaaaagccaatggggggccagaagaccctcatccatataccaccagataaccacaaaaacacaaacactgcacagctgctggatcaccacactggactcaaataccacagcccaatattggtatttccgagcatggatgtttttccggagctcttccaggaatcgccggtccacatagttatcaggaaagggctgtcgctcatacaagaccttctgccacttgacctccttggtgttagtcacaggttgagcatacattatcctttcattcaaactcaggccagtttaatcatcgccctcacagaagtccaggtggttcttgttctttatgaagttttgaaatgagacctccctggaaattccatgctgtgttgatgttctaccaacctttccttgttttcaaaggcaggggctaggcctacaatagatgaatttgtctctgaggcaggacaacacagccaagttcccgagagttcctagggttgcgcagctgggggacggcggcacccagcctttttcccgcttcggggcgccggggctgcgactgtggccaagcacttccgggtcccgggaatccggaccggtccagcc

SEQ ID NO: 132410 - DNA, 1033 bp, Homo Sapiens
  misc_feature (367)..(394): n is a, c, g, or t
  misc_feature (425)..(903): n is a, c, g, or t
  misc_feature (920)..(920): n is a, c, g, or t
  misc_feature (958)..(958): n is a, c, g, or t
  misc_feature (961)..(962): n is a, c, g, or t
gaagcacatgtttttcatagggtatatatgaggacctaaactgctgtgaaaatgatagaaagcaagtagctcccttattctgtttttgattgcagccttttatcttttgctaattatagcaatatttattgagcacctgccatgtgactgtcactgttctagatattttacatgtaatatacagataaaagaatagtactttatatatattacaatgatacaatgattacattaacaatacaatattttgcttgtcatatgctaagaataattgggtagagtgacattactgtgccttcgattaaaataagtacttttttgcgtgttaaattcatgttttcaataaataataaatgcatatagttgnnnnnnnnnnnnnnnnnnnnnnnnnnnngcctacagccgcgcctcgtgccgaattcttnnnnnnnnnnnnnnnnnnnnnnnnnnnnnnnnnnnnnnnnnnnnnnnnnnnnnnnnnnnnnnnnnnnnnnnnnnnnnnnnnnnnnnnnnnnnnnnnnnnnnnnnnnnnnnnnnnnnnnnnnnnnnnnnnnnnnnnnnnnnnnnnnnnnnnnnnnnnnnnnnnnnnnnnnnnnnnnnnnnnnnnnnnnnnnnnnnnnnnnnnnnnnnnnnnnnnnnnnnnnnnnnnnnnnnnnnnnnnnnnnnnnnnnnnnnnnnnnnnnnnnnnnnnnnnnnnnnnnnnnnnnnnnnnnnnnnnnnnnnnnnnnnnnnnnnnnnnnnnnnnnnnnnnnnnnnnnnnnnnnnnnnnnnnnnnnnnnnnnnnnnnnnnnnnnnnnnnnnnnnnnnnnnnnnnnnnnnnnnnnnnnnnnnnnnnnnnnnnnnnnnnnnnnnnnnnnnnnnnnnnnnnnnnnnnnnnnnnnnnnnnnnnnnnnnnnnnnnnnnaaatcgagctcagtcanagtgggaaaccgacagactataagatacagcgttcccntgnnagtcctcggcgctctctgtcgaccctgcgctacggatactgttcgcttctcctcggaacgtgggcttccat

SEQ ID NO: 132411 - DNA, 1441 bp, Homo Sapiens
  misc_feature (214)..(214): n is a, c, g, or t
  misc_feature (233)..(379): n is a, c, g, or t
  misc_feature (397)..(419): n is a, c, g, or t
  misc_feature (1045)..(1045): n is a, c, g, or t
  misc_feature (1237)..(1237): n is a, c, g, or t
  misc_feature (1323)..(1323): n is a, c, g, or t
ggggacttgaaaccccaccgcttacgtctgcttgtgcttgctccttcttctgtatcctgttgtgtaccgttccgcttggtactgtccctccccaccgacgccggccacgatcatggcgagagcgaagacgcccatacgcaaccccttcccccgcgtgcccgttcataaagcagtgccacgacagtttcccgactgaaagcggcagttagcgcancgcaataatgtgagtagcnnnnnnnnnnnnnnnnnnnnnnnnnnnnnnnnnnnnnnnnnnnnnnnnnnnnnnnnnnnnnnnnnnnnnnnnnnnnnnnnnnnnnnnnnnnnnnnnnnnnnnnnnnnnnnnnnnnnnnnnnnnnnnnnnnnnnnnnnnnnnnnnnnnaagaattcggcacgaggnnnnnnnnnnnnnnnnnnnnnnnagttatcatacatttatttttaacatagcaccccagtttcacatcatgtatattttccaaagttggagatctttaactatgttcttcacagacttttcaacaagtgtgaaaaagaggcagtaaggttagcttgagtctacaagtcacaatccaaatataggacacctatgtttaaggtcaatatacataatgttcccaatgcttagcaaatgaatgagactctggctgagtaaaatattaacacaacttgttagcacattatcatgaaaagacagaaggcatcaaatatatactttgctgttacactttttactgttcaatgtacttgtagtgaaaaaatatacatttttactttcaaggttaaaatagaccatcagctcattatctctcttagccaatagctatgaagactaaaatggctcttcttgcttctggctcacttgaacatcttatttgtgctgaagacaaaaaggatagcagtgctaaagaaaagggtatacccggttcccaagataggtgcggttgaggttctcgcacaaggtgacttaaaacaaaaataacacaactcacgttgatccaatctccacacaatggggttgcataatcaactgttccagccccagagnaagagctccctgtaaagagcttttaggatctgggccctgttgttcaacaagagggcttcaaggatggaactggtatctggaaggtttctttactggtagtttccaattccaatttacgcactttttaagtccggtgtctgctggtcttcagagtcataaaccacttctcttatatccacagccagtacatgngcttaagcacgacaaggtatcacacacattaaaatgggcattccccgttgttgcagaggcaggttctgtactagacagtctgtgtntgaaccgtgatgcgccaaaaaggtcttatacagtgggtggagtggaaagattataagctaagaagtgttttaaggcttccaacaaaacgacggtgagagagtcaagtcaactttattg

SEQ ID NO: 132412 - DNA, 827 bp, Homo Sapiens
  misc_feature (755)..(755): n is a, c, g, or t
  misc_feature (799)..(799): n is a, c, g, or t
tttcaggcatcaatatttattaacacaagacaaaggaaacacattcaatgagttaatagaacactgtccagccagatgttaaatttaaaaacgtatatctagtctaacttcaaataaataaaaaaactttatacataattacacagtactgtagtttgaatttgacacgggtaaatatcttgacagaaagtaaacaaaacagcatttaggactaaaaaattattcttatatctttagtctcttcctctggacaagtaacatggcccaactacatacacctaaaccagaaatgtcgtatgaatgataaagaaaaggcctattgtgtatttggcgcattgcagcttcttgctccaaatactcttgcttttacatcaaagcagacaacaaaaacaacactaaggcatagatcttgttggagtttgaggatgaggtgataactcctcattgctttagactaaaagattcctggatattcaaggaaagtaatttatttggccaagatatagagcaccatgcctggggcagagaccttaatagaaaacctaaggcctcgggccctcgttgagtcaacaaaagcattaagcaaggattgcccagtgactaaagtaaggagacagactcatgtgaccaagacaggcaatggtctctaaacagcctgaggcaacacaacttcatgaggaaaggacttggtactggggagacctggtcctttatgaggcaggaagtacagactgtggattcactgacactgattnagatgctggtccttccagggtctcactgaattcctaggatctangaattttcctgaggcagcccttcctgat

SEQ ID NO: 132413 - DNA, 1438 bp, Homo Sapiens
  misc_feature (211)..(212): n is a, c, g, or t
  misc_feature (248)..(248): n is a, c, g, or t
  misc_feature (287)..(287): n is a, c, g, or t
  misc_feature (296)..(296): n is a, c, g, or t
  misc_feature (387)..(387): n is a, c, g, or t
  misc_feature (1038)..(1059): n is a, c, g, or t
ccccttccggctgcgtcatatcatgcagcagtccgatgagcgcgtggccaccatatgtgatgtcatcgtacacccagctacattatctccgctcttgtgttgatgtggcgatacattcacacaggaacactagacagatacgattatcgactcattagggattgccctcgagccagattcgcacgagtctcagagagtgcctatgctactnntacctcagagcatcttcccagccacccactcccatntcagcccttttccgtattttctctgaaaggatcttgtcntgtaaaccntaaagagagtgtccttaatagcaatcagcacttgtaagcttatatactggtgcatttgttttctgttgggtgaatgcggtgtgtgggcgtntgtggattctgaaagagaaagccgtgtgtcgtgtgccatgacatttctattgcacattctttgtactggcttctttaacagcgatgaacgttcttttccctcctgggttgttcatccacgacagtctctccctgtgctccttcatcacctttccctctctctttgatggctacagagtggtagggcctggtgcttagtcgatgaaggaatggtagccatctacagtgctgctggagatttccgccagagcgctggagaccttgcgctcagatcttctctggtgatgaagaggtgaggaatcaagtgactgatctggaagaaatatctcgcagcactgcagctaacatcacagaacttaagtgtgttttgtgtgtgtgcccacacgtagacaaatgtgtacggtgcacacacacagtgcatcattttttaagggcagattatatatatatatgagatgtattaattcagtggttaccatttgtttgcaggaaaaagaaatgtatgggtgaaaaaatttatggttgataaatccagccaaggagattaaaaggggtttggataaattctgggtataaatgctcagactaaaaaaaagaaatggcagttttgcacagtgctatggtcttgcactagtttttgtttctcatctgnnnnnnnnnnnnnnnnnnnnnnggaagaaaatgtaccttttttatggaatgagtagactgtatgtttgaagatttagccacaacctctttgacatataatgacgcaacaaaaaggtgctgtttagtcctatggttcagtttatgcccctgacaagtttccattgtgttttgccgatcttctggctaatcgtggtatcctccatgttattagtaattctgtattccattttgttaacgcctggtagatgtaacctgctaggaggctaactttatacttatttaaaagctcttattttgtggtcattaaaatggcaatttatgtgcagcactttattgcagcaggaagcaggtgtgggttggttgtaaagctctttgctaatcttaaaagtaatgggtgattt

SEQ ID NO: 132414 - DNA, 704 bp, Homo Sapiens
  misc_feature (597)..(626): n is a, c, g, or t
gttatttaaaatgttgatattttatccatcatgaatttttacattttggtttttaaaatgtattaaaatatcattggttttggttcctgagtttttttggcgcctcttagattttgccccttacgcgagtgcctctcccgtctcatcctattccaggatgcactctgtgaccttcagcaaatcgccgtctttctttttttaaatcaggtcactttctgagctgttttttcttccagctgtaaggtggggatattgttgccctcttcacgtggttcgtgtgaggaatcttggcacttggctgcaggctcgaagaatagcaattatgtaattcatagtacaactgctgttaataatacctagagcctttttcctctggcaggtttgagtcctcaggcttgtctcctcagccctctctagaaaagtcagcacccacctttacccagggtcttcctaccaaaaccagtttttaaggcaaagtgagcagaggattcgaatgatacaggccaggcctgggtgtcatctctctgctctgcaaacagtggagttggacaaggatttgggcaatttgtgggcttcaaggtcatgctgttcttatgnnnnnnnnnnnnnnnnnnnnnnnnnnnnnnagcttaaaacctcatagagctcctgaaaccaggaaaagaacatattttttcttttcctcttttcatccttccctctct

SEQ ID NO: 132415 - DNA, 1100 bp, Homo Sapiens
  misc_feature (170)..(186): n is a, c, g, or t
  misc_feature (694)..(731): n is a, c, g, or t
  misc_feature (895)..(895): n is a, c, g, or t
  misc_feature (927)..(927): n is a, c, g, or t
  misc_feature (1021)..(1021): n is a, c, g, or t
  misc_feature (1028)..(1028): n is a, c, g, or t
acattttaaaaagtttatcagatattgcaatgttaaagataaattatttgaacttctagtaggtagtaatggtgtcagagaatgacaggtaattaagtcatacagtacatcttgtgtccacatttcatgcaatttttgcagaatgctgtactatgtaaactgctactgcnnnnnnnnnnnnnnnnngcaattattgcactgaattttccataaaatccctccaagtaaatcttatcacccctttgcagatgagcatcttgtctttgggaagatgcaatagaaaaggaacttgccatagaaagcagtagtaagacttcttatatgagactaagattttcatttcattagctctctccttcaccttgtttattaattctacaagcatttattgccatctcctatgtgccaagcactggtccaggctctggggatacactatgaacaaaatacagtgaagtccctgccccatggagcttacattctagtagggggagacagacaaacacataaatacaaaatatcagagggttcaaaacagcttagaggtatcttgcctgaattctgtttactgcatatcctcattcttgggcaatgataaagtgaagagagaggccaacaatgggctgcagcaatgttgctagtcccagctctaccatctacacattgagtggatttaagtgagttctcatctgannnnnnnnnnnnnnnnnnnnnnnnnnnnnnnnnnnnnnattggattaaattacttataagggaaagggtcctttcaggcttttttcatgagagtagggtgctgaaaatcaagagccagtttgttgactcctctaaggtttaaaaaatatttaaatataaaatctaagaaatccttagagatcccatacactcaatacttcanatgccaatctgaacttctttcatcaatagcanattcttatttacaatggctatagaatgaagtcattttaccatctttagccatatgaaaaataagttatttacttataaaaacattcatttttantattggntacaaatctcacttatttgtgaaatgttcctagctatgagatcctgccttgatgtgacactattctctcttc

SEQ ID NO: 132416 - DNA, 698 bp, Homo Sapiens
gctattttttaatggaaaaggaacagtttcaatattcagtttatcttctttatccagcctcttctttttgtgttgtagaaattccacagtgaacacttatacttcatccgttgactctagatgacactgaacctcacgataggaaactttcagtgtgagatggatcatctcgtttcaaagagcaaagaactgatccctgcctgcaaaggctctagggcttgcaggatctctggaactgctgaactgagatgtgggtctcaaccatgtgggtttggttctgccttctccacgctcggactagatctctttctagatgcaaacctaacttcccctgtgatgccacgtgcgctgggccagggcttgttgcaaaccccacagttgtgtttcctggaccacccgctcagcagcatcccagacagtgaaccagagccctaattgggcctggaaatcaatgccttagtccatgctcagggacaaatggagcaaagcaactgggacctagagatacagtcaaatagaattaagctagtccattggtggataaagggttcctagcccctgggctgagtttgaggaccttttcttagcgggaactgcactgccaggtaatttagcagaatagggaagcaatgcaagaatccagctaccagatctgtgggtcaaggaacatactatgacttctgagcaaaactagtttt

SEQ ID NO: 132417 - DNA, 665 bp, Homo Sapiens
ggtattttttaagggaaaaaggaacagtttccaataatcaagttattttctttaatccagcttcttcttttggggttgtagaaatttccacagtgaacacttatacttcatccgttgactttagaagacactgaacctcacgataggaaactttcagtgtgagacggatcatctcgttcaaagagcaaagaactgatccctgaatacctcaagaacagtcctttccggtaatttgggagccacctgcctaaatgcttttttgaaatcttccaaagttaaaaatccacgatagtaggtgtcaaaggctgtgaagatgtgtcttacttcgttccgatatcgttgagcttccttctttttcctgacaatatttaaaaacccctcgagtaatataccagaagtatttggatttattgaagacatcacagaatccacttctatcttggagggcttgtacccaaacagcattacaacagcagttttaaagtcctctctgctgagatatcctttgtgatcttcatcacatgctttaaatacttccacccacttcctgtgttccgagggactggctccccacgtccgcgacctggctctggcctcggagaagaacatcgcgactacaacaaccgagccccagcaacccaaccagctaccaccgctttcccccc

SEQ ID NO: 132418 - DNA, 1260 bp, Homo Sapiens
gagaaaaggaaagttccccctttaagcccctaggtccctgccccactagagcaggatacgcaccattaaaggagtgcaatttcaagtcagtttttcatatttagcaaacatccattgcaccccttataaggtcctcgactttaagaaatttatatgaaatcggaaaacttaaatcttgaaactatacaaggatctactggaagcatcagcaggctaaactcatcacatggtattttcattccaaatttagtgttattgatcagtgtaccctcagaatatccttaagaagcaggaaggaaacaagttttcctcttcccacttccaagactgagaaagagtccagatgagctggtttgcccaagcaattcttatcaccagatactccgttattaaacgtgtctcctgccttctttgaaagcaacaggagaaatgaagcataggaaagtctgcaagctaacagtgtatcacctaggaggcttgtatataaatatgaagctctgcaaaatgtagttataatgaaaggcacttcctattaccagctccctaactttttttaaaagaattctatctccagggaaataaaactggttaagacagtgctctgatatgcttagtttagttccttcatccaagaaaacagaccttccccaaccacacctgcagggttacttcagacaaccagcttctcattttagagtcccagttcttagaaatggagaaaggaagttcccctttaagccctaggtcctgcccactagagcagatacgcaactttaaagagtacaaattcaagtcagattttcatatttagcaggtgatcttacaaagatatttttcaataaatggattatgtttttcaatgaatggatcttacaaagatgtttttcaataaatggaaggaaagatgtgtgtgcttggtttttttgctgagacccaaatgttgccagtgcaatcccccaccaggggtacaggtcaaatcaaagctgaatgaagagctcatcttcgatgtagctttccaagctttcagaacgagacaacaataagtgagcagcttcctcatctattttacaggtgaggaaattgaggccaagagagaggtaaagagtcgtgctctagcccatgaaagaaggaagcaacagagcccagattcaacttcaggtgtttctaactccaaagcctgaaccaaactgccttcctctgattggcattggtacctggaacttcacctgttccaaggagctgatatttgcaaggtgccgt

SEQ ID NO: 132419 - DNA, 978 bp, Homo Sapiens
cagtcgacggtaccggacatatgcccgggaattcggccattacggccgggtcatataaatttcttaaagtcgaggaccttataagggtgcaatggatgtttgctaaatatgaaaaactgacttgaatttgcactctttaatgttgcgtatctgctctagtgggcaggacctagggcttaaaggggaacttcctttctccaattctaggaactgggactccaaaatgagaagctggttgtctgaagtaaccctgcaggtgtggttggggaaggtctgttttcttggatgaagggattaaactgagcaaatcactagaagtatgccctgtcccctgctcagaacactggggagctcaagagtgggctgcaatgtgcacccctcaggaatagctgtgaattgcaggtctactggctttttgctttttgtcctttgctgcaaggtaccccacgtacttaaccattctcaacagtgtaaatcagtgtcattttagaatgagatactcagcttgcttctaaagtcactgaattactgagtgagtctctcctttagagtcttcggcaaccaaattccagaattgaagagtctactactcagaggcaacaagattcaacacaaagaaaacacaaaaactgttgaggtgaaacaaacatagaaacccatagactagggaaacacagagaaagtgttagacgcgaacaggggaatattttccagaaataccctctacttcaggacaacacatttggtggaagaggaaactttggagcgtttacccaatccccaaatgggcagctgtaagggacccctggaggtcaaacgcttatagccctttgacgccgtacaagctgtctacatcgtttcacattatcagactccgtggtagtcccgaacatattcttggacgggaacaaccggatattagctaaagacttgtgcaacaaccggcactcatagacgcaccttccacaagcacaagcc

SEQ ID NO: 132420 - DNA, 401 bp, Homo Sapiens
  misc_feature (73)..(97): n is a, c, g, or t
tcaggattgattttgtttaaaattttttccccaatcttgcggtgatttgggtcaccctccgggtgttaatagnnnnnnnnnnnnnnnnnnnnnnnnnatcttgttttcttggggttgccccctcttgtttgtgttgtgtgtggaaatggcgaactcggcaaatacaaacaccgtgcctaaattatacagatctgtgattgaagatgtcattaatgatgtgagagacatctttctggatgatggagtggatgaacaagtactgatggaactaaaaactttatgggaaaacaaactaatgcagtccagggcagtagatggatttcattcagaagagcagcagcttctactgcaagttcaacagcagcatcaaccccagcagcagcagcatcaccaaccaccac

SEQ ID NO: 132421 - DNA, 1120 bp, Homo Sapiens
  misc_feature (866)..(889): n is a, c, g, or t
aggtttgagggggaatgctggaggattaacatggtaagattcattttgaaatgcatacttgcagttattttagtgcgtaagctttctcctgggttcatctgatatctgactctagatatagatttgatgacagtgaaagtagaagtgggccatgagggaaattggcctgcctccctttgcaaacagctaccctaggtgagtttgttatagacttttaagcaaatcggcctcatcagacataatatttggagctagtgctgccctaagagagcgtcagtgggttttaagtatttggggatttgaggattcagtaaatcatttaaatcttcccaaacatcccaatttcaattctcagggtctgtttcccattcaatgccatgattttctctggttgtgaattcataaatttatataaattctttaaattctgtctgcagtacaattcatccatccgtatgatcaaatgttgtttggtttatggccagaacagccttgtggatacaagagaaaatgtattatcttgcaaaagtataaaatgctcctgactttttgacagattttacccaaagatttaaaatcttgagctcatcattgctttattgtaggccctctgacatgattagaagcagccattccaccccaaagcccttgtgttcctcaatatcttcagaattgttgtcagaagcactcattttttcagactttgcacttctttccatgcagctgcagctgaaatttaaaggccacttcgcccctgcttgccatggactatcagcgtcccatcctgtcatgtgaaccaggtcctcacttccttaaaactcaactacaaattggattatgttaaaattaagaaaccctattcatcnnnnnnnnnnnnnnnnnnnnnnnnccactagaagagtgtaaaggaaatcctcagagtgaaagaagatatttgcaccaaatataaccaacaaagagtttgtgtcttactagtcagtaagaaaaagacagataaccagggagtgaaatgaagaagaaactgggtcacttcagaaaagagaatttacaaatatcagaccattgtatggaaagatgctctacctcattagacatcagagaaatgcaaattgaaactatg

SEQ ID NO: 132422 - DNA, 2236 bp, Homo Sapiens
  misc_feature (39)..(39): n is a, c, g, or t
  misc_feature (153)..(212): n is a, c, g, or t
  misc_feature (753)..(828): n is a, c, g, or t
caccgaggcgcgggcgacgctcgcgccccgcggggcgcntggcgccgcgggtggcggaggtaggaggtagagcatcgcgtgggggcgcgcgccctgcccctctcacaatcacgcggacgcggcgggaggtgctccgcaaaagactggtggatnnnnnnnnnnnnnnnnnnnnnnnnnnnnnnnnnnnnnnnnnnnnnnnnnnnnnnnnnnnntcaggagggcgatgaaagaacggctgcgcgggtcaatgctgttccccggctcaacagaggggtcggcaggacgtcggctcgccgggcgcctcgtcgctctcgacggccgctacgccaaccgcggcggcgggagcacacgttgcgttctggcggcgatctttacataccacgtgggctaagcgcggacggcgggcgccccaccaccccacgccccgggccggattcagcgcgtgcagacagggggtagtggtgggaaagcaacctatccggggtgtgattggggcgcggtgggcggaccggccggggacgcgcggtcatcagggaaatgtgttttgaagaaagcgctcccgggggggcgcccccggagagtggtgttttctttgggggcggaaggccaccgcggctatctccagcgggccggcggttttctcgtggtaaccagggctacggcccagggttccctcttccttggggggaggcccggggccaaaagaaaggttctctcaaagcttttgcgggggccgaacggggcgaccaacgnnnnnnnnnnnnnnnnnnnnnnnnnnnnnnnnnnnnnnnnnnnnnnnnnnnnnnnnnnnnnnnnnnnnnnnnnnnngttgttgttgttgtagcattttttaaatggctttattaaaggctacaagtataaaatatgactaagttacaagtcgtcagtaagaatttattacttttgaaaatgttaattaaagaaagggagacgcaaagaaagggaggctcttcctgaaatccacacaggggggtgcggctcagacgggtgacagacccccgctgttcccagtagggcagcacccccaaacccagggggccaagggaggggctcccagatgaaacagaggctggttgctgatttcttgggggaacttttgtaaaaatgaagacactgaatccttgagctgaatcccaggtgcagagactggggggaggtggagaatccaaaatcatgctcaggtttctcctgaaaagtgtgtattttctaaaaaataaatataaactcctggtttgagaaactccctcatgatgaatgggaggaaaatcatggcaaatggagagctaagaaaccatcttcgcatagactttgcccaaggtgtagaggaagatctgccggtcaggcaggatgaagacccacacaggagcctgtgtcctccaggtcgtcccttcttccaaaagcacagcaaagcaatacaacttgaggactccctccaagatttcctaatttttgattttacatttaatctcaggaggctataccattaagaaacattattagagttattgctgggtgctgggccccagacgatactaagtgaggcagaagctttcaataattcctacagccctcagcaccaagaagaacttggagggaatattgggcttgttgagaaagtgggaaagaaattagaatttctcccaatagaagaggcagatcaccttggcctactctctaggacacaggtctttcttctgtgctacaccaacactacagaatacaaactcatacatatacatttgctaccataggttctacaacagccccatgccctccaggcagaaggtggaggcaggtggccgctgattctgaggatccctgtgtgaacagtgccgttagccctgaggggagctggcgcttgcccaggctgtgccaactgggatttctaagctcctttttccctcaccaccatgctgaaaccctttttttgcctcacatatatcaactatacttaaatggtacagaaagaaccaatatttgaaaagttacagtaaatcactgaagcagaaagataaaactataccccaaggatccaaatgaggtttagggacataaaacaattggcaagaaccaaatcaaaagttgctatgccacagctttggcagaaactttcctggagatgatgaggggttgaggtgagttgctatgtgctttattttggagccagataaaatattctggaaatcatttcagaaggtcctatgaaacaggcatt

SEQ ID NO: 132423 - DNA, 965 bp, Homo Sapiens
  misc_feature (768)..(873): n is a, c, g, or t
gggtggataaatgaatatttatgggcggatgaatgaaaccgaatcgaaccgttcactgagccatcagctctgtttctggaagttctgtgggggctggcacgtgtgtgtctgtgccacctctgtccccgaagcccagctcatggagatgccatgtgggtccctgagtgacctcctcctggccccccagctcttacttccagggtgtgacctgggtgtccaggctgacctgagggcctgcctttcatgctgctcggggcaggtgtgtctggtgggccaggtccctaggttggtggcattggggtgggtggatgtggatgtctccagctctgacccctcctttcctccctggtgtcagtctgtcctggggtgcccatcttctcgtccattccagaaggcactgatccctggggcttatctgatgtgacaaccatacgtgcttactatgcacctacctgtgccatctctctttgtgctctttgtgcttttactcctcagccagtcaagggagggcctgctccggagtccatgacaccaggaggccgggccaggagcagtgctttctcccttggccatgccaggtgtggcacacatgccgctctactgtgaggatgatgctcactaagcccctgaccctggctgaaactcaggattctctcctgggaggatccctctttcctaggtagctgaaccagagagcagaaaaatcttcccgagggccctctaggatgcagggtgcagtcctatgtacttgacacctgagagcatctnnnnnnnnnnnnnnnnnnnnnnnnnnnnnnnnnnnnnnnnnnnnnnnnnnnnnnnnnnnnnnnnnnnnnnnnnnnnnnnnnnnnnnnnnnnnnnnnnnnnnnnnnntcttggccacttcaaagggaggcatggctctgatatctgcccgatttcccactgtactctccccagggatctggctttgtagttccttccag

SEQ ID NO: 132424 - DNA, 1070 bp, Homo Sapiens
  misc_feature (688)..(771): n is a, c, g, or t
  misc_feature (820)..(821): n is a, c, g, or t
  misc_feature (828)..(944): n is a, c, g, or t
  misc_feature (1046)..(1046): n is a, c, g, or t
gtactgctttatgttattaactgacggctgaatgtattctgtacgtgcatccagtaatcttcaactggatcgtaacagtatattgccttggtcagtccaccggcaacatagatcaggttgtttagggatacagctgttatacaccttttggcaattgggatagctgcacgaagtagccaagaattggtttctggatcataagattgaaccttatcagaacaagtattatcatcaggtcctccaccaatcacaaacagtttgcctacacagctagtcactgcaggagaactcacggcttccttaaggggagcaacttcagtccatcgatttgaaaaggaatcataacattctacgctgctaagtctgttttgcccatcatagccaccgacaacatatactttaccaaggaggacagccattttgtgacgccatctgcctttattgagagaggcaactctgatccaaatatttaactgtgagttataaatccagacatcacggctgttgattcttccacctgaaacaagaatgtcattccttagagcacagactgcatactctgatttggtaaattctggaagcttagccaaagacttccattctcctgttacaggatcgtagcactcagtgtatggaagattaatcctccaactcgcctacagccgcgggccctcgtgccgaattcctnnnnnnnnnnnnnnnnnnnnnnnnnnnnnnnnnnnnnnnnnnnnnnnnnnnnnnnnnnnnnnnnnnnnnnnnnnnnnnnnnnnncacattcccacacacatacgagccggaagcataaaagtgtaagcctggnnggtgctnnnnnnnnnnnnnnnnnnnnnnnnnnnnnnnnnnnnnnnnnnnnnnnnnnnnnnnnnnnnnnnnnnnnnnnnnnnnnnnnnnnnnnnnnnnnnnnnnnnnnnnnnnnnnnnnnnnnnatggcgctctcggcttcctcctcactaatccctgcctcggtcgtccggtgcgggaacgtacactcatcaaggcggtatccgtatcaagatcagggatacgcngaagacagtggcaaaggcacaagg

SEQ ID NO: 132425 - DNA, 628 bp, Homo Sapiens
gcaatttaaagtataactttatttctatatagctgaagattcttttcactagtacaaaaaggcttttatagtaagtccatgtgtttttaaagaatgaaaattgacaatttttataggtaactaaatttaagaagtttacctttttcctgttttgcttttaataatgtctgattagtatttacctataaatcattcaaatgagatcactgaaaatataaataatacaatatcaacaattttacttttggtgtgtctccagccatctattgatggccattttcagagtcctatttggtgtaagtaccgctgaaggaagaacaagatttgtcatgggacttgtacgtttctttttgctgatccaattttccattgcttccttttcatatgaatagccatctgatgcgatgaccggatctttcataagttctctagttattggacatataaattcatcaggaattcctgaagaaagggatttaaccttggtcctgagctcttcaattttcctcagcactttactacgcagtcctagagattcaattttcaaatcatcagccagactttcttttgtaagattcaacagttcttttccatcaatgttattcatcttgaaaatacccctcgtgcc

SEQ ID NO: 132426 - DNA, 1066 bp, Homo Sapiens
tttttgctccaatcagatatccttgattttttttctctcttaaaacaacaggctggtgacaggtattgtggctcaagagtggcatggttccaattatgttattaccctcaaagaggtccccttcctgacctctcagataccaaggcttcaacagacagaggtcattcttgcagctgtcatgctgactgctacctgccttctttgacaggccctcactatctctcccacaccaacagagacttcacatttccagggttcctctcagatctgggctggacctcatctggagggtctgagcagcccaaggtgttaaggggcccaagtgtcagcaggatgtccaaagggcctgattctagacattggatttaggggctgagttgaggggtatctccttgagctccgtccgcatgcacaggtactccccgatgacagccatgagtgcaatgcacacggcttggaccagccaccaggtcagcgccgaggggaaacgggagctgtagaaccagcagcccaggaggtgaaagaaatggacagtgacagtgaaatccagacactgctttcctcgccggatgaagtacagcaagcccagggcacaggtgagggcgttgaggatgaaggacatcatggagagccggcctggaggggtggaaaagcccaggatctcggcgtcgaacatctggtccagcgaggggctgcttcgcactagcccgtccaccagcgccagccacaggcccagcgagccgtaatacacggtctgcatgaggacgatctgcgacaggatcagcagcgggtcccacacgtagctgcggaactgacccgccatgcccagtgacagactcgacgatcgaagtgtctgagcgtggcccggcctcaccggcgggctcccaaaacagcgctgacagacaggaccatggaggagaggcgctgccggcctagagaggcaaagctccagcgaccacggcggcaggagcggttattcctactccagcagacgaaaacccatcaacttcattgatcctaggttccccctctctgaagtggaaagacgggaagtaagttgttccag

SEQ ID NO: 132427 - DNA, 627 bp, Homo Sapiens
  misc_feature (484)..(493): n is a, c, g, or t
ttgggaggaagtactgtgtattgaatattattccctaaaaggaatagaggaggggagaaaaagcacaattctgattgctcttttcacatttcagtatctcagaacttcatcgaaaataggaaaagctaatccagaaactctcatctgctcattatcattgctgaagggtgttttaggaatgacagaattactcccccagggacaggctgtgtgtggtagaaagccactctcacaaggaggctggctgaggagggggactttgggaggaggctaagtcagcaagcaagtggcctctgaggttctggctttcacgtctgtgacactgctgtggaactggggagacatgagacccctctactgtgggttctgttggttaaaaatgcaacagactacatttatagcacttcagtcatttaaaaaacaaaagcttatcctccttcccctaccctacccaactgtaggaaaggagaaattcatgaagcannnnnnnnnnaaaggtttctgcagtgctatgaaagttcacaggtaaaacctaacagccccacattgttaggatgatctccagggaccctgaattggatacttgaaggttgatagaaactgaaatgagctggacttaagctgctg

SEQ ID NO: 132428 - DNA, 1080 bp, Homo Sapiens
attcataagtcagaatttatttcataccatctcacttatagcattttcaagtacaacattctgctcaacatcatttacacttgaaaacagaaaagcacaacttggtaaggcaccaggttacgatagtctggagagaaggccttgctcccattttggcttgtgtaatacctgggtagtttctcttgagtctgtcaagcagagaacaaggttataaaaggtccatttatacatacatggtaacaagagataacaaacagttttgaagtatgctgtatttataaattataatggtggcctacacttgtagttcagccaaagtggcattctctaaagcaaaattcttataaaatcttctctgcaataccaagctgcaagtttaacaattttttagctttgaagtgaaccaactttatatttaactcaaacacatactttaaaaacattttcggccccaaactctatgttcacgaagaaataaaaatggaggaaaatctcaagtataatcgtacctttactattctataaaatgcagcaatatattttaaaaactgttgcatttaaaggtcaacccactagatttttaacactaacagtccaaggtgttatcaaccccacttaaaattcaactgtataaagctttcagaactgggccacacaggtgtacttcactgagcactttccacccatggcctaaaggcaggaggtgtggaagtcccctccagggagaccaactgcagccccatacactgtcacacgcataaaacttctttcaagttttgtgttctatcttaaaaatgaatttgcactatactccatgccatttactttaatataaaaatagtgtttcaaatcgcttaccagttaaataactcatcttccctcccacacctccaggcaccagacaggcagagcccagcctgggaagcctagctttccacagataggtaagccaggcgcggcaagatgagactgtattcagttaggtctattttaagcatttccacaaatcattttattccttcaggttgtaactaaatgcttcaggaaactatgaccgacatcaattccaatgtgttgacc

SEQ ID NO: 132429 - DNA, 1421 bp, Homo Sapiens
  misc_feature (737)..(747): n is a, c, g, or t
  misc_feature (862)..(1334): n is a, c, g, or t
gaaaaccactgaaattatttccactccaaggtcatgaagatagtctcttagattatattctgaaatccttataaatgtaaatttcatatttaggcctttaattcacctagatttggttttttgcatatggtgtgaggtaaggattcactttcatttttttctctccatagggttacacacctgtcctatcattgtttgtaatctaactttctgcgcccatctgcaatgccacctctgtcatatgtccacatatgacatatgtagatctgttgttggattctttcctctgttccattagtctgtctgttcttgtgccaatatcaagctgtcttcattattatcaattatgtattgagatctgataaagtaagtcttttccaccttatttttcttctttgagagtgtcttgactattctggctctttgtattttcatgtaaggtttttctcccatataagttttaaaatcagcttgtcaattccaacaacaatgatgcacttgatagtttgggaatttattatagctatcaatcagttttgggaaaattgacgtctttacaatattgagttttctgattcatgaacatggtttacctctctttccatttgggtcttctttaaggtttaccaataggattttatatttttgtccattgtggtcttgcttatcttaagtttgatttgtaaatattttatgtttcttttagtctattgtaaattgtgtatttttaatttcannnnnnnnnnngttaatagcatataaaacacaccttgtcttttaactggagcattttgtccattgtgtatttaatgtaattaaatctaccatcttattttatgctaaacctcgtgccgaattcttnnnnnnnnnnnnnnnnnnnnnnnnnnnnnnnnnnnnnnnnnnnnnnnnnnnnnnnnnnnnnnnnnnnnnnnnnnnnnnnnnnnnnnnnnnnnnnnnnnnnnnnnnnnnnnnnnnnnnnnnnnnnnnnnnnnnnnnnnnnnnnnnnnnnnnnnnnnnnnnnnnnnnnnnnnnnnnnnnnnnnnnnnnnnnnnnnnnnnnnnnnnnnnnnnnnnnnnnnnnnnnnnnnnnnnnnnnnnnnnnnnnnnnnnnnnnnnnnnnnnnnnnnnnnnnnnnnnnnnnnnnnnnnnnnnnnnnnnnnnnnnnnnnnnnnnnnnnnnnnnnnnnnnnnnnnnnnnnnnnnnnnnnnnnnnnnnnnnnnnnnnnnnnnnnnnnnnnnnnnnnnnnnnnnnnnnnnnnnnnnnnnnnnnnnnnnnnnnnnnnnnnnnnnnnnnnnnnnnnnnnnnnnnnnnnnnnnnnnnnnnnnnnnnnnnnnncatcaaaaatcgagctcagtcagaggtgcgaaaccgacagactataagaacaagcgtttcccctggagctcctcggggtctcctgtc

SEQ ID NO: 132430 - DNA, 1250 bp, Homo Sapiens
gtgatgttcatatgtttaattcttatgccaactgttttctgatgaagacagcattgtgctttatgcgagaatgaaaacctcaaaataatcaccataaagcttctaagacttatgggagaataaactaggatggtccacagatataagatgaaatccacaatgttggaattataaatgtttagagcggcccagactagaagacaagcccaaaccaccattagaagaatgaaatacgatatggtccaagatgtatccttaaagttttgtctcaaccctcagtctgaattgtgaggattgatcttcagttcagtccagccagcagaaattgactgtgcaattttctgttgtatttattgtacagactatgtacattctagaaggttcctttagtgctacactgttgtactttttgtcccagcaatttgagggcgtgcaaattccacaaagtcatcaataagaacaggccatgctccttcttcatcataattagacatgtcatctgcaatcatcgtactgaagtctaaaagaagattccaagtgtcttttggtattgatcgtttatgatgttccaacaaaaatttattccataagtctaagaatttaaatcttccattaagcactaagttccagtaggcaatggccatttctagatctaatcctttttgtcctggattctttgcaaaattaaaagtaaactggtaaaaatccttaaatcgtcctggttctttcaattcttgttccatcttgggtatctgggcctttagtttttctatgctgtcacatcctaattctgtcatgccatccatgaactcctgtttggagaactcgcactgtgttgctgctctgaacttccatgcaataatcaacacactaatgctggctggatcgagtgccaggtcatcacagaactgctgtatgccatctattccaattttattctcatcttgagggtctttgtatctattgtacagctgttctaacttcttcctgtccaatgatccttttacactctctcgtatataaagttcaggattttggaaaaaattatctgttgcaacatctaacttccagtcattttgagaaagacaacttactgctgttttttcactagattgtgtgaagatcataaactgacgaactttatccttctgcgatgatttcaacttgttcatgttggtgtcctccaggcctctcccctcctcctcccctcgtgccgaattaaccaccggcctcgctacctagcgtatgtt

SEQ ID NO: 132431 - DNA, 1051 bp, Homo Sapiens
  misc_feature (749)..(749): n is a, c, g, or t
  misc_feature (752)..(752): n is a, c, g, or t
  misc_feature (781)..(781): n is a, c, g, or t
  misc_feature (799)..(799): n is a, c, g, or t
  misc_feature (804)..(804): n is a, c, g, or t
  misc_feature (810)..(810): n is a, c, g, or t
  misc_feature (849)..(849): n is a, c, g, or t
  misc_feature (856)..(856): n is a, c, g, or t
  misc_feature (864)..(864): n is a, c, g, or t
  misc_feature (890)..(890): n is a, c, g, or t
  misc_feature (898)..(898): n is a, c, g, or t
ttttttttaaacagtaagaataccactatttatttagcatttactatgtaccaggcacagggctaagagctttacatgaaataatcatttaaccctcattcgatcatttaatatctaataaggtagctagatatagacaaggaaatgtgttagtaacttgcccaagatcacaggtggtgaaggtagtattcaaaacttcagacctcaagttcttaatgactacagtagatagaaacatgggaaagtacttacaatactttgatttgaaaaagaagaatataaaatatatactaggtacagccctataaaaatatgtgtgtgtgggcaaggacagaagatgagctatacaaatgaacacagatgttatagtggtgtgggatggttatgagtgaaacagttctctaatgttgttaatatattttaagaaaaaatttttagaagtcatgaattcacaaataactcttctaccattactattattattctgctttcaaccatggacacaaagtgtgtgtgtgtttccataactcctgtgacacagctcactgcctcctctaccctcctcagtggccttcccccaagggaggctagtgcctaccttagtgctatactatactggtccattgcctcctgatactcattgacagctacaaggaaatctcctaggatccgatgcaggacacagtcactctgattagccagtgcgttcctcagcaaagcattccatcttcatatttctgttctctgcntangtagttctgcttttttttcacacagcttncatgtatctggcctttgngtcanggcttnatctatactgtttggcttctcctgtgtcatgggtctcangacaacngtggctanagggtagggtctgtgcattgctccanagtttgtnacgttgtagccatacatgctctcgatactgtgggagtagtacatcgatagacttcatacatctagcgacaggtggagcgtatgctcccgaagtgatatgcttctgactcgccagtcctaatgtgtcccctagtacaagctgactatacgtcac

SEQ ID NO: 132432 - DNA, 239 bp, Homo Sapiens
ggctgtaggcattcaatgacttcaacttttctatgttgcaaagtacttcattatcttttgttggtattacttggaattcctacctatagttttctcttttggataaagcattttaaaatctttatttaaagcacatttaaatctgcacccagttactctttagagaaactggtttagactcactcttaagtgaacagactcaattttatttgaaacaaaacttaaaaggtaaaattttg

SEQ ID NO: 132433 - DNA, 741 bp, Homo Sapiens
  misc_feature (696)..(696): n is a, c, g, or t
  misc_feature (708)..(708): n is a, c, g, or t
aaaatatgaaaagacatgttattattattattagtgcatacaccagattgcactgtctccaatggcaaatgaggcagagggtaatatttctctttaattccccaagaacctcaatatcatctgtcttctggaggttccggtttcttctgacatctgtgctaatgtccacgaagatgccaaccgtacttagcataaagaacattttgctaagttgttctattatgggttctcgctcaaggtgttcacttttttcttctctagttttcagcacttgaccatgtgtttcttcattattatacacaggatctggtcaagggataggttttgtgcgttcatatggaatgtctatagaaggatggtaacatactattgtcctggcatcaggtgtcaaagcaaattctactttgcaattgtagtcacctggaaaagaagagtacgtagatttatgacaaacataaggctccattttggattgaagataaatgtttccagatagttctctttgatatcacccgtcttactgctgctactgccatgtagcaagacacttatcaggtagtatgaaaaaagatgcttcacagagaatctgcttctgggcacattaattttcatccctgcttcacagctgctcaccatgagcccatcatcttgtctccttatttttgcatagatcttaaattatttttacccagttgntatcatggacanatttgtagtctgctttttttcacttaacattag

SEQ ID NO: 132434 - DNA, 724 bp, Homo Sapiens
  misc_feature (680)..(680): n is a, c, g, or t
gctttttttcttgttttattttaggttcaaggagtatgtgtacatgggtcaactgcatgttgcaggagtttggtgtacagttaattttgtccccaggtaatcagcatagtacccaacaggcagttattcaatcttcatcctcttcccaacctccacccataagcccgtgtctactgttcccttctttgagtccatgtgtaatcaatgtttagctcccacttataagtgagaacatgggatatttcattttctgttcctgcattaattcacttaggataagagcctcagctccatctatgttgctgtaaaggacacagtcttgttcttttttatggctgcatagtattccatggtgtatatgtaccaaattttctttatctggtctactgctgatgggcatttacgttgattccacatctttgctattgagaatagtgctgcaatgaacatacaagtgtttgtctttatggtggaatgattatattcctttaggtatacacccagtaatgggatgctgggttgaatgctatgttcttttatgtctttgagaaatcgctgcagtgctttccacaatggctgaattaatttacattcccaccagcagtgtataagtatttgcttttctctgcagcctcactagcatctatgttttgattttttaataatacccattctgatantacccattcagacaggtctgagatggtatctcattgtggctttg

SEQ ID NO: 132435 - DNA, 1097 bp, Homo Sapiens
  misc_feature (72)..(93): n is a, c, g, or t
aaggtgatgttctttttataaattttaaaggtagcatatattatacaaattactcaagagtttacaaacagnnnnnnnnnnnnnnnnnnnnnnttcacgcgcaccctatattaacatgtaattcgtagtgaaatgtgtgaaatataaacacatgactttcacttattcattttcactttacgctttttaattgaaattaaattagtcacttaacatacataatgcagtgtttgttttccagtctagtagcttttcagcattcagttttgaggctcatgggaaatgttacttagcatcaagatgtggtttgatgagtgaacaatgtcagtatcaactgtacttaacagaagacagaggggctggggttaatctgcagctaacaacatataaaaataaaaacaaacacagacccacaataacatcaacatgcattattaggcaaagatccaaaattaacccaacccacacagatttcttctaagctgagattacacatggaaacagatactttatcaagatccatagccatagtagtaaggttcatcagggcggaatccatatgctgtggcagggcgtccaagaatgccaactggttggccaaagccatccattccaaggctgccaggaaatgaatgctgcccaacaacatctccattttgaaggtggtaatcattgaagaaatcgggacttatggctccttcagaggcaattaatccatctgagttgtagaaaaggtcaggtctttcgagaatatctccttcatgaatgtatggctcaattcgatcatcaccatacaagtactgctcactctcatccatctgacgactctctaccatctccagccactgagagttatgccagcgaaacttttcactctgaattttcttagcccattcttcatcatattccgctataatatctaatgtattatcacagacctttcggatttcattattcttatcatgcattaggtctatgagatatgctggagcctgtgtttccttgattatgaccgtctcttgtggcttggtgggaaaaccatctgggtagaagacataaattatctgacacacaaattcatcatcttcttgttgaga

SEQ ID NO: 132436 - DNA, 695 bp, Homo Sapiens
tttttcagggaaagaaaaactatttatttctttatacacatcttgctttaacaatcaccaaaaagactttcattttctgtcacccaccctgtccaccagttatgttggccttcaatatatggcgttagcaacatatataaatctatatcatatatttatacacacaaacacattctaccagcactgtgaagacacagactaggctttactaggcttggggcctctcccatgccacttaaaaatgagcacaggtttgctctatgcaagaatttcaacagagttggtctggccatcagtctgcaatttccccgagataagatagggtgacaaaatgggacagcaactttgaagtgaggtcagtccaatttggatatcatagaagaaaagaaataggatgtgctaggttaagcctgagatggtatctgggaagtcaccacattcatgatgtgaactcaaagaacacaggtgctacagtgcagaccaaggcccagcctgactcgacccaacagggtcaggtgtggatctgtgagtagtgctcactgagcccccgccagcagtgtccggcagggcaccgctgctccgtagtgtgcttttagaacctgccagaggagctccagcattgggaccaagtgcccctttcatcggaatcagggtcctatatccactgagttttccatctcaggacagctgatgag

SEQ ID NO: 132437 - DNA, 1717 bp, Homo Sapiens
  misc_feature (151)..(159): n is a, c, g, or t
  misc_feature (161)..(177): n is a, c, g, or t
  misc_feature (181)..(195): n is a, c, g, or t
  misc_feature (197)..(214): n is a, c, g, or t
ggggggggattccaagcccctagtccttggcccgggtttcctttggaaacacggtattgcccaagtttcctttcctttttgggcgccgcgcgccaaaagagaatgtttatgaaaaatttttttaagggcgagagcgggccacacaattttnnnnnnnnntnnnnnnnnnnnnnnnnngcgnnnnnnnnnnnnnnntnnnnnnnnnnnnnnnnnnttcagaagacttcaatctcttttattctgcttttttcctaatgtcataatccatttgactcctaagcatgtaagtaggtaccacggaatgtaaacaagtaaggaaacagaaataaactgaataatacgtggaaacaaagctgtgactcacacagatgaaatagctgcacaaaagaaataacatgaaaacatttaaaaagagacttaatgtaggaataagctattttaatcaagcaaaaacaaatttatatccattatttctaaaaataaaattagacttttccaatccttaacatctgcatttaataatatcttctaaccaaaatacagatgctaaaacagcaagttacattatatcttgtacagcatacagtatgttcactgtttacacttactttaattctagttggtcatgtactcaatgcatacttaaacatcactcaataaaattttcacaattaacaaaaaaatgtgacaaggctgtcttaaaacggctctgctataaattgtatagaatatacagaattacaaagtcaagtatttttttatcaaaatatacacccctccctgaaactaacacaagctatcaacattttaaatgaatacaattatagaaaatatttgcaaaattattttttcatgtataaatattctgccatatttactttggtctagaattatcagcatacaagtccacttaaaaaatatccacatataagggctgggagagagacatcactacaggtaattttatatttggggttaactcaaatcaaaatgactagaatatacagtaaatgtctttgattaatattattaactgataaaacaaattagtggatcataggattgcttattcaatattctaattatcaattcaaaaatgattttcgtaagccctttgtgactatctctttaataaaacccaaatgaatagtgtagggtgtacatatatacaatgtataaaataaagttgaatttgcttgcattttcccatttttctctacttatataatactgtatgtaagtgaaagtagatgaacaaaagataaatgcagatacaatagtggggttacttaacagcaaggtactacagtattaaaaggtcaactttaatcatgtcctttcctgggcgtttaaatgctttcttacccacccaaatccatactaagtcttcttcatggagacatcacacttgtagacagaaaccggagtcctttgagctacttcttcacaatgataaccttccaatcttcgataaccttgggtttccatctgtcaaatccaatgaacatgaatgactgcaggtcacgctgaaactgcattccggattctgttcacactggtgatcaaagggtagaaatgttttctctctcccttctattctggcagtttgaaaaagaatcatgagttccggctttccaggaacctagtccacatgatagaatatgctgtagggcaattagatttgagggtagtgttgatggtgtgggtcaaagaacat

SEQ ID NO: 132438 - DNA, 751 bp, Homo Sapiens
gcattatttcacattttttaatataaagattgtacacaagtgcactatttcccatttgcataattcaaagttgcatcagacactcccgtgtagactataaatatgcacagaagggacagactcctcagaatgaaaaggaaggcattttggaggttcccctttgtcttttggaatgactctctaagtagtgtagtctctgtggcaggggctccggaatccctacccttcgggttcagggcttcagggagggagttgggccacagtagttccgggatgacagtggccacgtgagagaagaaaacagcccgaggagaagggaaggcacgggtgtgtcccccctcactgtgtacacacatgtcctggctgcacagctgcttcattcctctagtgcctcccaagatcagggcaggccgtgttgccctctggacttccaagggggaagtgagttactggcccaagtcactcactcatcaagaacactgaagccaggtctgctgactccagggagagccttgtagattgtgaggaccgaatgcatataaagtccttagtcaacaccagcacatggtaggtgctaacacatgttggctactattgtttctaagagagggttttcttgaatggaaagaaaggagaaaagacagagaggaagtcaggaatgtcacagagacactttctggggcacacaggtgagcaagcacagagagcagagctgcccaggccagctgctgactttattccgtgtgtcctc

SEQ ID NO: 132439 - DNA, 627 bp, Homo Sapiens
ttttgtattccaaatggtttaatttaacaagtcaacaccttatcattaagcacttgagatcttgatacatattcaagttacacatctaaaaggtttccactttgcaagcaaacatggtaatgcagagacctcctatttatgaaatcatgtaaaatggttcttcagacacctctatgtcccactgatgctcaagaatcaacatttttcaagggggtattcaagcaaatgacaaccatcttatacatgcagttaaacatttttgcttttccaatgatttgcaggtaaatatgtgtgtgaggctgatggattctggacgagctccaaaggagaaaaatcactcccagtctgtgagcctggtaatggatacatttatacaagagactggtaattgatggaaaggaggactgggtaggagacagtgaggagagctttagctgtggtaggcagaaatgtaacttcagcacttggctcttaggctgttattatttccaaatagtatgttctcattacccccttcccatatacagaggttgttaggtgctgactgcatcagtcatttgattctctttgaccttataactaggcaagcataaaaaattaaatgatttttaggccaggtgtggctca

SEQ ID NO: 132440 - DNA, 1154 bp, Homo Sapiens
  misc_feature (1012)..(1054): n is a, c, g, or t
cccatcccccctgggttctttttaatggggggttctttctccctccggaccttgaggtgcggggtttgggtggggctgccccctgcggggattttggaacccaaggattctcccagcatgttttcgggttgcattgcgcttgcccaccttcttgttggtgcccgttccttctgcagtgtggtttccaaccttcaccttgcatcacaaactccctgcggcgcgggaggcctcgctctgtgaggagcgtgtactctggctccttctccttttttgcctgctggatctgggccagtcggctaatcggattgatcccctggccatattctgggcttgtctgtggcttgactatgggttttgttttctttttgattctaggctttactcgttcaactgcaggcaggggcggtaacttcttcagctcctcaagaacagctatggcggcatttttctttgaaatcttcttgcttttcccttcaccttcccccacaaactccccaaccgaaaccttggtcacaaagttcttcatgtggggtgggccactctcccgggccacctcgaaattcacaggcaagttccgtttaagtgcaatctcaaacacttgacttatttcagatttattgagattttcttcttcggattctcttccattcacctccagcctctctggcaggggctcattctgcaggatcctcaacgctttggcagcagcatcgtgtttcgcagcctgtcttgtctttcctttgccattaaattgctgtcctcccacagaaagttccacttgataaagtaaaggtggaactggaaatgggtaaaagtacctcgggggataagcacctcctctcatgttgtagttataggtggactgcatccgagagtaagggtcaacaggcttatacattggtttttcttccaagtttcatgcacagtgcatttagttctacagtaggggttatgctttctggctgctgctccgagctcgtcccccggccggcggtcctgggcggtggcggcnnnnnnnnnnnnnnnnnnnnnnnnnnnnnnnnnnnnnnnnnnncgaagggagggaagaggcggagtggccgtggaggaggcgggcgccgccgggccggggggggaggcggtcaaaggaagcgggatcccgggaattccggacc

SEQ ID NO: 132441 - DNA, 671 bp, Homo Sapiens
  misc_feature (63)..(63): n is a, c, g, or t
aagaattcggcacgagggctgacattaatatgttcatccaagaccttgttcactgcttttgtntgctgaagggatcactttgataagattttccaagtcttggttcccttggttagttctgtttctttcaggagtcactttaatgaggctgtcgagactttggcccccttcagtacttttttctgttcctggatacactttgatgaagttattaaggtctttggaaccttggttacttctctttacttcaggggtcactttgatgagattatcaaggctctggcccctcgtaatatttttatttgtttcaggatccactttaataagcccatcaaggtctttttttccagtggtattttcatgtcctttgggatttacttcagtagcattatcaaggtcttcacttcttctgctcgttttattcatcctggcattcactttagcaacagattcgagattttgtcttcctttctcatttttgtcagtcctttgattaactttaatcggacttccaaggctttggattcctttgccatctttatctgtccgggtactcatctatatgagactttcaaggcttttggctcttttctctctttcttctacctttggatttgctctgaataggaatcaaggtcttgatagtctcttcagagcaaatccaaaggtag

SEQ ID NO: 132442 - DNA, 665 bp, Homo Sapiens
caataaagattattttaatggaaagaaccactgaatgaaattgttaggtctaggttctaatattgggtgtgttacccaaatacatattgagtgtttcagagtctctagatgtttttgatttttagtcttgaatttaaaaaagtgtactcattaacctgagtgaaaatgaaacaataaaacaatgaaaagatctataaaaataaacctgctaatccctccataacccaccccttccaataatcgatgctaatagcttgtatccttttatattgtttttcatagtaataacatgacatacaaaaacacacacaaagcacatgttttgtttgtttttaaaaaaccagggatcacaataagcacattactctgtaagtggcttttctgatttgacaaaagcatattggatattcctcaggtataacatatatagattgaacttaaatttattttctaataactacacagtattccccagggtggaaacactatgatgcattcaactactttgctattgatagacattagaggtattgaaacttgcatcttagaattcacataatgtagaaatcaatatctcatataaatactaaagcatcctgtactgcctcatgttgtaaatgtctgtgaaaagagcatattacattataacccacgtgccgaattct

SEQ ID NO: 132443 - DNA, 658 bp, Homo Sapiens
  misc_feature (591)..(591): n is a, c, g, or t
gttggttagaaatatttattatcccctccccccacatacagattacttctcagaaacatgaagatattatccatgtcctcatcaattacagtttgtagaaaataaacttaactcatatcccatcaacaatgtatttctatcatttttttaaacaatagccatttcatttttccatgttagttccagaatagcttcaagttttatcttttggatcgaatccagtcaatctttgtttataggtaacagtttcctaacagatcccctcccccaacccctaaaaaaattctatatcctaagtgataaactcttcttgtacattcagcaaactttatattggaaaagaaaaagaataattgagataggtatttactttcgtgcacagtaataaatctagctgagctgctacaccttgctttgcaaagatgtttacataaaataaatcatctcttatcaagttacaatggtaatttcttgaaatgtagatatgaaagctatacacttaatccactgaaatttccttctaattttttaatctgtaattaaaccatcaccataaggacaagcttcatcccaagatgttcccccttttcncctcagctatttctatcaacttgaatcctctctcagatcatgtaaagagatacattaaaagcacagg

SEQ ID NO: 132444 - DNA, 807 bp, Homo Sapiens
  misc_feature (777)..(777): n is a, c, g, or t
ggctgtgaaaacatgtatttatgatagaaaacaaactcagaaaaatataatagatagttcactttttatctcattcacattctatagctggagaactcaaaatcccatttagatatttctgcttatccaaaagcacactgggtgaaactaaaccaccaaatgggagaaaatgttcattgggtgtgtgtggcttcacccagtttatttacctatggagtggaagtgtagggagaaataaggtctgcttataatggtcaaggtctatggagaagccctgaagttgctctccccaaatcacaagtctgattcaagaaaaggaaacaaaaatgatgaaaacatctcatcacacaaaactcagtgatggggtctctgacagtcaccagccagcaggggaaaaggagaaatccacctgccggctttaagatttattgaaggctgccagcacagcccagatcatttctgtggcactaggctttgtcccttccacttcagggtccagttctactaagtccttggctcgattcattgccacatcatacttgtcatctgtcagagaggagaagacattctctagcacatcagaggagtgggctagcaccaggagtgctagtgttcgcttgtccatacgctgagggtcatttacccaccgctctagtacactatcttgaagttttttcactagtcgctgtttctctgttgtattggtcactggatgagtagtcatgtcaaatagcaggaaattctgcttctcagtggttagaatactttctctactangttctttgcgatgcgctctcgtacattctc

SEQ ID NO: 132445 - DNA, 883 bp, Homo Sapiens
  misc_feature (769)..(769): n is a, c, g, or t
  misc_feature (864)..(864): n is a, c, g, or t
tacatttggaaaaataactattgattttcagagctttttggatttcagaattctagaaatgggatctcagaccaatacttggatataggggctaaccttttaatcctaatgcagttttaaaaataaggtactcaagttttctgtgccttactttcttctatcaaacaaagtatggcatacatcttcaaattagacaataaaatgttcaaattgttacctcctctgttgagtttttttattattcagataacttatcaagaatggttgaacagattatccaaactaattttggtatccaacgggtacgtctctggaaagaatcccttgggttggcactgagcactctgacttttctccgtgatcatgatcttcagcagtaccatgaagacagcagaactcaaagttcaaggaattttcatttttcaaccaatcttcttctgtcttttctccactgacatcttccattgcaagtagatcatctttagtgtcttccagtcaaggggaaccacatagtcatcaggcaacaaggattccattggaacgcctggagatccaaaaagctttactaattgaaaggcaaacccttgtgataatggtagctcaagggaacggtagtcagtgcttgttaagtcttggctgtcctcagctggtaattccttaggttcttcccatcttttcagctttctatcaaacctttcatttaaaaagtgaaaatcagaagtgactcgcaaagagcacgaagtatcgggatgactatgtaaaatttctnggagaaataaaccctgcatcatttagtttattacctactcttgtctgagattcgaaagtcaaaaacagtttcttgtttgtaaaagatggttccanatactagataattatgtag

SEQ ID NO: 132446 - DNA, 380 bp, Homo Sapiens
gcactttacttactattagttgtttattatgtcaaccttaaataatgagattcagaaaataagactaagtatagagtttctttgagtgcaaagtttgagaatagccacccagtaagcattgactccaaaggaatggggtgagcattccaaactggagaagttaaggtttcacttccacaggcaaagagagaggaattttagcaggattacaacattttccatacaagaccagtgcatatgttacagtgctttgattggttatagattgctacattccaaggaagatgactttattaccccctgagaaagggtggtgatctaagtggggatctaagggagtcttatctctggtgccatttggtcttcctaagtaattacag

SEQ ID NO: 132447 - DNA, 1106 bp, Homo Sapiens
gcagttgtcaaaaacaggcttgtaaagacggccagtaactataactggtcctaagtgtagctgaggcctggtgtggctgaattcggcacgaggtgcaggcgccgcttcgaggcccgcggaaaacgcgcgccgagacccgctcctgcagtattagttcttgcagctggtggtggcggctgaggcggcatggatctcagcgagctggagagagacaatacaggccgctgtcgcctgagttcgcctgtgcccgcggtgtgccgcaaggagccttgcgtcctgggcgtcgatgaggcgggcaggggccccgtgctgggccccatggtctacgccatctgttattgtcccctgcctcgcctggcagatctggaggcgctgaaagtggcagactcaaagaccctattggagagcgagcgggaaaggctgtttgcgaaaatggaggacacggactttgtcggctgggcgctggatgtgctgtctccaaacctcatctctaccagcatgcttgggcgggtcaaatacaacctgaactccctgtcacatgatacagccactgggcttatacagtatgcattggaccagggcgtgaacgtcacccaggtattcgtggacaccgtagggatgccagagacataccaggcgcggctgcagcaaagttttcccgggattgaggtgacggtcaaggccaaagcagatgccctctacccggtggttagtgctgccagcatctgtgccaaggtggcccgggaccaggccgtgaagaaatggcagttcgtggagaaactgcaggacttggatactgattatggctcaggctacccccaatgatcccaagacaaaagcgtgggttgaaggagcacgtgggagcctgtgtgttcggcttcccccagtttgtccgggttcagctggcgcaccggcccagacccatccctgggagaaaggaggcgggaagatggttaatatggggaaggacttcagcatcccgagaaatccgggaagggactttcggggaagaatcaccatccctaactttccttcaattggaaggggtccccaagggccccggtcccccgggttcctttcccacccggaataattccccttgggaa

SEQ ID NO: 132448 - DNA, 777 bp, Homo Sapiens
gctgcccactaccgcaactgggaagcgaacacagctcactgctccttcaacacgctttttcttggaatcatttgggtagcctgagccataatcagtatccaagtcctgcagtttctccacgaactgccatttcttcacggcctgtcccgggccaccttggcacagatgctgcagcaactaaccaccgggtagagggcatctgctttggccttgaccgtcacctcaatcccgggaaaactttgctgcagccgcgcctggtatgtctctggcatccctacggtgtccacgaatacctgggtgacgttcacgccctggtccaatgcatactgtataagcccagtggctgtatcatgtgacagggagttcaggttgtatttgacccgcccaagcatgctggtagagatgaggtttggagacagcacatccagcgcccagccgacaaagtccgtgtcctccattttcgcaaacagcctttcccgctcgctctccaatagggtctttgagtctgccactttcagcgcctccagatctgccaggcgaggcaggggacaataacagatggcgtagaccatggggcccagcacggggcccctgcccgcctcatcgacgcccaggacgcaaggctccttgcggcacaccgcgggcacaggcgaactcaggcgacagcggcctgtattgtctctctccagctcgctgagatccatgccggcctcagccgcccctcgtgccgaattccacacccagcctcgtacctagcttagttgctgtccccccccg

SEQ ID NO: 132449 - DNA, 1184 bp, Homo Sapiens
ttttaaaattaatcaaccaacacccattctatttaaggttccaaaaggaagtagctggacccggctgcagagcacactcccaccttgcttctgtcccaaaagtacatcccctacgtgtggttctccttaaacaattttaatgtctgggttggggaagcaggtagagcgcgtagaggcagctgctagaggctggttgctgactccaggccgcgttccaggaaatatcggtgggaagaacggggacgggcttgggacccttcattgaggaagtaggatgtgatcttcctgagtccctcctgattctcggatgctgagtcctcccatataacatcttccgcctctttctccaggatggtctgggccgtgcgccagctgaaccggacaaactgggggaagccgaacacaggctccacgtgctccttcaaccacgcttttgtcttgggatcattggggtagcctgagccataatcagtatccaagtcctgcagtttctccacgaactgccatttcttcacggcctggtcccgggccaccttggcacagatgctggcagcactaaccaccgggtagagggcatctgctttggccttgaccgtcacctcaatcccgggaaaactttgctgcagccgcgcctggtatgtctctggcatccctacggtgtccacgaatacctgggtgacgttcacgccctggtccaatgcatactgtataagcccagtggctgtatcatgtgacagggagttcaggttgtatttgacccgcccaagcatgctggtagagatgaggtttggagacagcacatccagcgcccagccgacaaagtccgtgtcctccattttcgcaaacagcctttcccgctcgctctccaatagggtctttgagtctgccactttcagcgcctccagatctgccaggcgaggcaggggacaataacagatggcgtagaccatggggcccagcacggggcccctgcccgcctcatcgacgcccaggacgcaaggctccttgcggcacaccgcgggcacaggcgaactcaggcgacagcggcctgtattgtctctctccagctcgctgagatccatgccgcctcagccgccaccaccagctgcaagaactaatactgcaggagcgggtctcggcgacgcgttttccgcgcctcgtgcccgattaaccgcggcccacta

SEQ ID NO: 132450 - DNA, 874 bp, Homo Sapiens
ttgatcttcctgagcccctccctgattctcggatgctgagtccttccccatataacatctttccgcctctttctccaggatggtctggccgtgcgccagctgaaccggacaaactgggggaagccgaacacaggctccacgtgctccttcaaccacgcttttgtcttgggatcattggggtagcctgagccataatcagtatccaagtcctgcagtttctccacgaactgccatttcttcacggcctggtcccgggccaccttggcacagatgctggcagcactaaccaccgggtagagggcatctgctttggccttgaccgtcacctcaatcccgggaaaactttgctgcagccgcgcctggtatgtctctggcatccctacggtgtccacgaatacctgggtgacgttcacgcctggtccaatgcatactgtataagcccagtggctgtatcatgtgacagggagttcaggttgtatttgacccgcccaagcatgctggtagagatgaggtttggagacagcacatccagcgcccagccgacaaagtccgtgtcctccattttcgcaaacagcctttcccgctcgctctccaatagggtctttgagtctgccactttcagcgcctccagatctgccaggcgaggcaggggacaataacagatggcgtagaccatggggcccagcacggggcccctgcccgcctcatcgacgcccaggacgcaaggctccttgcggcacaccgcgggcacaggcgaactcaggcgacagcggcctgtattgtctctctccagctcgctgagatccatgccgccctcgtgccgaattcgccacccaggcctcgctaccttaagaccgttagtagttactggccg

SEQ ID NO: 132451 - DNA, 587 bp, Homo Sapiens
  misc_feature (523)..(534): n is a, c, g, or t
tttaaaactttggcatttttattcagacacgtataaaaacaatacaatatacttcagtgatacaacagacgttttcccttagttccccatccaaggggacagaggtgtgcagctgaagctggatcttttttctgtcctacctggaagcttctcactgctggatgagaatggcttctaaaagtggatcttggggatccttgtgaatttgccctcggataaggagtgaagatcatttacggcacatgtggattatggtttacacaaagatgtccagttatttttccttctgactacccccaccaccacttcctgagatgagatgtctaggtataggaggatgtggctgttggggttagacttgattcagtgcaaaaacaagaaacagtgccccttaaacaagggctgtaacttaaatcagtttttcttggcaccttacaataagagcacatgcacaggaattgggaggattttgcatcctggatctactgcttaatttatttcatctctttaaggctcagtttcnnnnnnnnnnnncccctgtagagacagtgtcttgctatgtttccataggcttatctctacagggg

SEQ ID NO: 132452 - DNA, 2345 bp, Homo Sapiens
  misc_feature (73)..(73): n is a, c, g, or t
  misc_feature (84)..(103): n is a, c, g, or t
  misc_feature (106)..(113): n is a, c, g, or t
  misc_feature (116)..(181): n is a, c, g, or t
gccccgcggcgcccccaaaaaggaaaatgtgttttaaaaaaaatttttctggaggggcccaggggccgccccncacaaattttnnnnnnnnnnnnnnnnnnnnttnnnnnnnnaannnnnnnnnnnnnnnnnnnnnnnnnnnnnnnnnnnnnnnnnnnnnnnnnnnnnnnnnnnnnnnnnnttttttaacaatgcctaaactctttatttcaccaaccagtatttctgattttcttcttgatactggattttaaaaccttagaagtctataaatactgcattcagactttccacatcaagagaaaggggaccagggcagaagatgtcaggccccatgctgttttggggtgggaaaagtggcaaagaattctcaacagcctgtgtcagttttctaacttaattgaaacacctttaagctctccttcatccccaaactttcccctatggtgtctatgatagaaaaacacttctctctcatatatgtcccatcactagggagccagggggaagggagtgggcattacacaggcaagccaaactttttattcagccagaaaatggatttctgattcagtttaatggtaaggagttgtgtaaaaccgtaccaagtcctgcttcttcctcagagtgagctgggctgcatttttgtgactggaagcatttctcataatggtgaattaagcactataaaaaaataaagtcaatcccatctctatgagtagcataagagctgcttccaagaacccagggatgcccacatcccataacccacccagacacggccaattcctcatagacagctacataaaaccctttcgtcaacttgttttggggggtgagagagaggcagtgcttagggaagatgtaggatggattttttttattcctgccactaccaaaaactataaatctacacacacactcacacgcacatacatgtccatttttaagaaagcttttcctccctgtgactacaggaacccagaatccagcctccctcaggctgagagacgatgcctattaacggcacagatctagcatatcaacatactatagaaggctcctgtgttgtctcacaagctgagagggcagggcaaagaagtggacactcatgggggacttgctttttgtcttaaatccaatctactcagtaacacttgcaggtccaggggctgggagaggttctgtgggcacaacgtggtggacgacctgatggtcccagcccactgtggtaagcagggagtgattgagcggggaccaagtcgcatctctcacaaagtctctgtgggcttggcttctaaacaactcagaaaggcttgagtccagcacagcaagtgagcagtcttcactgagagaggccaggaagggaacactgtgtggggagaacaccagcccagtgacacactgggagtgtacagctgagctcaggacacagcttgtactcttggtgtccacaagggagactgtcccattttcatcacccaaagacaaagacttcactttgctgaggatgccaagccagcgaggtaggaaggtagccaggcgcactgcagccaatctgtgatgctggcttgggacagcgggtatcccagagtaaaattctattgtcctcgctgcatgaaagaaacacagagtccttgtgaggagaggcagcaacacaagtgacctgagcagcatgagctcggtatgaactcagtaccacctgctgagcaaggtcccaaaccttgatgcagatgtctttgctaccactgacagcttgtgtgccagagctcaagacactgactgtagacacaatgtcatcatgctcatacttgcagaacttgctgacaataagtgtctcattctcatctagttcccacaattcaacagcacctgaatcggaggccactagaatacctctctccccaacccaagtgaggtcagccactccagcctccgtttggactccggcggagcagaagccttcgttgggggcggcacaggggtccttaaaaagccagagggagccggcccagcagcgcccactcaggctggaggccccgaggagaagcgccccatcggaccggtaccgcgcagcctccaactgccgttccatgcaggcgggcgcatttgggggaagattccactcccgggccgccgggggcactagggggggtggggtttccttccgcatctccacggttccaactccaacctagactcaaactggacgccggccggagactccgctccggcagcaaaccccacgctggtgcacctctgaagcctccgcccctctcccgagggaaccctcgtgccgaattcgccacccaggcctcgctaccttaaaccgttagagttactgc

SEQ ID NO: 132453 - DNA, 614 bp, Homo Sapiens
cgatttcttaaaaataatttattgctcttaatagtctttttattattattctacaacagaagatactcaaaattcagaaagaaagactgtaaactttagtttggcgttcacacagttaaaatacctgcatttaacctacagaacaacaagaattaggcggattaaagatgtgttactgttgtaacgcagaacctgtgaacaagttctttcatttcatagtatttttattgctttctatctacttagaaataagaagccaaaaaatcaagcaagcatccgacaggacaaacagtggattcactcagaacacaatatgctggtgataaatgaatgcagctatcaaaattagctgcattggcctgggggtgaaatccatcttacaagatcgtgttgggcgagagaaaggaaaagaacaattgagtagtaggtgtatcatgtcttccagaaaagtcatgtcagccaaacagtaatcgaatctcaatttagaaacttgaatacacactccaaatgttactggattccattccagggactccacactcagatgaaatcctgatgatcaaaatggaggtttttctgaagtttttattaaatttagcagaagcaatgtcatc

SEQ ID NO: 132454 - DNA, 1044 bp, Homo Sapiens
  misc_feature (99)..(110): n is a, c, g, or t
gtataccagataccaaaagctagctttcttatgttttcctttaaattttcagatttaccttcattctgttttcactgatgtcttttgcaagcctttgannnnnnnnnnnngttacagtttagtaatttatattcaccagtcacttcttatgtcttgaacatctgtatctgtaaacatgaatcaccgtgtgtgtacttacagggctaggatttcagtgttgtcagagtattaccacacagcaacagcaacatacagaagatatgttcactcagataagactgccctaaacaaccattttgtcactcagttatttaactgtgtttagctcatttaaatcaaaatgtgtactttaatctaaaatgttttaataatctgtatttcttataattttaacactatgagctgcctatataagaaatcaagtaaccagaatgcacctataaattatggagcattgtagattttaccacatcaattcatagcagtaactttaagagggcattgtgcaatagttagttgttttcttgttcagctattttaaaggctgctttaacttgtttgtttgtctttgtatataactacttctaatctaatcactagagttattatattctgttatgtttgaccagaattatatgacaagaactggtgacagtttagtgcctctgcccattgtccatgatttacactaattgtgagcagtcttcttatgtgtcagctcattatttttgaaacatttgcctttaggctgttctttgaggtatcaatgaagtgattgaatttcaataccttaattcagtgcacataatactaatgtaacagcagatgaaaattgataaaacccaaaagagagtcatctaaatttgtagttcctatttctgtgggtttgcctggccatggttggagagggaatggtgtttgatggtaaacacagggtgtttggggatcaaggagcctagattctctccctggatctgtcactaacttgctgcgtgacctgaacacgtcactttacctctctgtgcctcagttttcccatgcatg

SEQ ID NO: 132455 - DNA, 718 bp, Homo Sapiens
  misc_feature (404)..(404): n is a, c, g, or t
tttttttcaaagtataaattcatattttgtaggaaatgtagtttacaaaacagtatcaattgctacccccaattcagatgacccactttccccggaagggggatgtttaggtcctattccactgggcaagggtaaaatgattcagtagtcttccaggttaacagtaaattcttctcccaaggctggggccatcaaggcacagtctgtatgaggctcaccctgtctgaccctaggctggggctgcttgcttggtaggcaggaattggggtgggggtgggggctcagggaagggtctggaccctgagacttctgcttacaggagggtgctgggaaaaccctgccttgggctggggaatcccctctttcccacctttggggaacagggtggggagggggtacgtggngaccctgctgcctggagggctcaggtctgagcagcagggagccctcagcgcccactccagcagacctattgggaatttactacctgaagacaaattataggtctagggtcttctttgtgattttgggggagtcgaggcattggggggtgagaggtatggtctaaggtcacagtctgggagaggagtccttgggatcagaggttgtgcagaagaccttccccacctcctgcctcatgagataaggttgccaggattccattatcacggtgaatttctctgggctcatgggttaggggtcatagtggagcaccaag

SEQ ID NO: 132456 - DNA, 630 bp, Homo Sapiens
caagatatattgttgggtagcctatttagattttcggcttctggtagggacattttattttttggtaaagccacaatagatagaaatgccataaaaacaaacatgtaaacaaggtatcagaactttggttcactgaaacatctcacacctaaaacacctgaggtacaaaggcaccttgctaggcgctagacagctaactctgctgcagccactttgatcctagccttggggccagggatggcacaggctgaatggaagggctgggacttcagtcacacaggagtcgccctagtatggtctccctctgctccagacaaacattcatttctccaaaaatcagcctgataggaacatacaaaggaacatacaaaggtgtctgtcacgttgacatgggctgaaggaccaggaaggggaaggacagaaaaggatgtcagtcaacttctgttgatccacaaggtctcaagaactcctgtcctcgttcatggaaccacttattggagacccacttgcagcccacaagcacagggcaggcagcatgtcttgttcggtagtcaccttccccgctccgcaagaggttgtaccagaacacagctgtacccttcttaggccaaattgcagcccccagatcag

SEQ ID NO: 132457 - DNA, 1778 bp, Homo Sapiens
  misc_feature (136)..(144): n is a, c, g, or t
ctgatccatgcatcctttattccattaccaaccactgtgccgcatccaagcaacagtacacaaactggcaatcaaccgcagtccagttgtacaacgatctgaggcttacagtacatttaaggcttttaaatgtggnnnnnnnnnttaaaaccaaagaacccccagatccaaccccctaaccaacacaagtagtatagcaatgttaagcatctcctatttctgatgcttatttggcgcaacttccagtgtcaaaacccaaataattcctaaactaaaaagattagtttagtgaaattttaattacataaattcttcaaagcataaacttggaatttttgtcttggaaatgttataaaatttttaatagcaaaacataggaataaaaacatattaacaaaatgtattcaatcatttacattacaaacaaggaatctgcagttcattgttgtagcctgacaaaagaaatcatatctaccattaagaatctatgcacaatgtgattgcaaatatgtacagtactttaaaaaagcctacaaggaggactttacagaaggaaggtcagctaggctctttgttaaaccaaccagacaatcaaaatagtaaaactctgttggctagtaataaatttacacttaaaaaaacccctagtttctttttgtttaagaatattccagttatatttatatggttacagttgatgaagctgtacacgagagttccagtaaattacccttcagttcatttgtccgggaaagatcagcatgttaacaaaaaataataaaggaattttcaccacactagctttccagttacactatcacagcttcacaaatggattgaacccatgtatccagtggcagaaagagagctgcatgtgaaataccgagaacattggtggcaacagggcaagtcctgcatgaatgtcagaaatgatggataaggttgagaaacagatgcgaggctactttatacagcactagaaaattgtccctacattcagctctcattcccattcctgcaaggtaatgaagctgggaatcacgactgttcagtttaacgtgttgtgtgaattagcagaaccacctctagatacaaaagactgagatttcatcagctctttgattagaacaccctaaaggttgggcacttcttcatggttatcaagcctttacagctacccagttaaagcatgtgcaaaacagaggactcttctgttcacagtaaatgaggtaagatcaagttgttgtcttcaggaattaggaagttcgtgagatatgaactgttttagtctttctaggtattgtgcataaagctctatgtcattatgcccagccccttcaacccaaaggggctccacggctcggggacagcgctcgtacatcgctaggccatgggagaaatcgatgacctcatcctctgtaccatgaatgaccaacacaggagaggtgactttagatatcttgtcaatgctggggaaagcatcaaagcagtatgttttcctggtatccggaaaagccacacgcaaaccagacatcagaggggaatggagaattaccgctgcgcattcatacctcgaggccaagtctaccgtggggacagtcccaatgctctgaccatagaggataatgttctcgggactcacgccataccgggtgcgcagcgcctgccacgcggcgtcgatgtcggcgtagaggttcttctcggagggcttgcccgagctgacgccgtatcccgagtagtcgtaggagaagatgttgcagtgatgttggagcggccgc

SEQ ID NO: 132458 - DNA, 750 bp, Homo Sapiens
  misc_feature (129)..(208): n is a, c, g, or t
  misc_feature (677)..(677): n is a, c, g, or t
cttattcttcttcgtggactcctctgcggtggcactattgttgtcattgtcctcgtcttcactgtgatcactctcagcataatttttggctcctccttccaaggtacagctccggcgtggccttgaatnnnnnnnnnnnnnnnnnnnnnnnnnnnnnnnnnnnnnnnnnnnnnnnnnnnnnnnnnnnnnnnnnnnnnnnnnnnnnnnnttgtctttgtccgctgtcatgattcgccacgtgccttcttctgtcctctcacggctaggcctccgtgaaaggtagacagtaagcctgggcttcagtcttctgaatttctcactcaattccagggaaaatccaaccactccaacaaccccaacgtttcaaaaatgctctaattcaatgtaatacaaataagaggtcttccatccagaattatatcaaatggccacaattcctttctcagtaacaccataaacaggctgaagctctccacaaatcttctctgtaagtggatcccacggtggttgtgacccggtgctgagcgcacatacagttactcctagacaatcacctccttcccctaaagcgctacaccatcaatagtgaggtgttcgcggcccagctccggggaaagtggcggggatggggcgggaggccgcgcggaggctgcggggccgcggggcgcaaggccganaggggcggcccgcggggaggcgacgcggaggggctgagggggcttccctgccgtgacctttcctgcgacttga

SEQ ID NO: 132459 - DNA, 783 bp, Homo Sapiens
tttatacgccaaaaaagatattctgagataacctgtagttaccactaactttgtgacaaaattataaaaatccacagccatctatgaatctgtaggcagacctgaagtttgaacgactggtgaagacatctgattttctttatagccaagttaggataacaaaatgcaaacaagtcattaatatttactatatgcaagatacagaaagatgaaggaaggagtaagaagttatccttcgtggaactattcaaagcaaaaatgcaaaataccagggaaagctttgaagaaccaagatttgagcaggttcttagaatatagattggattggatttgatttcaagaaagatgaacgtgtaaagcagaagtgggaagccaaaaacttttttccaaattagaattaagcattctttcaatgaacatttggaaatcaaggtagaaaaatatccctagggcctagctgaggagtctgtatgttgttgggttttgatagtaaccagtccaagattttgttattagacgtgggtttctgaatagacaggcatttctgaacagacatgacaggatcaaaacaatgtttgagcaaactgcccttcatctactgtggatatgttgggggatgatggaatatagtgaaagataatgggtgctcatacagcagtctagacttaaggtgattcaactactatatattaaactagattatcttttattttttaattttgaaatctggatgctcagactctgcctgcactctagcctgggcgacagagagagagactgtct

SEQ ID NO: 132460 - DNA, 641 bp, Homo Sapiens
  misc_feature (231)..(288): n is a, c, g, or t
  misc_feature (548)..(589): n is a, c, g, or t
actggtttattgtgtttttatttatcacattagagaaactttttatatacagggaaaatgagtatgttatctaggatatgagttacaaatatttttcccagcttatttatcttctgattatgatggcttatgttctgccaaagaaattatttatgttcttgtctttattaatattttctttagttgtcttctcaatttcatagtatttgaagagctttccctactttgttnnnnnnnnnnnnnnnnnnnnnnnnnnnnnnnnnnnnnnnnnnnnnnnnnnnnnnnnnngtgggtacatagtaggtgtatataattatggggtacatgagatattttggtacagccatgcaatgcgcaataatcacatcatggaaaattgggtatccatcccctcaagcatttatcctttgtgttacaaataatccaattatactcttttggttattttacaatgtacagctaaattattactgactatagtcccccattgtgctatcaaatactagctcttattcattctaagtatttttttggtactcattaaccannnnnnnnnnnnnnnnnnnnnnnnnnnnnnnnnnnnnnnnnnagcctctggtaaccatccttctattctctatctccatgaattcgctcgtgcc

SEQ ID NO: 132461 - DNA, 703 bp, Homo Sapiens
attatttctcacaaatgccaattaaatcctttaagttgaatagaaatctgggttggattaagtgggaaaacccttccttagtttacattttctttttctcaggtgttttcattgaggctactcaggaaaccggtcaggctgcccaggacacctggaacctgggctatgccaggcctgtctgccacagccctgcctgccccgcttccacacaggaagagaggctgaggcgctgtggacggcagcagctgcagtcctcgggatccaaggacccttctgatcacagagcacccaggataagctggacccttggcctgcgggctgacgtgcagcggctgcccttgcttagcagagcgactcaccctcggaggccaccctgtgtggctcctcctcgtggaaagagctcgcacttttcagcatcgcagttttaactcagaccaaagggcagacgtggagcatgcggggccggaacgagtgggggaaatgaagtcctgaaagcagaccccacttctgcccgcttctgctcagcaccagcgcggtggcgcagtggcctgagacactgtgagaagccggtcagggcgaacgagagtcatctgaacacggaggaaagtggctgggctgaccccacacacctcccacagcggagcaacggcatgccgctgcctccgtacctgcggttcacgcacacgttgtgcattttctggtt

SEQ ID NO: 132462 - DNA, 722 bp, Homo Sapiens
aagcttttcttttgcttttattacaagcatataatattaattggcaaaacactgaatacaagcttcactatcataaaatcaaaacatttaagcaatattccaaaaaagatttgacaaaaactagccaccaagagtacaaaaattacacaccaacacaaagcataaaaaatgtaaactttcaaattaaacagtcaaacacatgtatcttcgtgatcacctccacacctcgactgccttcgtctgccgtacgctgctggtaaaggctgggtggctgcactgtcttccccaacccaacattgctttcgtctgggaaaatgcgtctgataggcaattaagccatgggagtggacatttacacggaggctacgcacatctcaggggaacgctcaaactgcagctcgttcctcagacgcactgttgggtgcgaaggacacctggagggtgagggagacctcggcgcgttcctgcggggccttggccacgtggccattgcccgcaccctgtcccgtacaaattatggtatcatttgaatgattttctaatctacttatctcaatttatgtatttaaatgtcaaggcagagaaatacattgatcatgttaaggtcatgtgatgtggtggcgcagtaatgacttcctgaggaaacggagaaattggatgttttgtgatttagctatgtgcactaaacttactttccatgttttgagagcacattaacatca

SEQ ID NO: 132463 - DNA, 907 bp, Homo Sapiens
acagtcaaacacatgtatcttcgtgatcacctccacacctcgactgccttcgtctgccatacgctgctggtaaaggctgggtggctgcactgtcttccccaacccaacattgctttcgtctgggaaaatgcgtctgataggcaattaagccatgggagtggacatttacacggaggctacgcacatctcaggggaacgctcaaactgcagctcgttcctcagacgcactgttgggtgcgaaggacacctggagggtgagggagacctggacacctggagggtgagggagacctcggcgcgttcctgcggggccttggccacgtggccattgcccgcaccctgtcccgtacaaattatggtatcatttgaatgattttctaatctacttatctcaatttatgtatttaaatgtcaaggcagagaaatacattgatcatgttaaggtcatgtgatgtggtggcgcagtaatgacttcctgaggaaacagagaaattggatgttttgtgatttagctatgtgcactaaacttattttccatgttttgagagcacattaaacattcacgtacaacgtgggactaggttggcttgtacccagaacgtccaacccaatgccaccctttgaatcgctgtgaacattgttctgttgctgttcagagaaaacaagcaaggctgcgaagcccgggggtgcaggcagctgcagtgcttgggccagggcagctccgctcttgtggtctgaggccacatggccccgcccaggggcagcctggccacaagcacgtggggtccaaggcaccaggacccaggcaggactgaggtggccccacagcgtggcccgaggcatcactggctgacgggcactcacacacaaccccaataacagcattctcacaataataacaatgaaa

SEQ ID NO: 132464 - DNA, 762 bp, Homo Sapiens
tttttttatcttaagagtctttatttaacacatatagtacacattttcagtcatttcatcatcatccaagtacattaagatacatacccatgtatattacaaggcttattgttcactcatcatcttccctttctactttaccttctcatttcttgaagtctctattctcattaatttgttatttagttacagtcctcttttcagtttcttcagatggggatatgcagatgatagattcttggaatcctttctgcatccctttcactctggcaggtgaatgatgcttggctggaaagagacttcttggttactttccttttctcttaacaggtatagatatgattccactgtctgataccagtccaattcttttcccattgcaaataacttctttctgtctggaatcttatatatttttctctttaactttgagattcaggaattctgtcagagtatgtttaggtgtatgccttttctcatcaatcctgcctagaatttagtgaacactttcaacctgcaaatataaggctttattcagctcaggaaatttacttctattaaatctggcttttctcttgtatttcactctggaactcccattatatacaaattagatctcttggatctgtcctcccttcttccagcagttgtatcaatttaagagtttacaaaggcagagtaatgcttttcctgattatatcagatcaccacaaacaccaggtcaattatctgattataacatttggtactagaaggcagcct

SEQ ID NO: 132465 - DNA, 691 bp, Homo Sapiens
ctgtggatgatcaattttaatacaattatacattcatgctgtggtggtaacaactttcacattatttgtaggactacttttctcaactcatgacaaaggcacaatccaaaagtataaattaacattacaataagttttaaacaaatgtggacaaaggaccaatctgaagtattaaacagaaaacatctgaatatggatcaacttgaatatattttcattccagaaaatattttgtcttttcaacactgtctcattttgctatgatggcagttttgtgtacctggtgacttactcttaatacccattcaacatgtaacaattataattaagcattcacatactggatagacaacctagatttttaaatatgtctgattttttaaaattatttttaaatgaattattctgctaaatgtcttacttttccatttcagttaatcatgtgaaaataaatgctttttcttccccttatagaattcagtaactcagctattttactttagatacatgtgaatttagccaaggattattaaacaaatagaaaaaaagccatccaatcatagtgcttaaaggcaatgtaatatgtaaaatgttaaaatcaggctgatttatttccttgatgggaatttttggtctcaaaagaaacgaggtatttaaagaaactgaagcaacataatactactttgtcttt

SEQ ID NO: 132466 - DNA, 1213 bp, Homo Sapiens
aatggcctggatggagggcaaccggactggggtcagcaggctgtccagccaggtggcatccatgttcttcagatctgtgaagacacgctgtagactcagcccaatatccccccctgggctgtcaatttctggctcctccttacagctaaagtctccatagacagaggtgggctggactccaggttcattgagtaggtaccccttcccatccacgtttgttggctgccactccgactgctccaagagcttcatgatgtcctcaggtaatttcccttcctcatcctcatctgttgtagcttcagaggtggaggggcatgggtgacacctggaagttgtacagatcactggtgctgtcccggcacaacttccactgggatgtgccagtcggggagagtgctgctgacagcacatggcgacagtgctggagtcagggcctgctccacctccaagtcctgcatgtagcctggaactgtgtagctgctgtggtcatcaggcagagtggagctgctgagtccatcagagaaggtatcagggctggaatccccacatgacttcctcttggccttgctcttagcatctcggctggacttcgactttctttcttttctctggttcttggtgagaggtggaagcatccggtacactcgcacagctgagctgcccttgttcctgctctggtctttcacctcctcgatatctggcagggagttcatggcacagcgaaagttggccttccacgtcttgggatctggctccttttcccctgctttgtatcggcctgtgtgaatggcccagctccggaacaaacaggcatccttgttgatgtcccagccatgcttggcagcatgcttccatgggatctggaagatcatctcctctttattaatccagatgagccccgggatttggttggaattaatctgcatctctagccagggtctcatgcgcatccgagtgatgggcatgttggctctgctgcaggagcgattcggcggtcgcgcgcgagggtcccggcgacgcaggggctgcagtgagggcgcgcggagcgcgactccgagtggaagagggaagaaggcagaggttgccgggttcttaaggccgccgggcacggccggcgtggactgggcacggctccgggtggcctcggttcggcggggctcgggcgcacgtcttgcccctcgtgccgaattcgccacccaggcctcgctacctt

SEQ ID NO: 132467 - DNA, 971 bp, Homo Sapiens
  misc_feature (32)..(32): n is a, c, g, or t
  misc_feature (66)..(66): n is a, c, g, or t
gcatgatgtccctccaggtaattttccctttncctcatcctcaattctgttgtagctttcagaggntggaggggcatgggtgaccacttggaaagttgttacagatcacttggtgctgtccggcacaacctcccactgggatgtgccagtcggggagagtgctgctgacagcacatggcgacagtgctggagtcaggggcctgctcccacctcccaagtcctgcatgtagcctggaactgtgtagctgctgtggtcatcaggcagagtggagctgctgagtccatcagagaaggtatcagggctggaatccccacatgacttcctcttggccttgctcttagcatctcggctggacttcgactttctttcttttctctggttcttggtgagaggtggaagcatccggtacactcgcacagctgagctgcccttgttcctgctctggtctttcacctcctcgatatctggcagggagttcatggcacagcgaaagttggccttccacgtcttgggatctggctccttttcccctgctttgtatcggcctgtgtgaatggcccagctccggaacaaacaggcatccttgttgatgtcccagccatgcttggcagcatgcttccatgggatctggaagatcatctcctctttattaatccagatgagccccgggatttggttggaattaatctgcatctctagccagggtctcatgcgcatccgagtgatgggcatgttggctctgctgcaggagcgattcggcggtcgcgcgcgagggtcccggcgacgcaggggctgcagtgagggcgcgcggagcgcgactccgagtggaagagggaagaaggcagaggttgccgggttcttaaggccgccgggcacggccggcgtggactgggcacggctccgggtggcctcggttcggcggggctcgggcgcacgtcttgcccctcgtgccgaattcgccacccaggcc

SEQ ID NO: 132468 - DNA, 1184 bp, Homo Sapiens
ttttttataaacaatttactttttataaaaagacaaatgtacatatttacacacgtcctatgtgttcacacatgacttaatggttagatgacatttccaattttaagtcataccaaggcgctcacacttccctccctgggcctgttgagggctgctggggcttgagggggtggtgggcgccgagcaaggcactgtataaataaatgcaaaggccaagagctcgggggaaatgttagtgtacacctctgatcagaaatgtggcaagatccacacgaaaaagtgccaagtttttttcccaagcccctcagccaaagcagggagcagggtagagctcctctgaggctgagggagcatcgccccgaaggaccccactttccttcacatttcactggctttggaacagtccccagggctcagctgaaaagggggtagttctttgggaacgagattcatttagtgcaattttctcttagtgcagagccagccctgggattggtgttatgcttttctggggtcactggtctgttcccctaggagccagccagtgacagcgagaccctctccaggcagctgggctcagaggaaaaagccagacactgactcctgtccaagtccctgacctgatacactggtctcagaacctcatcttcccaggaggcagggccagctttacaccacaagaaaaacccagacactggcctgccaggccctgagaggtcaatgacccaaggagggaggccccatccccacttggcagtggggtcacacttggctgttgaggggcccacagaagtccagcttctctgcaccatatccaccatgatgccaggtcctgcttgcctagaggaataagaggggcccaggggccctgctacggtgcacagggaatggcctggatggagggcaaccggactggggtcagcaggctgtccagccaggtggcatccatgttcttcagatctgtgaagacacgctgtagactcagcccaatatccccccctgggctgtcaatttctggctcctccttacagctaaagtctccatagacagaggtgggctggactccaggttcattgagtaggtaccccttcccatccacgtttgttggctgccactccgactgctccaagagcttcatgatgtcctccctcgtgccgaattcgccacccaggcctcgcttcctt

SEQ ID NO: 132469 - DNA, 1035 bp, Homo Sapiens
acatctgcctagagaccttatctattctcatggcttcaattaccatttattgctgataacgtccaattctacatttctattcctgacatgtctcatgaggttcagagacatgccactcagatatcttgcatactctttaaacttaggatcttgaaaacggaattcatcctatccctcatctatgaattgcatcatccataagccaatttccccaaacactgtcaattccacctcttaaatgtagcttctttttatctctagtatcattctttatttccacatgcctctgctaccatgtaggccatcatcctagtttgtttgggttacttctccctcttaactcatctctccttgcttccagtcctgctcccttccaatcatttccattctatagccagaacatgccaaaattgtttatttaaaaatttgttttctcattaaattgtaagattcaagagaacagagaccatgtctatcttgctaacctcgcaattactataggtgtctggtacattgtaaaatacaaaaattatttatcaaaaagataaataaactggcattattgacttcatctaatatggaagtaatacagaaatgctctaaagacttcacgggaatatcactcatgtctgcttttgctcttcattgtaccccagagtctagtataagtctggcccctattgttgaatcaatgtataagaataaaagcacaatatgaggttaaagtgctttggaaggtgttatataaaacactacacaaataaaacatacaaaaaataaagcagtactacttcccacatgcaaaaataactgaattgccagtttaaaattgtcacttttacccttatggtgttctccctatcctcttccatgttttatttatttccatagctcttttcatgttctatcatacaatataatttacttcttttgtttattgttgtctcccccactagaatataagctccataaaagcagcaatttttacctattctgttattgagtacctcataggtgctcaatgaatattattaa

SEQ ID NO: 132470 - DNA, 635 bp, Homo Sapiens
caagaattcggcacgaggatgaagttaagttcacaaacatgagtgaatcacacaaacatgaagctaagtaaaagaattaagacacaaagaatgcatactgtgtgattcagcgaatgttacataaagtctaaaagtggccaggactattctgtggtattaaaaggtaggataaactcccctaggactaggggaggagttggtgacagccagtgatgtttttccgagggcgggtgatgtttctactctgaaagcccttcggcatggccacactcatgttgtgataacccatcaggctatacacttagcatacttttccttatgtatttgatagtattgagattacaacagctgcagtatttatagataaatgcactaaacaggacacagagaggtagtagacaattataaaaggcataatttatgaagaagatgtaacagccacaaatctctatttaccaaaaacatggaactaaatatttgaactgagatctactagaaataaaaaaagaactagaccatagttctatgacagtggcaaccttcaaaacacagtttcagaattggacaaatttagtacaagaagcaaatatggaaaaaactgaataatgtaatcattaaacttactttttaaacag

SEQ ID NO: 132471 - DNA, 577 bp, Homo Sapiens
agactttcaatcttcactggattacttttaatacctaatgtacatgctacatagctgttacaactgcagtgtacaagaaaataagtgacaagaaaatatagtattttgaaaataagaaaaataagtctacatgttcaatacacacacaaccatcctttttgattatttttgacccaaagttggttgaatccacagatgcaaatcccttggacagagggctaactctgtcactatagaagtgtacacttaaatggttaagatgaccaatttatgagtcaaaaaggaagggggggtcagatacttgtcagtgtacgccctacataattacctcaaatattaagcccttaccatgtgccaagcaatataaacaccatgtgcagctcagtctaattgagaagaaaaccaaatcatcacagcacctgctaagccatctgtggagccagggttatctcatcagccaggctgcatcaccaggaagcagccacctgataacagctttccctggaagtcccctctgtgatcaaccagcatctgatttaacaacagtctcatgattttcaagccaacctgtccctca

SEQ ID NO: 132472 - DNA, 778 bp, Homo Sapiens
  misc_feature (754)..(754): n is a, c, g, or t
caatattcaattttaaagaatttattttcccatttgtagagtaacattattgtaaaatctacagttatcgcaatacctgcattgcttaaaagaattcctaagaattttgttaaagcatattttttttaaaaaactgaaccaaaataatgtacattttatctctaaacattgtgtcattaaagtccatataacatcttccgtaaaatcaatgtgatgttacaattatatacatgatctgattcttctcctaaaggcttctctgaccatgtatgatatccaagatagatccaatgcctttaatatcagactgtagagacaattatgatcctaaacaaaagaaggaaaagctgtatatacaagacagcaatatgacagtttagctgtttgcagcatctgcttggcggggccatccttcttcttcaactccagagtcatactcctcttcagaggattcttttgttggagcccggatgtatcctggttccttttttccttctactacttctttgtcaacctccacacatacgatatcagaattagggacttcaaacattggttctagtaacagcttttccattatggaccgaaggcctcgtgcacctgtttttcgttctagtgccaatctggctatagctttcaaagcatcctcagtaacattcagttcacacttatccatgctgaataaggcctggtactgaggaataacagcatttcgtggctcagttaatatttgtacaagtgttttctcatctangctatgcaatggaaccaccacagg

SEQ ID NO: 132473 - DNA, 693 bp, Homo Sapiens
ttttgaatttttcataatgctgaattcatttaattttaaggaccagattttaatcttaagtactttttagaggtgttagtagtcaatacctgtcaatgtaatgtttatttacaatgggaaaaattaaaagttggcatcattacatcaattcctcatatctgagtcctgaaattttaaagcactctaaatcaccaatttacacttggcttttgttctcaagtcaaatatctgtttttacaccttatttcggaaggcgttcctcctgtgtatttcatgatgtcgactaagtgaagagttatagctgaaggcttttccacattcgttacattcgtaaggtttttctccagtgtgatgtctctgatgttttttaaaggatgagtcatgcctataggcttttccacagcggttgcattcatatgctttcactcctgtatgaacagttttatggttgctaaggtgtatcctctgcctaaaggcttttccacattctttacatttgtagggtctctccccagtatggattctctggtgatgtgttagatacgctctatgactaaaggttttacaacatgcagtgcatgcatagggcttctccccggtatgaattcttatatgttcactaaggtgtctaatctgtctaaaggttttcccacattcattgcaagtaaaaggtttctctccagaatgagtcct

SEQ ID NO: 132474 - DNA, 973 bp, Homo Sapiens
  misc_feature (40)..(40): n is a, c, g, or t
  misc_feature (213)..(225): n is a, c, g, or t
  misc_feature (267)..(344): n is a, c, g, or t
  misc_feature (405)..(501): n is a, c, g, or t
  misc_feature (505)..(531): n is a, c, g, or t
ggtgcgcggatcgggcgcacacaagacttctgtgcgcgcngcgcgcggcgcgtgtagacagattgcgagcgacagcaggcggggggggtgtgcgcgcggggcgcttactattctcggcggcgggcgagagagagcgcacagtggcgagccgggggcggggtggtggtactggaacgcagcgcgacgtgcggggcgcaggcgcgtcgttcgtcnnnnnnnnnnnnncggcgccgccaaggacatagacgtgaaagcctggcgctagtnnnnnnnnnnnnnnnnnnnnnnnnnnnnnnnnnnnnnnnnnnnnnnnnnnnnnnnnnnnnnnnnnnnnnnnnnnnnnncgcctttgctggcgggcggggtccgggccgcggcgggcggcgccccggggctccctcgcgnnnnnnnnnnnnnnnnnnnnnnnnnnnnnnnnnnnnnnnnnnnnnnnnnnnnnnnnnnnnnnnnnnnnnnnnnnnnnnnnnnnnnnnnnnnnnnnnntccnnnnnnnnnnnnnnnnnnnnnnnnnnnccaagagtaacagtgaaccatatttcaatttattgacattgtcaatttatgaacaagacaggattttttcttttcccatggaatgagatccttttcaatctgccataacatgtgcccacacatcttcaccttggaaatgtagcatttcaagctttagtcagggtagattattccttctttactttcacaatttttacgttgctgccagaagtcttctcagcatttgctttgaattctgtcttcagtgcatctctcactgcttttgcacagatctgggagtatcggatgtagctgagtccagcctgtctccagtaggccaccatgctgtagcgaaagcggagctcgtcgggccgaatcgccaagacgccggcaatgtcggctcagccgggcggttcagccgcaggaagatcagaccacagaagcggaagaggcggggcgtccc

SEQ ID NO: 132475 - DNA, 781 bp, Homo Sapiens
  misc_feature (705)..(705): n is a, c, g, or t
tatttttattggtctctttgtgtgataatgacctacacatggacagggtccaaaccatctggaagatgtctgattccaggctgaaaagcagttctcaacaaaactggtcttctgcagccaccacaaagcaccaggaaaagggcacctccgcggccatccccagccaggccagcacagcgctccgtgcccgctgaaccgtcccaggcagtcctctgatgacccaaaccaccaccacctttgggcccagagcaggacaaatgaaatttcaacaggggcctgccctgtgaccgaaaattactcagcttcacagcccctgaatgcaaggagaggtggtccccccagaaccaacatgccccccaaggtgggtacgcccacggttctgggaaatgcatacctcaggtaattcacaggtgcgatcccccagtggaggcggggcagcctgaacttctggccctgcaggagtgggaagaaatcgcttttgtctttccgacaactgagccttccacctggggctgggagggcggacagcaggaccggctcttccactccccaccgcggccccccgacctggtcagtagctctggcgttcagacaaaaggtcccctgagctgggggtggggggcaggtcgagagtaggccggtaaatcagacttcgcagctccttaagtcaccagtcctgcatttgggtgcagagattccgttttnaaaattcgaagcatcgctttggttcgctctttgttcgcgggcgcgggttctcgctcatccatccatccatccatcc

SEQ ID NO: 132476 - DNA, 594 bp, Homo Sapiens
  misc_feature (100)..(138): n is a, c, g, or t
cttaagtcaccagtcctgcatttgggtgcagagattccgttttaaaaattcgaagcatcgctttggttcgctctttgttcgcgggcgcgggttctcgctnnnnnnnnnnnnnnnnnnnnnnnnnnnnnnnnnnnnnnntcattctttcttgacgcactcgctcgctccccggtcgctccgggcgcattaccgcttcttcttctgcttgagggacttcctgcgtttcaggatcatctcatagagcttgtccatgccctcggtgaggccctcgccgatgatggcgcacgccggctggacgtgataggtggtggccgggataagctcgtgcagcgccagctgcttctcaatctctgccaccggcagcgacttgggcaggtcctgcttgttggcgatgaccagcagcggcgtgccctggttctcggcgaacttggtcaccttgtgcagctccgtcttggcctcctccagccggtccacgtccaccgagtccaccacgtagatgatgccgtccgtgcagcggctgtaggacttccacagcggccgcagctttcctgccgcccacgtcacctgccagcttctaagccggtaccgagctga

SEQ ID NO: 132477 - DNA, 776 bp, Homo Sapiens
  misc_feature (326)..(334): n is a, c, g, or t
cagattgtttcaattatttattattataactatcattattaaacacctttctttatatataattctttgtatgcatctctgatatggttttaaagagaaattgctagatgtagagttcccagcacaaagtacgtccgtatttttaagtcttttgatgcattttaccaaattgccctccagaaatactgtaccaatttacagtcgcatcaataaataaccaaagagtcccatttcttcctcacattctttggcagtataggaaagtagagattaccctccaccctttattgttgcaaatttaatagggggagaagagaatggtgggnnnnnnnnncccccttaaaatgtaatattttttcccacatgtttactagtcatttgcttttcttctgtattttgaagttgtctaaatcattcaggagtctctaatacacacaatgtcttgtctttcttacaacatactctttgataggcaagggcatgaaagctgcatgtctttcccatatttttttcaagttaagcaggaattcccaaaatgactggaattagaatgtcttcttttctcctgggcagccatgctactttaatgtcttggtaataaaacagaaaactgggccatattcagatgtggaacttcgggtactctaaactcttggttcctcacctccctttccttcaggttatggagggtttctgaccattctgtggaccctatctgaggtatggtagtgagcagtaagcttttggctttattagcgttttctttcagggtcttt

SEQ ID NO: 132478 - DNA, 407 bp, Homo Sapiens
tttagtttttatactctaatactttaatatgcaatgaataaaagggcagaaaattcagaattacaataaatgttaggctatttcagaacaccagtttttcacacctattttcttagcatacagaagctcgaaaatcatacattaagcatagtttgaattgtcctgaagttatattctgaaggggctgtaacacttaagaactaataatattaaaaaggcaaaagcattataactcacagcacacaagactttttacctcatctataaaacgtgagaatgtcaatgttttattggctacaaggataaggaaggaaacatcagagaaataaatttgataacaagattcacacttcattacaagtgattttcctaaattcacaactttcacatttggctgagtgaaagag

SEQ ID NO: 132479 - DNA, 1085 bp, Homo Sapiens
  misc_feature (82)..(91): n is a, c, g, or t
  misc_feature (680)..(712): n is a, c, g, or t
gtgggttatttttgtacttttttcattttaattaaaaagtaatcatttcattttattaacaacacaagagttccaaagaggnnnnnnnnnnccactatataacacaaacaggtcagaacataaaatgctgccatttggggaccttgaattttgaaaccattgtttgcttaaccactggcagggactcagctgaagtcgctgctctccctcacccctgctagaggacctcaagactgtgatccacagggctctactgagcacaaaccctggggagagggcagcttcctggggctccatttagaaccacagccagaaaccctccttctaacaatttcactctggtacaaaagtcgcgaacagccacccatctcgagaacatgtccagctaccagaagtctgacatcaaagtggtccctacctcctgctgctcaggaaacagaataagagtctagacaaaaacaagagcctggggttttgagccaaaagcccaaaacaaatcactgaagaaacgggtgttcacggccagagtctcagaaccaacttcatggaagtgctgctggagagggggatgctgacagaactggttaacagggaagagtggtggggcccagattcacagtttgtggtaactgctgctgactggagctgttcagtccattggagatcttccaatgaaatgnnnnnnnnnnnnnnnnnnnnnnnnnnnnnnnnncaaccttggctcagagagaaaaattcttttttctgtggctgccatggccattcctcaacaatccagagtggctgatttatgaatcctcaagcagaccccaaacatatggggtgagggtatgatgacactgtgcctgccaaggccagtttgcttttcttcaactctaggcaggagttgcaggcaggagcttgagctctggtcaatgtgtatgaagctggaaagccttggtaggttcacaatgaacaaaggtggtggctactgacatgacaaatgccattccaaacttggctagctgggcctggctccaaatccagtagaaacagggaccggagaaaccccatcaaatacaagcccagacacctgtactgccccc

SEQ ID NO: 132480 - DNA, 980 bp, Homo Sapiens
  misc_feature (457)..(457): n is a, c, g, or t
tttgggccggtgccccccgggcaccggcccgggtctacccggtacgtcagagggggttgcccgattaccaggcacctggcttggagagcgccgtgggcccggcccctgctctgctgagagatggctggttccactgcccgcccgccccttattgcctgcgtgggacagtggagatgatgacaggatcccactcgccctagcagtcagaacggggtacacacaaacactctagaagccacacttagcagaattcccagtcttccggcccaggggagggtgccaccagctcagcagccctcaagaggaggccgggagcaacttctccagggccttcttctgcttctcggtggctgcagccagggcctcaaccagcttctcctcgggcatcatgttgagcaccttgagggcaaagaggagctggcacttagccgtgctcaccagaaggcagttagctcanggaagttggggaagcctccgactcggtccttctgggtgtacagcgggacccgcacgacggcccagcacctccaggccgtggtcgcgcgagtgcaccgcgctgatctccacggcgtgcagctgctccagcgtcaagctgccgcgcgtacaggtgcgccacgagcagcggatgtgggccctcggtcaggtgcgagctactggtcgctaggcaggcagcaccaggcacacaggcccatgcaccacggttcacggccgtcctccagcgaccagaagcgccggtccacgaagcccccggggaagcaccagcagcccgatcgaaacagcatctgcaatcagcaccgagaagcgcatggggatgcggccgaagagctgacccagggtgtggcggcgtacagcatggcgtggcacgagtggctccagcccggccctaggcgcatcgccgtccacccggctgatctgcttcagctccggaaccgccgccgtcgcctcgtgccgaattcaccacccagcctcgctacctaggc

SEQ ID NO: 132481 - DNA, 1459 bp, Homo Sapiens
  misc_feature (79)..(97): n is a, c, g, or t
ctaccaaactatcaacaacggctaggtacaggcctgggtggtgaattcggcacgagggagagagaactagtctcggagnnnnnnnnnnnnnnnnnnnaaacacacaaagcagctgcggagcgactttattgtcttctccttcgacagcttcgttgtacatagctgggcccccgaggccctgactgtccctgggaaccaagccacgtggggtgaagctactttgaaacctcacccacagttcacacgtggtgaaagagaaaatctagcaaagtaaatccaacaacaacccaaattaacagtattattaacttcctaccccaagctggctctcccccaggccctgaactggctcaggaaggaggcaggaatgagctgaccgagacaaggcatcctccacccacacatcccatcttctgagtggtcccagagctgtgcgccacccctgtgggacaatcaggcactcctgggtctctaccagctgtgatgagacgtacaagaggagggtctgagcccagaataaacaagagcatcctgaggctggagaggcaggcccagtgtgcccggaccaccctgctctgcctgagaggatgggctgggttccagctggcccggccgccacctagtgactgcttgggacagtggagatgatgacaggatgcccactcgccctaggcagtcagaagcggggtacacacaaacactctagaagccacacttagcaggaattcccagtcttccggcccaggggagggtgccaccagctcaggcagccctcaagaggaggccgggagcaacttctccagggccttcttctgcttctcggtggctgcagccagggcctcaaccagcttctcctcgggcatcatgttgagcaccttgagggcaaagaggagctggcacttagccgtgctcacgaaggcgttgctcaggaagttggggaagcctccgactcggtccttctgggtgtacagcgggacccgcacgaggcccagcacctccaggccgtggtcgcgcgagtgcaccgcgctgatctccacggcgtgcagctgctccagcgtcagctgccgcgcgtacaggtgcgccacgacgcggtgtgggccctcggtcaggtgcgagctcaggtagtcggcctcggtgaggcgcaggcagcccaggcccaggcccagcacccggttcaggccgtcctccagcgaccagaagcgccggtccacgaagcccccggggaagcccagcagcccgtcgaaacgcatctgcatcagcaccgagaagcgcatggggatgcggccgaagagctgcccagggttggcggcgtacagcatggcgtggcacgagtggctccagcccggccctaggcgcatcgcctccacccggctgatctgcttcagctccggaaccgccgccgtcgacatcttggcactaccctcggccgattcaaaccagcctcgtacctagctagttt

SEQ ID NO: 132482 - DNA, 919 bp, Homo Sapiens
  misc_feature (87)..(87): n is a, c, g, or t
  misc_feature (412)..(447): n is a, c, g, or t
ccctagtgactgtttgggacagtggagatgatgccaggatgccccctcgccctaggcagtcagaagcgggggtacccgcaaacattntagaagccccacttagcaggaattcccagtcttccggccccggggagggtgccaccagctcaggcagccctcaagaggaggccgggagcaacttctccagggccttcttctgcttctcggtggctgcagccagggcctcaaccagcttctcctcgggcatcatgttgagcaccttgagggcaaagaggagctggcacttagccgtgctcacgaaggcgttgctcaggaagttggggaagcctccgactcggtccttctgggtgtacagcgggacccgcacgaggcccagcacccatcggtgccttccacggggccagagccaaannnnnnnnnnnnnnnnnnnnnnnnnnnnnnnnnnnnacctccaggccgtggtcgcgcgagtgcaccgcgctgatctccacggcgtgcagctgctccagcgtcagctgccgcgcgtacaggtgcgccacgacgcggtgtgggccctcggtcaggtgcgagctcaggtagtcggcctcggtgaggcgcaggcagcccaggcccaggcccagcacccggttcaggccgtcctccagcgaccagaagcgccggtccacgaagcccccggggaagcccagcagcccgtcgaaacgcatctgcatcagcaccgagaagcgcatggggatgcggccgaagagctgcccagggttggcggcgtacagcatggcgtggcacgagtggctccagcccggccctaggcgcatcgcctccacccggctgatctgcttcagctccggaaccgccgccgtcgacatcttggcactgaccccgtcccctcgtgccgaattcgccacccaggcctcgctacctt

SEQ ID NO: 132483 - DNA, 1140 bp, Homo Sapiens
  misc_feature (401)..(413): n is a, c, g, or t
  misc_feature (649)..(664): n is a, c, g, or t
  misc_feature (682)..(1026): n is a, c, g, or t
  misc_feature (1088)..(1088): n is a, c, g, or t
gcacgaggttcactgccattgtttgatttcctctagaaacctcaggagttgattcgtaagaaataacagtttcttcctgttcgtcaacactgttctttgtattttcttcaggatgctcttctggtttatgatttgcggtctgtgtttcatcttgagggctgaatgtaacatcctcaggcattttgtctttgtttcttcccattttagctactgcagtgcttttgtttcacacttgatttgtaaaaattttatatatatgtatttaaaatgtgccattttattgctaagtgaagtatgtcctgttttctgctataattctttctcggtcagattgcaatgtcagcagttactgccacactcctgtcagcttaaacacaaatgttactgcttatcttttcttnnnnnnnnnnnnncaaagtgtaggtattttgaagtactgggcttatatttcattggaatacatgtgtacagcaataagcaggtttccaaatccggtacttagtttgtgtacaaatgtaattatgttcattgtgtatatattatacaatgagcacatgtaatgtattaaaggctacttactattgtttaaatgcaaatgttcatatctcatttctttttttatcatgttaaataaatgttgatgttcttnnnnnnnnnnnnnnnncctcgtgccgaattcttnnnnnnnnnnnnnnnnnnnnnnnnnnnnnnnnnnnnnnnnnnnnnnnnnnnnnnnnnnnnnnnnnnnnnnnnnnnnnnnnnnnnnnnnnnnnnnnnnnnnnnnnnnnnnnnnnnnnnnnnnnnnnnnnnnnnnnnnnnnnnnnnnnnnnnnnnnnnnnnnnnnnnnnnnnnnnnnnnnnnnnnnnnnnnnnnnnnnnnnnnnnnnnnnnnnnnnnnnnnnnnnnnnnnnnnnnnnnnnnnnnnnnnnnnnnnnnnnnnnnnnnnnnnnnnnnnnnnnnnnnnnnnnnnnnnnnnnnnnnnnnnnnnnnnnnnnnnnnnnnnnnnnnnnnnnnnnnnnnnnnnnnngccgtatactgttattcacagatcaggggatacgcaggaagacatgtgagcaaaggcaacanaggcacgacctgtaaaggcggcgtgctgggtttttcataggtcggcccctga

SEQ ID NO: 132484 - DNA, 850 bp, Homo Sapiens
  misc_feature (393)..(393): n is a, c, g, or t
agcaataaaatggcacattttaaatacatatatataaaatttttacaaatcaagtgtgaaacaaaagcactgcagtagctaaaatgggaagaaaaaaagaaaacaagcttcaatggaaataataactaactttagaaaatgaaaagcaaaaaaatatatatataaattcacctagacttaagaaacatcgaaatctggaaatcagcaactaagtaagctctggaaatagactgcacattaaaaagcacctttacttatgtgctctgaaatcatagcagcaagctggtgtcagaataataaccttgagattacgaagtgtacatatgggccattaaagctgttttggaataaaacatttttccagaagtgataaaatgatgctctgtgaccaanaagcatcagaactatgaatttcatagatttaaaatatactgtacaatatcttcttacactgctgaaggtccatgtctttagctttgaatggtttcaacagaagtcagtatagttcttctaagactacacacacatgaaatgtgatccttctgtgagctgcggctgagtggatggaactggcgatgccgaggactcaaggagatggggacagacttttccactgccattgtttgatttcctctagaaacctcaggagttgattcgtaagaaataacagtttcttcctgttcgtcaacactgttctttgtattttcttcaggatgctcttctggtttatgatttgcggtctgtgtttcatcttgagggctgaatgtaacatcctcaggcattttgtctttgtttctttctttatccatcatttccacagaatttactccatttggctcaggttcaaaaa

SEQ ID NO: 132485 - DNA, 921 bp, Homo Sapiens
ttttcaaagttaaaacacagttttatttactcatttataaatactgttgtgtttacaggcatcatatagaagtgaatattattattcccaaactttcaaacacagaatactcaaaactatataacaacaaccagtaaaacaaaaccattcatcttagggttgaaaggccactcaaaattgcataaaaatacattcagttcacaaagcaagtctggctgcttctccctaaacaaccccaaccccaccccatcccaggtgtatttacagtggactgaagttaatccatacaactcagctgaaaaacagttacatctggtgtgtgaaccttggtggaactagggtgaagggtggagtaaagacacaaaatgctaccactaaaatgggagaggcatggaaacctcagggtggttcttttcacccctgttgatcaaggtcagggcaaagacaaggaggaaggaaaaccataaagccaaagtctgagtgtgaaccactcaactgagcacaggctgtagcttctccaagaaggatgcaagggtgaaacattcttttccttccttctgcagggaaatcattgccctggtgtgccagccagtggtaggcacaacctttcaaaagttcaagggatgctggctagaaaaggaggtattctggattgctgcctcctctcagaaccctctcctaccccgcagcctgcctcctggtgtcttttttcctccaaactctctttacctaacctctcttcatcagaaggcaagcgggaatctgttccgggtttcagtagagtgggagaaaggacaggcaaaggcacagatatttaggcgagagttaagctacttctggcccttgcatgtcccttattcaggaatagtgggccccgacgactggcactccgactctcaactctggttttgggagaacatt

SEQ ID NO: 132486 - DNA, 719 bp, Homo Sapiens
catcatggtaacgtgaaagtttatttttgtctgaaagctttcataagtatttaaatcaacacagtaatcaactatttaattgctgcaatcggtcaaaatttacaaaagccacacacaaatttctctccttctacacgtagctccatacactgccccttgccaaacacccttccgggaaccaatcagcatgacattcctgggcagttaatgtgagaagcgagggcagggcaccgtccaggtggactttatccttcagggagggccgtatcctctcctcttacactctgtgtgtgtttaattttctaaagaaacaaccatttattcattagctatactcagccatcttctcttattttctaaacatgcccatttgacctggcagagaacgctgcagcttttgcaggttgataaaagatgtttcacttaatgaccactgggcgttttaactcctttcagccatgggctcctgcatccagctcatgatgctggtacgacaggttcttttacttcataaaaaggtggaggaaaccctaacattttcaaattcaaagtaaatgaaaacatttgccactgttgttccacataaaagtatctgcaaagaaaagcccatggagacgacctggacacatgtatttctagggaacagatgcttagttgagcatcaaggggcaggaagacacctttccctccttgttcctcgctgaccgatgaccctggac

SEQ ID NO: 132487 - DNA, 1037 bp, Homo Sapiens
  misc_feature (96)..(109): n is a, c, g, or t
  misc_feature (453)..(475): n is a, c, g, or t
  misc_feature (506)..(907): n is a, c, g, or t
  misc_feature (909)..(909): n is a, c, g, or t
  misc_feature (924)..(924): n is a, c, g, or t
ccttttcatagctaggaagttgccttaagatttctactccatatctgtcaacaatttttaaaatctgcatcttttccccccaatgcttgatgtacnnnnnnnnnnnnnnaaccacacagggtatccagactctagatactaaccttgacctacccctagtttccttatccctctggaatggattcttgtagtttgttttctatctttcatcactctcctaacaagcccgtggctgttgccataggaaggcagtgcagtttgcttttccacgtgcagaagcactcgctatagaatatatttatggtctatccgctactcagctcactcgagaaagagctgttagtacaagaactgccacgatgacataatttcttacagcatccttccacccttacagtgaaactcggggtaggtcaaggttagtatctagagtctggataccctgtgtggttnnnnnnnnnnnnnnnnnnnnnnngcctacagccgcgcctcgttccgaattcttnnnnnnnnnnnnnnnnnnnnnnnnnnnnnnnnnnnnnnnnnnnnnnnnnnnnnnnnnnnnnnnnnnnnnnnnnnnnnnnnnnnnnnnnnnnnnnnnnnnnnnnnnnnnnnnnnnnnnnnnnnnnnnnnnnnnnnnnnnnnnnnnnnnnnnnnnnnnnnnnnnnnnnnnnnnnnnnnnnnnnnnnnnnnnnnnnnnnnnnnnnnnnnnnnnnnnnnnnnnnnnnnnnnnnnnnnnnnnnnnnnnnnnnnnnnnnnnnnnnnnnnnnnnnnnnnnnnnnnnnnnnnnnnnnnnnnnnnnnnnnnnnnnnnnnnnnnnnnnnnnnnnnnnnnnnnnnnnnnnnnnnnnnnnnnnnnnnnnnnnnnnnnnnnnnnnnnnnnnnnnnnnnnnnnnnnnnnnnnnnnntnatgccattcataggncaaggacccgtaaaaagcggcttgctgccgtttttcataggctcggcccctgacgagatcaaaaatcgacgctcagtaaaagttgggataccgaaggactatagatacagggg

SEQ ID NO: 132488 - DNA, 951 bp, Homo Sapiens
tttactgagtctaagctcttttatttttaaaattctgataaaaatttactcaattacattttatacattaatatttagtgaatttgtccaaaaaggctatgtttaatttatgtgtaaaaataacaaaagatgtatcagtcagtctctggggcaataagaaagggaagaaaagccttgctagaaataataaatattctcacgcaaaagggccaggtgacataagaatactacaataatcaatatgttttctttgtatttacaataaaatccatctgttaacactgtgatagaaaaaataatcagtccacatcatgtaataaaaacaggctttgaggatgattatacctcttataataaaaacatacaaggatttctcacagctaaagtacttttcaactttgacaactaatgacagtcatgggtgaaggtaaaactgacagagtactttagatcagctatgtcctacagtcaaggaatcaagggcattacccatttaccaagcagcaaaaagcactttcatttttccagaactatttaaatacagtagttgccatgtgatcagttaattttactttgtgagttagataaagtaaagactaaattgggaaactgcaataagtaatcaaaagtagctccaaacacgaagccatcaatagaaacaaaaggcatttttctaggtgtatcatgcataaaaagaataattacataatattattaaatatattccttaatgaccagattaataaatgaggtaaaatttagtcattggaacaaataaactatatttaatcacttgtgttttgctgtcactgtttaaaataattaacttaatgtctaaaaactacatactcttgaatgtttgctttttagagccccttgtgggatattaaagagccataacaaattatctgaatataaattatcaataccaggctgggcacagtggctcat

SEQ ID NO: 132489 - DNA, 674 bp, Homo Sapiens
acacttgcttagagttttatttactatgacaattgctaaaaaacaaatatttccctactcaatttcttggagctaaatcaaggtttgctatgtttccagtaaaaacagaaagctttccggagtccatgatctggccatcgtgtcatggctaccactaagggtacagggatggaatgtccctttgtcgctccagcttattggagggtgggtggacaaatgtcgacatggccacttttgtgcagtatctaggaaatggcaaagaacattttttgagacaggattgattactggctcaagaggattcttgagaaatgttctgctcttcatgaaattcacagaaacgagacattttcatctggagcacattattctgtaacagtggtgcttcatctgtttgagttccatgagcaaaaactattccgtagaagtaactcttccatataattggaaatgctcaaaaatgccttcaaatttttaagtcattttataaaatgtaaatactcctcaatgtaccacccatgttctttcttttttaaatggggcctctcagatttggctgcacatcggatcacctagggagtttttggggccatggaggcccaggtcttgcttccagaaggtctgatgggtggccccagggtgtggtgtgggcatctggagttttaaatgctccc

SEQ ID NO: 132490 - DNA, 526 bp, Homo Sapiens
ggcacgaggatcatcccagaaatcccggaaactctagagccactgtcccttccagatgtgctgaggatctcggcagttctggaggacaccacagaccagctctctattctgaactacatcatgcccgttcagtacgaagggagacagagcatctgcgtgaaaagcagagaaatgaatctagaaggaacgaatctagacaaacttccaatggcctcaacaatcacaaaaatacccagtccgttaataactgaggaaggacccaacttgccagaaatcagacacagaggccggttcgctgtggagtttaacaaaatgcaggatcttgtcttcaaaaaacctacaaggcagaccatcatgactacggagacactgaagaaaattcagattgataggcagtttttcagcgatgtgattgcagataccattaaggagttgcaagattcggccacttacaacagtctcctgcaagctttgagcaaagagagggaaaacaaaatgcatttctatgacatcattgccagggagg

SEQ ID NO: 132491 - DNA, 368 bp, Homo Sapiens
tgagccaccacgcccagccctcctttctttttgaatagtcctggcaccgttgccaaagatgagttgaccatatatgcataggtttatttctgcatcagttccaatcatttatttatatgtctatccttatgccaataccacagttttggttattgtacctttttattgtttgaaatgagaaagtatgagtcctcgtattttattcaatattgttttggctattttggggccatttgcaatttattattaattttaggatcaatttgtcaatttcaacaaaaacattgtaaatttgaaagggattacattgcatccgtagaccaatttgtggagtactgccatcttaacaatattatactttccaatcc

SEQ ID NO: 132492 - DNA, 514 bp, Homo Sapiens
tttaaaggtttgctttttccacaaaatttgaatctttcaggctaggaatttggatttggatttcagaagggttttgggtgcctgagggagctatcagggttttgttggtaatttacatctgtgtaaaaagtgaaataacgttgtcgtatttactaatgaggatgtgtttctgacattccacagtattcctcagtgagcagttctgtgaggcatttccatcttatctctgtaatgagaacacctacatttttgtggagacattggttgtcatatcttatgtacccatgagtcaaagaactgtgtatgcccttgcccttcgttgactgcaaaccctaaggcaagaaggcctgtttggaccactccctgccaactttgttttatgtttctcacccaaacttttcttctcacatactcattcatcttttaaaagattgctatatagttattgtgtatatatttggtggcttatcttaaacctttttggagacaggtaggatatacattattcagaaaa

SEQ ID NO: 132493 - DNA, 1733 bp, Homo Sapiens
ggaattagaaatatttattcagaatataagaatgtttgtaaaatattataaatgtctctgtataaataaatggagtttttaaaaaacaattctatatcaaataacgcaaagtagctattttacagcagctaaaactaaaggcatctggaaacatttaaagaatacaagtggagaatctaaaaaattacaaggtatagtacagtgttaagtagcaattttaaaatgagactttcagtacaaacagtagaacaatactgacaaatgcaaacttagtcacatgtgctttaataactgacaatacattcaagcaggtttttctaattcaagcgtatagcacatattcaaataataggaaacaaatctcatgcaaagtaaataaatcttgatgtctaaaaactgattagaactagaaaagaagtggacatgttttattatctttgcattacgttctaacaaaagcagattatcaggggctcttactcacttgccattcctgacatgagcactataagtgaatactatgagttctacaaacagaacatttttccacatgaatttgacttgcagaaggtgcaaaagggaatggtagaaccagaattactaagtacggcatcagtgtgaatgtgggggaaattttgtgtataacttgctttgttctgctgagctgatatttcacctgattagcagatgaatgactgtggaaagatgaagtactagtcaaggatgtggttttacatagcagttgctatttccgggactgaatgatttcttcctcttggtcacatgcaaaatctcacccagatgtaatgtgataaacagacagtttacccagtgtaacctttaagcaaaaatgtatggtgatctgcatgtgaaactgtctttctctacacaggtattagcaaaacatgaatacatgaacagctgctatcaacttgtatactttttttccacttgtttatattttaacagccactgagagatcagtgatgctgtggtgacagcagtcagcattatttcttagagaatacaaatgtattaagttagagtaatttcaggtgtgttaaacaggagatgcttctgaaggccacaagtttggagcttactttaacctgacctacatgaacataagatttgtaggatgtggataaactttaagaactggatagtgaaggcgtaacttttgttttgtaaccagttacgcctcttctgtaaactctctaagagtgctcaaaggtgaatcaaacttgtatatcattccttgtcaaataggctgttcccactggataagaaaatttgctgtatgttttcctgaaaaattttatagtgttctacaaagccatcaccttctgcagaaaaaaaatgttacttatgctccacctccccagccctcactaaaaactttggtagccctatggcggtaccctaattaaggtcagtgcagaaatctcaaccattacagaagtctcttactattttggctctcaaaatactctaactagtagctctgtttgctgaatctagaagtaggtagagctgtaaatagtttaatagaatgattgggacatactcccaattaagaatttgcaaattgtttaaagccttatggaggaaaggacactttcagagatgtttattttttaatagtcatcttgatatgttatcactttaaagcttgataatcgacccggccgtaatggccgaattcccgggcatatgtccggtaccgtcgactg

SEQ ID NO: 132494 - DNA, 588 bp, Homo Sapiens; identical to SEQ ID NO: 119567

SEQ ID NO: 132495 - DNA, 594 bp, Homo Sapiens
  misc_feature (358)..(414): n is a, c, g, or t
  misc_feature (497)..(548): n is a, c, g, or t
ttttttcaagatgtaacaaagatttaatataaagcataaaagttttaagcaaaatcatggaggtatttttattaccttgtggggaaggtcattctacgcacgtcgggaaaaccaggaattataaaatcaaagagattaagtttacatcataaaacttaacttttataacaaaaaaactataaataaggttaaaagactaataataacatggtaaaaaatttgcaacacaagacaaagaaataatgtcctcaatatacatagctcttaaacatcaagattcagtataatgcaaaactatacagccattaaaaacaatacaaatctatatctatggtcatgtacaaatgttctcaggatnnnnnnnnnnnnnnnnnnnnnnnnnnnnnnnnnnnnnnnnnnnnnnnnnnnnnnnnnggtgtacatagttgtatataagcatatgtaaatatgcacagagttgtctgaaagtaaatcttaactggtcattttggggtagnnnnnnnnnnnnnnnnnnnnnnnnnnnnnnnnnnnnnnnnnnnnnnnnnnnnagaaagaaatatattttccaaaaaaagttttagaaatgtttgtgta

SEQ ID NO: 132496 - DNA, 798 bp, Homo Sapiens
tggtttcaagcttataaggtatgtgaagattacataaacatagcataatgacggtacagtgcagtggtccccaacctttttggcaccagggaccggtttcatggaagacaatttttccatggccagataggggagatggtttcggggtgaatctgttccacctcagatcatcaggcattagttagattcgcataaggagtacacaacctagatccttgcatgtgcagttgacaatagggtttgtgctcctgtgagcatctaatgctgcagttgatctgacaggaggcggagctcaggcagtaatgctctttgcccgcctgctgctcacctcctgctgtgcagctaggtttctagcaggccacagaccagaaccagtccgcagcccgggggttggggacccctggtatagtactttttaaagttctatcctggaatgggatttacggaaggcagaaccattttcctgcaaaccataaaacctgataggagtgttttcccttgtccctcttagttgtgttctatatgtatttatatgctttactttatcttacttcatcctcatgataacctgcaaggtctttctcccacattttgcagaaaagaagcccagggagatgagctagtatggccagcatctcacagtgagaaagtgtaccagggctagaacctaggtcttgagactttgtgtcttcagatgctgcatcatgtgactttcccacagtatagcaacccctaagaagaatatattggtgcacttacaaatgtggcttgagtcattaaatgcttgcttatttgccc

SEQ ID NO: 132497 - DNA, 1703 bp, Homo Sapiens
  misc_feature (618)..(638): n is a, c, g, or t
ttttgtttgttaatactttattagtattttctaatggacagaacacaaaccaaataaattttttaatccttttagttgaataaaaataactgacattctgattgttgtttcttctttgttaaagaaagaaagtattgatagaacagttaggcacacagttgacacttactgtacaatgatatgcacacattatcttttaacaattataatcctaaaatgtgctcttcatattttttcccttgtaatacaggagccatgctcctaaaagcaaaatttactactaataaaagaattttccaaggagtgacaaaaagacttttaaaacaagtccttaaataaaaggatgcagcaacaacggaatgtaagttgttggattaagaagacagtttaagctacatctcaaaaaattaaaaattcatttatcttacaattactcaaatacacatgcattaaatgaaaatattgcacaaaattaaaattttagattgtgaaatttatatcattcttaatttttataaaaattggtacactttctggtagcacttaactgattgatttttcttcccaaataccagcagcacaaacttaaaatgaacaaactgaaatattcaagaaagnnnnnnnnnnnnnnnnnnnnnaaaaaaaattaaggctaaccaagtgcatccattggtcaatggcacaattgatttcagcaactatttggaatatcctaattataggaaatgcccatctaagtgatatatttaaataatacaatcaattttttaaggtgaataaactatgatggtttctaaatagtgtacatgttacctgaaaaatcagaaaacacaaagaatgattaatttcgaaagttcttgcctaaaggcaccactgacttaaaaaacattcaaaatcaaataccagaagacataaagcctcttcatgtatatattcatatatgcaataaatgcattaaatgtaactttattaaacatagtacactgtacttgacttatggttaaatattttacacacagcttgaccaagtcattcaaaaagttatctctaattttagcatgaccacagctctttctgatgtaaaagacagatgtgcatagagaaggtgcaccaccatttacaaagactatcatttgacattttctgcttctgaaatataaactcttctaaacaaaaattactttaaaaatccatttactcaaatagtttttggtatgattgcagttatcttgcagggctctattttgaaaatttgcaatattacatgacctttatttccctaattgatggccagtgctcctcacattatatagaaatgctttttcacatgtacacgttagggtcttacatgaattattctgtatactgttagatttattcatgtcaaaaatatatttgaaatgggcagaggcatatatgaaaatcactgcacttatggccatgctgatgcttcctacagacatgtttcatgtttcaaacattttcacttttaaagcctggggctcagggaggggccaaggcagggagacaccctgagaagaagaatactatttcttccaccagagccactaaggatcttttctcacttgcaagttgcaatgaaagggatttcattttatggtattctgaagacatgcaacatatgctgaatatatgcatactataagtatgcacaacagcattattaataaatatgattattt

SEQ ID NO: 132498 - DNA, 311 bp, Homo Sapiens
  misc_feature (88)..(145): n is a, c, g, or t
tttattttaaattttattttaagagatagagtcttgctgtcacccaggctagagtgcagtggtgagtcatggctcactgcagctttgnnnnnnnnnnnnnnnnnnnnnnnnnnnnnnnnnnnnnnnnnnnnnnnnnnnnnnnnnntgtgagccaccacaactggccttcaaaattaataaaggcttaagaattgctttgttgtgctgtgcttgcttcagcatcacatataaataaaaattggaatgagacagagaaaattagcacggcctctgtgcaaagatgacacataaattcataaagtgttcatatt

SEQ ID NO: 132499 - DNA, 1065 bp, Homo Sapiens
  misc_feature (224)..(431): n is a, c, g, or t
  misc_feature (458)..(476): n is a, c, g, or t
  misc_feature (505)..(927): n is a, c, g, or t
  misc_feature (959)..(959): n is a, c, g, or t
  misc_feature (1020)..(1020): n is a, c, g, or t
  misc_feature (1037)..(1037): n is a, c, g, or t
atcttaaaaatatatgcaaatcaaaatatattcatgttcattttaatattaagggaatttccatttccaaagcatcaccgcccatcacagtagttccacggatcccagcttgagaactattaaatgaaaaaccaaaaaatgcaaatagcaggatagaaaagttgtaggtacattaaaatggttacacctaccaccaccactggggaatcctgtaagatgttaannnnnnnnnnnnnnnnnnnnnnnnnnnnnnnnnnnnnnnnnnnnnnnnnnnnnnnnnnnnnnnnnnnnnnnnnnnnnnnnnnnnnnnnnnnnnnnnnnnnnnnnnnnnnnnnnnnnnnnnnnnnnnnnnnnnnnnnnnnnnnnnnnnnnnnnnnnnnnnnnnnnnnnnnnnnnnnnnnnnnnnnnnnnnnnnnnnnnnnnnnnnnnnncctccgggcaagagtgaggctgtctcnnnnnnnnnnnnnnnnnnngccaacagccgcctcgttccgaattcttnnnnnnnnnnnnnnnnnnnnnnnnnnnnnnnnnnnnnnnnnnnnnnnnnnnnnnnnnnnnnnnnnnnnnnnnnnnnnnnnnnnnnnnnnnnnnnnnnnnnnnnnnnnnnnnnnnnnnnnnnnnnnnnnnnnnnnnnnnnnnnnnnnnnnnnnnnnnnnnnnnnnnnnnnnnnnnnnnnnnnnnnnnnnnnnnnnnnnnnnnnnnnnnnnnnnnnnnnnnnnnnnnnnnnnnnnnnnnnnnnnnnnnnnnnnnnnnnnnnnnnnnnnnnnnnnnnnnnnnnnnnnnnnnnnnnnnnnnnnnnnnnnnnnnnnnnnnnnnnnnnnnnnnnnnnnnnnnnnnnnnnnnnnnnnnnnnnnnnnnnnnnnnnnnnnnnnnnnnnnnnnnnnnnnnnnnnnnnnnnnnnnnnnnnnnnnnnnnnnnnnncgtaaaaggcgcgttgctggcgttttccatangctcgccccctgacgagatcacaaatcgacgtcaatcagaggtgcgaaccgacagctatangaacaggcgtcccctgnagtcctcgtgggtcctgttcgactgcgg

SEQ ID NO: 132500 - DNA, 899 bp, Homo Sapiens
  misc_feature (834)..(842): n is a, c, g, or t
  misc_feature (888)..(888): n is a, c, g, or t
atttaaagaggtcatcatcaagttttctgttttatttaagattttagttttaattctgaagaaagaggtacatttccttgtttttagttttagcgtcaggttataaccaggtttctgttttcttttctcctgtcttttcaatactgcacaaacgtccagaaactacagggttaagtaaaagctgcaggcaaggaggtcagagatttgctcccgatggtgatcagatggccccagagcagtgctatctcagagtgccctcgtcaggtgaatttatggtaaaacaaaaaagattccgacagaggagaaggactgaagaaatgacttacatttcagctcttatattattaataggtattaaatctgtgaatacttttttctttaaaacatttcaatttactttaaatctaaagccaaaaaatttttctcctttaaaaaaattacttctcacctccttatgaactctttagcaatcggccagttactactacagatgaatttgtctttccatcaacttccaatacattcttttgcttaatgacacaatcaagtccttgccatcaacttgccaaaagaattaaaaattaatttaaattaaaagcattttccctgcaataatgataagctgaatacaagatggatgctaggaccactgctttcccccatgcatttagcaatctcacgtaaatgaacctggttttcaaacttctgcagttgataatgcatttacttgagctttcctatagattaatcgtcattttctgctaagcagattatgtcattattatgcgcaacagacaaacaataattttctaagtattgagactgccctttgannnnnnnnnctctccttaaaaaggccaatttagaaacattcaacagaatccaacnaatgctggatc

SEQ ID NO: 132501 - DNA, 752 bp, Homo Sapiens
tgaccataatagctacatgcttaactgagttaaaaacgtagtaggttaaaggaattgagccttaggcttaatgagttaatggggtgcggggagaatgctgcttcctcactcctgaaatttccttccatgtaaggggcctctatttggtgcaaagcaccagaactctttccccgctttacttgccccttcaatgataaggagagatcttgctggtgatttgggagatgaattgggcaagtataactcagtccgtgtctctctctatcttgagagccagtgaagccaaccagggagtgtgatactgatctctctgctacaagaggcctgcctccatgtgagtagacctacagttttccagaactgcctgctgctgaatgggttaagtctaattccagtgctcaatattacgaagcccgctttcgtgaagatataagccatgtcttccaacattggctttgtcaatccatgtgattagatatgggcaggtgccgggtgggcaagtggtgctattcattagtcttcctcaaaccccagcacccctctgaagaaagcaatcttttcttatttatccctgtatcaccacaacatgatatgtttgcgataaatgtttattgcatggatgtaattgagataaatttacttttctgtccttggccaagggggatgaactagttgatccctaacatgtctctctgtgtaaatatcctctgacacccttaagctgtctcaggtataaattatgaatactttct

SEQ ID NO: 132502 - DNA, 1230 bp, Homo Sapiens
  misc_feature (30)..(30): n is a, c, g, or t
  misc_feature (190)..(190): n is a, c, g, or t
aggcggccggcatgcacgtccaggaggtcntggacagagtacatctcgtcgttctccacaaaatgctgccgatcctggagctgcagcagcagacgagcctccatggcctccctgcaggtgatgaagtacggcttcatgagcaggatgtcctggcgcagcttgcgaatctccaccagctcctccacgtagntgaacagcagagggttgatctcccggagcctgagtacgggccgagacaccatcagcgccaggtagcgcatgctgcagcgagaaacctttcgaggctcaaagtcccagttgtgtacaacgcgtgcagggatcacagccaggtcgttccagtggcagtggctgcagtagtactggccggtgtagtcgcactgcctggcctcactgggcacaccccgcagagagatgggcgcccggcactcggcacagcggtaatcctggctgtccagccctgtctcagggcagatgttcagttcgtattcagcttggtggctgactttggagctcacacagggcttggagatgaggttcaagcacttactgtgacagcggtaataacaccctgtgcaggtgtaccaggtctgaatgagcccccagatgatggtgttacacttgtcacaggtctgcttgacgctcttgctcttctccttgtaaaagcggtgctcaaggagcactcggatgtttggctcatcctcattggggtccttcagctcctggagcttcagccggaggtggatgagtcgcaccacggcatccttctgcttctccgactgctcgggcagctccagaatcacctgcttgcactcctcgatcgcctgccgcagctgctggacgtcagaggccaggaacagacccacagggcgggagaagtggtcctcagacaggccgagatccatcacgcgttcagggcagcggaattccggctccccagggggcagctcaggcagggcctcttcaggagtgacgtccgggacctcctccccagggccctgctcatgctgtctcggcccagactgcttgttgaaggggttgaggtgggcctgccggaaacgggccagcttctcatcatattccatagcatcccacctgcatcgcctgccagggcccaggggctcgcagggacaggatggccattcctctagggctgctggccacggaagcctggccgtgggttcggcacccctcgtgccgaattcggcgcgccgtcgacttcatactctctaa

SEQ ID NO: 132503 - DNA, 1032 bp, Homo Sapiens
  misc_feature (719)..(719): n is a, c, g, or t
  misc_feature (795)..(795): n is a, c, g, or t
  misc_feature (805)..(805): n is a, c, g, or t
  misc_feature (925)..(925): n is a, c, g, or t
  misc_feature (933)..(933): n is a, c, g, or t
  misc_feature (974)..(975): n is a, c, g, or t
  misc_feature (977)..(977): n is a, c, g, or t
cattaaaaaacagtttattagcatctgttcccccagtgcaagtgaagactgactccctctccgggagccctggactccccacctgagctcctggggagctgctctgtagtgtgcccctatcttggggcaatgtccttgctcatctgactccagtcccattgctcctggcacagggctaagctccacctcgagatgccatagggatggtctctcctaagtgactgtcacctccagcgtctgagaagaagcccccatccccaggggctggggccacatccacctggatgacaccgtgcacctgggagagctgtgggctgtccaagctggcaatgagctggcgggggcctggtcgcacaggcacaaacgactggcgcagtgtcactgtttcattgcctccaatgtccccaacgttgaggatcttgggcctctgtaacccagagccttcgagccggaagacgacattggtgagggtgacgggaagggggttcttgaagacaatctgtacttcacactcctggccaaccactgctgctcccagtaacgtgagggagaggtctggggtgcgcagacggaaggtgtgctgcttggccagcacctgcccgctctccttgacgtggcatggtcacacggtccgaggcccctggtgccagctccacttccttcttggtctccttgaagatggtccactgacaccagtatagaaagtgactgagaggtanaggtgcagtttcactgtgcggcggctgctgctgtgattgatcagcatcacagagaccatcagattctgccccatcnacgcgtcctnggtgctccactgcatggcacatcctccgctgagccccggtggcataacattgggttttgctgcgtgggctgctgctgtctctactgctttccgctctgcgtctgagcctctgggtgctanagaggtangtgatgtctcccgcatgttgagctgatggctttgtgacatnnantgtgcgatggcttcccctccacataacatctttgagtgcatcatcctgcgctgcc

SEQ ID NO: 132504 - DNA, 698 bp, Homo Sapiens
  misc_feature (631)..(631): n is a, c, g, or t
cattttaataaatataattttaattaacaataacagcttttggacaagaggttgttaagaaataataatagtaatagctaaaattatgggcccttactaaaagcaagacactattcagaacttcctatgagtcatatcatagaacactcaatacaacctaggcattaaatgtgtttatgaccctattttacatatataaggatataagactcacagaaatcaaataagttgcccaacggtacaaggcaagtgatgaaggtagaaattgaacttagctggatccaaaaccagacctcttaacctctacaccatatgctaaccacctcacagctgttacataacttctgggtcactgaaagaactttacattatgttcttgcaatgacgcagcaacgactcataggattaaatgcctggcccaagaacagagaaccatttaatggtgggctggagccagaatccaggttatctcatggccaaaggcagtacttgcttcactccactgatctgcagttcttagattatgagttaagatttcttttgggatagcatggcctagcacttgggaattaggtggaggctgagatgtttctgactagtcagttggagagcatctatttcacgcatccanaatgtgcacctgcagtaggctcttccctcttcttcttgggctgtagattcctccactggtcacttca

SEQ ID NO: 132505 - DNA, 1175 bp, Homo Sapiens
  misc_feature (583)..(669): n is a, c, g, or t
  misc_feature (902)..(903): n is a, c, g, or t
  misc_feature (905)..(905): n is a, c, g, or t
ggattacaggcatgagctgcattgtgcttttaatgatctaaagacactgattagcttctcaactagttctctttctaaaagatcaattttatacaaataagttttctaaatgtaataaagtctgttttctttctccagggaattaagaacaacattgtgctgcccttattagttcctaattacagattaaaaatctgtatctttgaactctagatttacataaatcctggcttccctgcacattttgcccctgtaaattggaatacatgatgattgaaccatctgttatgagaatattacatttcctatttacacaattgtttgtgacagagtaaaaaccattttcatagtatatgttggatcactgttgtcttcatatttctaaaataaatgaattaaaaaatttaaattcttagatgcttatctctatcatagctcagaatgcaacttcaatacccccattcttttatatttccagatttcttttaattaagatataatgaacaaattaagttaaatgaagtctgtattttcatgcaaatatattagtattcattaatatacatttattctttgcaaatannnnnnnnnnnnnnnnnnnnnnnnnnnnnnnnnnnnnnnnnnnnnnnnnnnnnnnnnnnnnnnnnnnnnnnnnnnnnnnnnnnnnnngcactgtaaaataatatgtaaaggacttggaatgttaaaaataaccattcatcattttgctttatattacatctaatatttcctgaaacattttgtaatacccacatggaaagtggagaaagagaaaccttgtgctttttataaacattgcccaggagaataatggttaaacaaatctgttcaaatacatattttaattttttttacaaataaaagttttacattaacatacnnanatcacacgaccaaccccccccattaaaccttgtccggcccgcctcgggccctcgaaaaaacctttctagaaccatttcgtttggccgcgccgggccccgttaaggtaaactggaacattgggccaatacctgcttcccctagggaaaatcccgggccatggacatagtggcctgggaattctcccccaattaaaaaaaccccccgggcggggtaacccgcaagcgcttttctgaaaccaaatctccagaatggggaagtttcctcgaaga

SEQ ID NO: 132506 - DNA, 268 bp, Homo Sapiens
catcttctatttgttatatatactatttttataccattaattgctatcttttcaaaacattataatatttttaaaaagctactaaagtgaagatacaacttattttaaagctaatttcatttaaatagtcactgaacattagcagactggtatcatgcatttatttatttaaaatgttttgaaaaataaatgttttgaatgaggatgcatttttgagggtaaaatactgcaagcaagaatgcttctcttccatgtcactgtaaggggg

SEQ ID NO: 132507 - DNA, 646 bp, Homo Sapiens
gcactagagaaagaatacatttattatagtttcctgatcattctttgaagtttgacatggttgtttcttccactaggaatgtcttttctctaatttacttgattaacacgatctttccttcaaaaagcgtgaaaaggcctcaactcctctcctagaagcctttgctaatatagcaaggcagggttgaaggccctcccctcaacccagcctgagccccagtagtgtctgtctcatttcattttagttttctggcccctcaacttttgagaaagtaatggacagtgaacatatttattcatctgtgtattccatgtgcctagaccagggcctagtacataatgggcaatcagtaacttttgttgaatgaatggtaaatgcaatagagcccccatacggttaaattttattaagatctcacagtcctctaaatatataactattttctctgtgtctagcttgttccctctcccctcgtgttgaattttaaaacagtcctacgagaagacacctaagactaagagaagcacaacctgatataatagttttggtcagtgtggaatgcagctgccttcttgctttctgaacaaagtgatgccaaccaagtataacagccctatattctttctgcttatcagtaggttttgag

SEQ ID NO: 132508 - DNA, 1321 bp, Homo Sapiens
  misc_feature (135)..(181): n is a, c, g, or t
  misc_feature (183)..(198): n is a, c, g, or t
  misc_feature (1204)..(1229): n is a, c, g, or t
ccgggaattttctcttagggaaaaccagggttatgggcccactgtttcccttttaccctttgggggggccgcggcggccaaaaaggaaatggttttagaaaaatttttccaagggcccgaggcggcccgacaagnnnnnnnnnnnnnnnnnnnnnnnnnnnnnnnnnnnnnnnnnnnnnnngnnnnnnnnnnnnnnnnttttacaggtacacaatttaatatttattatatgcattttatatacattatttttcaacagctgtatgtttgctatgtggtacaatcttaaaaatttgctgattcatagtttgtaaaacaaaaaccttacaaaactcatcaaaactcgcaaactgatcagaaaagtttctcggaagactagaaaaaatactttattgtcttaatcatgcattacacaaacaaaatctttagttacaccataaaattaagcacatctaaaaaaataaaacagggataactagtcaaaacacagcagatttctgtatcctgattcaactatttttgtatcctatttgtaatgcaaataaaactttactccaaatatttttaaacaagttagttttgtttggaatcatggtaaaccaagatatatatcttagggggaaccaccttggtttgtaatttaaactataaaatactccatttttagtctattttagactattcaaagagttccaaaatagatatacaggttcctttagcacattaataaaaggatataaagaccaacaaaaagtgaaataaataataggccattagcaagatggataatccttgataaataaacttgtaaatacagtaagatgtacaaaatatcacatagtgataggatgccaagattagtttttttctttaagagttcatttggagtactaaaccccactgtttcattttaatacacttaatagtccttggtttatgaagacatttatgtgatgatgaaagttatttagcatctttatggaaggacttagctgagctgtattaggcacaaagaaggaaagaaagtggttacagggcaacgggtcagtgagatctctgtgttttagggttgtataatgcagaaaaacttcaataccaatcttgagcactgttgtgacaggctaaatatataaaaagacttataaaaactagaattttatcccaacattttgtgcaactaatgctaaaatattttaagttaaannnnnnnnnnnnnnnnnnnnnnnnnnaaagcaaaataagtttaaaagggaatctgtggcattcaaccgataaacagaagatcactaagagatgaaaaaaagcctacagccgcggccgc

SEQ ID NO: 132509 - DNA, 605 bp, Homo Sapiens
gcttttggtctaagtatcagattcttttattgagctatggaatttgcatttttgtacatttagtaggcatggttagaactcttaaggttttaatccacattatctcctctttcctgagtttctaagagccatgattatgaagcctcagcagtgtttttaacaaagtacactgtaaattgtaaccagaaggcagcggctttaaaggagtgcttatttgcctaaatggctgttgacatacttaatagttttgtatctgattctagtatgctaaagcatttcagtattatgagaatacaatttacacactggatccccttgtactttttctttcagttgtcaaaatgttaccattattgctgggattctaagaaatctctacaaatgcctctgatgacatcagaaacaattggttctaatcctgtgaactctcttgtgaagaaagcatgagactccttcggtttagaagccatatctttcaggtcatccagaggtgcccaagccacaccaacagagaagatagtgattcctgcatcatgtgcagcagctgcagggccttggacatcatcataggactgcccatctgtgaccattactaggaagttctt

SEQ ID NO: 132510 - DNA, 1103 bp, Homo Sapiens
tttttggactctgtgtgctgccttaggggttaggaatgtggtgctcttgttgggggaagtgagctccaagagtagctttttttcatctcttagtgatcttctgtttatcggttgaatgccacagattcccttttaaacttattttgctgcatcatgtgcagcagctgcagggccttggacatcatcataggactgcccatctgtgacaattactaggaagttcttgttggggctctcccttatagggccaaacacatttctaacagtgaaggaaatggcatcaccagtagctgttccaccactcatatagcggatgtttctgatgacagctaggacattctctttggtgctatagtcagtgaaactgaactccgtgcgctgatcataagtaaactgtacagcagctatcttggcaccaatgtccgagatttcaaaagtcttggctatgttggaaacaaattcaagcatgaggcggaaattgctatctccaacactgctggagccatcaattataaaggcaatgttcagctgagttataacaggtcttgctgcacatcatttggttcatgagtgcacagcttctgtaccagaggctttacgtattttgtggtgccaaaccagttgggcatgtggtaagagaagaagccattattccgacagacagccttgtcaacaaatgtgacatcctgaaccatccccagttcttcagggataggcttggccacagaaactataaatacattgacaccgaactctctggccacgatgcctgcttcctcgatgtcatcagaaggccaaccatcaataaataccaccaccactttggggatcccttttcttactccagcatctaccgtgaagaatttctgagcagtatgcttcaaggcttttcctgtattggaattaccccctctgaaacctacttcctttatggcaaacaaaacatctttggctgatgtaaagtttttcaagtaaaattctattttgggatgttcactggcttgaacaaggcccacatgtggtccttctgttccaattcccacctcgtgccgaattcgccacccaggcctcgctaccttaaaccgttagagttactgcacggt

SEQ ID NO: 132511 - DNA, 334 bp, Homo Sapiens
cttaaggcaggtctggtttggacgactttgttttgtctcccagtattgaaggcttttactctggacttgaatcctcgcctttggtttttgttcagaggaaagcgttcctctcccctgcgcaggatcgctctgtttctcagtaaacatgacgagggggtttagcactttttaagtacatataagctggtgactctagaagggtacagatttggagaatgcctgcgccggtcctattcttttttcctggggtttctggattttagtcttttaagtggatcctcccgtcggattactagaatcctgcgctcactgcatgcacacagtttcaattaaa

SEQ ID NO: 132512 - DNA, 1011 bp, Homo Sapiens
  misc_feature (569)..(569): n is a, c, g, or t
  misc_feature (577)..(577): n is a, c, g, or t
  misc_feature (606)..(606): n is a, c, g, or t
  misc_feature (677)..(677): n is a, c, g, or t
  misc_feature (682)..(682): n is a, c, g, or t
  misc_feature (721)..(721): n is a, c, g, or t
  misc_feature (808)..(809): n is a, c, g, or t
  misc_feature (812)..(812): n is a, c, g, or t
  misc_feature (910)..(910): n is a, c, g, or t
gttttgtattaaaatattttatattaatcattcaaacttcattttatacaacgagtgcatacaccactggggggagtgtctgactgatgcgtgggagggcgggcggggatgtctgcagctatgagtagggaggaggcggggaagccctgggtgcttcctctcctcgactgaccgctgtgtgttcgtccccagaggaagagcgggaggcagtcagccccgggggggatggcacagtggagagacggacctgcagaagtggtggccaaggcctctgtaagggcttccccaggagatgtgacctttccaggtcttgcagccgagtctgctcaccctgaacaagcccccgagtcccggtccttggagtacggtggcgacggtgtgtgtgtgtatatatagacatctgcactgccccctctctggaacccgcccgtgccctgtcccgcctacacacggccctcgcctaggcggcaggcatgtcagccttgctgagcgcgatggccagttccaggtcctcctgctcctgccgccgcagccgcgccagcctctcctgttccgccttctcgctctcncgcttggnccacgccagctgctgctcctcattgccanatttggaacgggtcgccgctgtcagccccgagtggctggaatggatcgggggcctcgggaaagtctgcggnaccangctggcttacaggtgtacttttaccgctgggcggtttangccgtggaggagcatgtttcttcggaggcagagcaggagtgtcctgtttacttttaaggggtcatctgagaatcctgcccctcccanngangatgtgaatgggcactaggtgggggcttggacatctggctgaattccgcatagcttcaccactattgagggaccacttccgaagggatctaggtccangggatctgatcttttgggagaactggaggtgaaaggatactggatcaaggggcagctccaagtaggaggttttcgtatggtccagtaatctctgccgatct

SEQ ID NO: 132513 - DNA, 1123 bp, Homo Sapiens
  misc_feature (1)..(1): n is a, c, g, or t
  misc_feature (65)..(401): n is a, c, g, or t
  misc_feature (1111)..(1111): n is a, c, g, or t
ntgtctttttcatgagttatttacagggagatttattccaatttttgaaacaacacagaatacannnnnnnnnnnnnnnnnnnnnnnnnnnnnnnnnnnnnnnnnnnnnnnnnnnnnnnnnnnnnnnnnnnnnnnnnnnnnnnnnnnnnnnnnnnnnnnnnnnnnnnnnnnnnnnnnnnnnnnnnnnnnnnnnnnnnnnnnnnnnnnnnnnnnnnnnnnnnnnnnnnnnnnnnnnnnnnnnnnnnnnnnnnnnnnnnnnnnnnnnnnnnnnnnnnnnnnnnnnnnnnnnnnnnnnnnnnnnnnnnnnnnnnnnnnnnnnnnnnnnnnnnnnnnnnnnnnnnnnnnnnnnnnnnnnnnnnnnnnnnnnnnnnnnnnnnnnnnnnnnnnnnnnnnnnnnnnnngagaacaatgcattttaaatatatttcctgaaataatattccttagaaaagatacagggtatttaattacctagattttaacaaaatattctttatagaaataattatagtctttaccacagagtcaccaaatctgtacccaatcaaaacagagtcaaatagaccagctctcattcaacttcattaggaaacaccaatttcacatagtacttctcttgatgtacagcagcaacctctgctggagaaaaaagggtatacttctaataacaaagcactgagctcaaacctgttttgaacaggaagaactgaaagttagatttctttcatttcctgttaaaccaacacctaagttaaaattattttcaaggtcttaaagacgcacgggccttatcaagtatatcctttctgatttttggataagttggatgtgcttcaagaacctggtgacatatgtcaattgaatccacatatctttttgcttttaagtaattaaatgccagtttgtatcctactgccggatttgtccgattgctatatttccatgccatctcatagttcaaggcagcatctgtatatgcttgctctttttccataatgtatcccatatattcataagctttgcagcaagatctattatgacgcaggcaccgttttaacaggtcttctggcatgtcatattttgctgattgaatgtaaatatcagcaagtancagccaactctt

SEQ ID NO: 132514 - DNA, 582 bp, Homo Sapiens
  misc_feature (172)..(230): n is a, c, g, or t
gtaggaagaggtatattttgtctttttttaattattttagcattctgtacactgacaacgaggtaaaagaaaatgactgaaacttacaagtgaaagaacatttcacaattaaatccacaattgtatacatttatcttactcacatgtcagtgaaaaatcaccaactattatnnnnnnnnnnnnnnnnnnnnnnnnnnnnnnnnnnnnnnnnnnnnnnnnnnnnnnnnnnntatatccaactatgaaaagcgttgctctcttgggtgtcttcacatcccgtctcttttgtgtactgatgtacaacacattgtttcctcggataaatgcatccccatacttattcttcagttgtccatttacatattcttctgtctgctccagggctatattcatgtagccatccaggcaagccaggacccctcgataatccactccagaatttaattttaccacaactggtcgtccgatgatttgctttaagaagtcactaggggtttgcttccgaagactcattttaacaatcctcgccggcgggaaccagaaccctcactccaggcgccccacgagcccggccgccgcgga

SEQ ID NO: 132515 - DNA, 732 bp, Homo Sapiens
  misc_feature (330)..(356): n is a, c, g, or t
gttttccctccaaaatgttttaattatatgtccatccaatatataaaatatatgcatcattttagctggataagaaaagcaagtcaaatgaaatgacccttctcgaaacttaagttaaataatcttgtaggaagaggtatattttgtctttttttaattattttagcattctgtacactgacaacgaggtaaaagaaaatgactgaaacttacaagtgaaagaacatttcacaattaaatccacaattgtatacatttatcttactcacatgtcagtgaaaaatcaccaactattataaaaagaggacaaattgtatcacaaaagaagcnnnnnnnnnnnnnnnnnnnnnnnnnnntatatccaactatgaaaagcgttgctctcttggtgtcttcacatccgtctcttctgtgtactgatgtacaacacattgtttcctcggataaatgcatccccatacttattcttcagttgtccatttacatattcttctgtctgctccagggctatattcatgtagccatccaggcaagccaggacccctcgataatccactccagaatttaattttaccacaactggtcgtccgatgatttgctttaagaagtcactaggggtttgcttccgaagactcattttaacaatcctcgccggcgggaaccagaaccctcactccaggcgccccacgagcccggccgccgcggatgatcccagccaaaaccgaaagcccc

SEQ ID NO: 132516 - DNA, 508 bp, Homo Sapiens
ggtgggttttgattatttggggccgaatgcacacctaagtgatacagcactatccagtgacaatgagattgaaaaggatgaggggcacttagtgaaaaggaagggacaaagactaaagagaaagggcaagtgggataatcttacttacacagatcgtatggtggacctaatacatagcttaattccttcccgcagaaaagaccgaaatcctgactaaaagagtaaatgtgtcgttaagttcaaatacaaagatgcccagtgcccaaattggctatataaaatttaatgctgtcctcctgtgctgtgattgctagtatgaagtgcatgcttatacattacaactggatgttttgcatcctacagagaagataatggaacagatttagaatcattttagtatttctcttgcaatccatttggaggggattccaactgacaacgcatatgcctcatcctcttatcagatacggctgtggagaggatgaggcatatgcgttgtcctcgtgcc

SEQ ID NO: 132517 - DNA, 604 bp, Homo Sapiens
gcaactgcaacatacaaaaattttaattatttttgcaaaaagaaagccaactattcgccttggaaataataatgaagtacaaatagctctgactctgcatttggacaaggatgaaccatgatagatatttagaaagggttttaaatcatgtgtatgttggctacagagtaaaaggaacagagaagactcaagctattgtcaggtgtgtatgtgtcatcagcacacactgggggaggagagtcctcactaagtgccacaacccctgatagctgtcagtctctcatgaagcaccatgatctggcatggactcccaaatgccacttgagagaaggtcttcacagcagactgtgcatctgtgtcacaaaacacggctgcaatgaacaacagtgttcattttttgcccttccaaatgtattcttgtgtatgatcgaagcaaagaaagttgaggatggagaacacgagccttcaccatcagttctgctgctgaagccttctccaacagccctaaggtccgagagcctgatgaacttctgcactgatccgtgtatcattctggaacttggtggccagatcccaaacaaatgagaagagttactattccaag

SEQ ID NO: 132518 - DNA, 882 bp, Homo Sapiens
aaaagcctaatctcctttattcatcacaaagcttttgcatagaccttttaaatatacaaaacactggccagaactctgcttacagactaccatcttccattatcaccatatctttagttaaaatagtagccatattcacaggagagacaagtgaaaaggggtgaggttctgacaaccacaataaatacagaccttaataggactaaaccagcaaagcacacttcttgcctgctcagtaaaatattatgaattttctgacctggagagggatggataacatgatttgggcctttggcaggcctctgaaatgggtaagcaaactttcgtgtttacctgagataattatgctcaaatggcatgtacttcaaccaggatataaaatgaaggagccaaactagtagaagcttccacattttaatttaagatttgcaggctttcaatggaacctccaccacagtagcaagctgcaagctgcacataaagctattacagaagagattgtttttaagaaacaaattggcaggtgatggctatgtacttaatgtatctttggtttaggaagacgagaatatcgattagaggccaaacaatccccagaatgcaaattgccatttggattctgcatgatttcttttcgttgtgttagtggccttgggatgcttgtcttggcctggaagctttgaggctctagttgggggctgtttgtttgtttttgtttgaaagagcctgagggggggcggagcttatatgctttcagattctgattatttgcaagatttgtttgactagatgttggctgaagttttgctgaattacatgttgtgattattggtgactttttacaagtgggagtcctacttggagatgattcagaaactggag

SEQ ID NO: 132519 - DNA, 755 bp, Homo Sapiens
  misc_feature (455)..(579): n is a, c, g, or t
cagtggaattactttattaaatcagaaaattacagcatttttgtacatgaaaaagctttccccctacaactaataaggtacaaataaaaggcgttctatcggaattatcatgcactgtggtggaaagaacactaaggcaggaagtgggttccagaactagtctggtgaatgttccatgtgctgatgaaaagaacgtgtgttctgcagctattagagtgttctgcacctattagaatgttctgtaaatgtcaggtccatttggtgtaaagtgcaatttaaatccaatatttattggttttatgtctagaaaatctgtccaatgctgagagtagagtgaagtcctcaactactattgtattagagtctatttctccctttaaatctaataatatttgctttatatctgggtcatccagtgtggggtacatatatatttataatgataatatcctcannnnnnnnnnnnnnnnnnnnnnnnnnnnnnnnnnnnnnnnnnnnnnnnnnnnnnnnnnnnnnnnnnnnnnnnnnnnnnnnnnnnnnnnnnnnnnnnnnnnnnnnnnnnnnnnnnnnnnnnnnnnnattttcttaataaaaaaatatgattatatcttgcatgaattgatccttgtatcattacataatgacttttctttttacagtttttgacttaaagtctattttatctcatgtaagtatagttatttctgctcttttttggcttcatttgtatgcaaatctttctccatacttcactt

SEQ ID NO: 132520 - DNA, 577 bp, Homo Sapiens
tttaggcgccgtagctgcgtccccagaaccgggagacttaaggcatctttattgcgggatcctcacacggcctcctgggcccggcgatactcatagacgctgccgtgctcgggaaaggccagtgcttgcgggggcgaccccggcggtggggcggggtcctccgggtccccatagccaccgccgccgggcgtgtggagacagaacacatccccggggtacacggtcaccgacgtcttgccgcccagattcaccgtccggccgtttttgcggatcagcaggtttaggccgcgggcgccaggctcgcccccgtggagcccgtatggccggaaggcgcggcgctcggtcagcactgacagcagcgcctcctcacgaaagagcagctcgcgggtgacgccgtcgccgcctcggaagcggcctctgccccccgagccccgccgcagctcgaagcggcgcaggatgaccgggtaccggctctccaggatctcagggtcggtgatgcgtgtgttggtcatgtggctgtgcacaccgctgcgcccgtgccagctgggacccgcgcccgcgccgcccgccaccgtct

SEQ ID NO: 132521 - DNA, 1076 bp, Homo Sapiens
  misc_feature (73)..(94): n is a, c, g, or t
ggtaacgacggccagtgccatgctcgaattaaccctcactaaagggaatacgcttgcggccgcctgctcatgnnnnnnnnnnnnnnnnnnnnnnaaggtggacaaataattttattttgtgcatgcaaatacatgtcaagtactgcaaactttttccatcaattttctctcaaacactgaaaatcatgatgctctattttgtgaacagccaaagctaatatctcttcacttcagtgctacagcaaaaacacacagaattcactctttgctattcactatcatcacaaccctcattgttccatctctgccctccccccatatacaggccttataaatcctagtcttcccccatttaatcctattcctatagcacaaagggaaacattacaatttggaaattcaaattgaaataaatggaatagaatttattcccatatatattccccatttcattgtacagaattattttaaattatagttttaaatagaagctgagtatatgccttaaaaatgagcattaaatccatcttagagatggtgcctgctttttacatgatgggtgtacaccatctttaatttcatttacatttcaatcgaacaatagatttgcaaagaaaatgtctaatacagacgtaaaaatattcacactagagcttcacaatcggttgtacaattgacaaacaggcctcttttcccaaactttccagctaagcaaatttataaaatgtaatcaatgcaacaagaaaaacatttctctttcacttccagggaaaagaatatgcaataaacagtataaatgcagacagcagttgctgcaagctaaccacgatactcccaagtggctgtacagtggatatgtgcagtacaaataaaagccacatgtgttgtatcacaactacagtataattgtttgcccagctaagagaatgcatgcacttccatgccttgggttataaagtgaggcctaattctcgacaggttgatggaatatgtgcaaatgaccttggcttttggcagtactaagtgcagccagtgtctgtgttccactggtttgggaatattttaaaaattttatt

SEQ ID NO: 132522 - DNA, 640 bp, Homo Sapiens
  misc_feature (97)..(149): n is a, c, g, or t
ttttttttcctttctcgctctttaatctcactctgctctcttgacacagttccagcaatgcagccccaggcaccagctccgaaaaggatgcggtggnnnnnnnnnnnnnnnnnnnnnnnnnnnnnnnnnnnnnnnnnnnnnnnnnnnnncctccttccggcccgcggtccgggcgggcctcgcagctgtccaggccccggcaagcccgggcgtggtgtccgagcggacgaataaataggggcggtcagtggtcaggtgggtcaggtgggcttgtgatccgggtggcttttgagcgtgtggaacttgacgctgtccagcttctcgaagcgcttcccgcagcgatcgcacgtgaagttgtactgcacctccgcagtgtgcttcttcatgtgccagttgagcgacgcgcgctgccggcactggtagccacagatctcgcacttgaggggggtctcgcctggtgtgggtgcgcctatgtaccttcaggtggttcttcctcttgaaggacttgccgcaggtctcgcaggtgaattcacggacacctgaatggatgatcatgtgccgccgcaggtggttttggataatagaacttcttgccacagccaggatgagggcaactttggtctttcctttccgatgcaca

SEQ ID NO: 132523 - DNA, 725 bp, Homo Sapiens
ggcgtaaacaatatgcaaccatctagaactgacatgaaatgatctgtagcactttagaacttgaagatctcttggaaatcatctaattcaacagttctcaatgagtgactccctgacccacagcgtcagcatcacctgggaaattgttaatttccaattaacagttggagatcgcgaattctcaggccccacctgctgaatcagaccttagagatggagtccaacaattggtgctttaacaagccctttcgttgggagatctcagtccacacttaagtttgacaaccactgatttactccaaactcttgattgcacaggtgagataaatgagaaccagaaaagtaaagtgatttgcttggggtgatccagcttagcatcaaaatcaggaccagaatctgggcctcctgactcctagtgccatgtatttgcatcttgaactggacttccttcccttctctgcaattgcaacctgagaagcccaggttaggtccaatcatcattgctttttgtctgtgccctcctatcctacatcagggaaagatatgcttcaccgaagcacctgggctctttcatttcattttggacagttgcaggagtttgttatttaaaagctgcataaataatgagcagacacagtcagccctgtttagccatggctaaaccttagaagggagtgtagaacaacccaaagtccagcctcttccagatgcaatttgaataactt

SEQ ID NO: 132524 - DNA, 585 bp, Homo Sapiens
aacgcggaaagttttgccataaattgtgatgtttattcctcgatttaggtctttccaatggtaatggtcaccccggtcattcttggctagccgctggcgttttattaacttgccttgaaggattccagaattttctacaacaggctctatgacagacatgctgtcatcttctagataatagtaaatgttcacctgacggatcctatactgttcctcagttgacataggaacatcttcttggaaataggcatcaaatttcagtacctttttgtcaaaggccacatgcgcaggaataaaatccgcaggtggggcttgtttaggttggccataagttaagactggtgccttactggccaactcatccagctcagcctgggacagctggttgaactggagccggtctccgcctatcccaactgttggacgtcgaacaattgcatagccgttcctgtagctcagcgtctgacttctgtggaaggctgttttcgtagagtccttaaaggacgtgcccggaagaaagggcaagccatgcacgggattggacaccattgcagccggtaccaccgccgccacctaggtcctgct

SEQ ID NO: 132525 - DNA, 896 bp, Homo Sapiens
ccggagaggacgaagcaggacctaggtggcggcggtggtaccggctgcaatggtgtccaatcccgtgcatggcttgccctttcttccgggcacgtcctttaaggactctacgaaaacagccttccacagaagtcagacgctgagctacaggaacggctatgcaattgttcgacgtccaacagttgggataggcggagaccggctccagttcaaccagctgtcccaggctgagctggatgagttggccagtaaggcaccagtcttaacttatggccaacctaaacaagccccacctgcggattttattcctgcgcatgtggcctttgacaaaaagctattgtaaaaggggttgagttcttgatttgattctcagcttggtcgctgttggtgtaaagaagagctactgatatgtgtatattaatttcgtatccagaaacttcgctgaattcttttatcagttctaggagctttctggaggagtctttaggattttccaggacttcttctagtactgtgctgaagaggagtggagagagtgggcatccttatgtcgtcccagttctcagagggaatgctttcaacttttccccattcagcattatgtcggcctgtggggctctgtcatagatggcttaatcacattgaggtactgaaattgatgcctatttccaagaagatgtcctatgtcaactgaggaacagcataggatccgccaggtgaacatcactactatctacgaacgatgacagcacagcctgccacagaagcctgacgaacaacaccctggacaccctccaaggcaacgcactaaaacgccagcgggccaaccaagcacgaccggcgcgaccacacaccaagcaaacgaccacaacagacggacaaacatcacaaccagg

SEQ ID NO: 132526 - DNA, 1096 bp, Homo Sapiens
  misc_feature (46)..(114): n is a, c, g, or t
tttgtgtcctaatgtgtttaattcccgcggtgcccagttttttatnnnnnnnnnnnnnnnnnnnnnnnnnnnnnnnnnnnnnnnnnnnnnnnnnnnnnnnnnnnnnnnnnnnnntttattggtgacgttgaagaaaagggctgaggggtggatggctggagctggggctacgtaggcggcccctcctggtcttcctgctgcatccgtgcgatcagctgttgccgctcggccgcctggcgcatgcgcatcatgacgaggctctcgtagtccctctctgacagcactgagccctttgacagtcctgagtggctgcggcccacggcatcctggggctgtccctccaaccaggaaatcttcagagggttatccaccaggccaacttcattctggacagccagctccgctgccttgacggttgcaaactccaccacagcagtgcctggcttcttactggaaagcaccaggttgagaacctcaccatacttctgcaaaagccgtaggaggacgtctttggagtagccaccttttgactcatcctccttcttgcacttccattttagctttagtttgggggttccttggccttcagtattttctgcctttcctctcaacctctggtcacgctcctggcgtatctgctcccggatgagcctctgctgttcctccagctgccgggaaccctcttctctcaggcgttcgatctcttgctctagtgtcctggtgctccgggtctcctcttcctcctcactctcctgggcctgggcctgccgctcccgggcctccaggtcaagcttcactttcttccttttctcatcaagtttctgggtcctctctgctgcttgcttcttggctttcctgaccttgtcatatgcagccctggctgcagcatcggtcagcacctccaaggcctgagaaagctggtggaagagttcagctgctctgggattatctggatttttgtctgggtggcaggagagggccttctgcctatacgccttctttacctctttgtccgctgccttctcctcaatgcctagcagcgcgtacaggtccatctgtaagagctccttggtgactaccatggttccggcctgac

SEQ ID NO: 132527 - DNA, 789 bp, Homo Sapiens
  misc_feature (642)..(642): n is a, c, g, or t
  misc_feature (761)..(761): n is a, c, g, or t
aaataaaattttgttggaatgaagcagcaaattctcacagctgttaaaagaattggactctggcatacctaactggagaataccatgctgttttttctataaaccgctggcattttatgccttttttgtttgttttgtgttgtcaactacaaagtaattctgtaaacagtacagatagccctggactgccaccacgggccaggccagggtagtcaaggttgtccatatgcacatgggcagataacctgttttcctttgacatttttttccaagtcaaattcttggaggattgtgtatttgtattataggaagtccagatcatagacttttaaaactaaaagcatcactgctgaactccagctcagtcttcccattttataatgaggactctgaagtttatagaggtcaaggacttgtccaaagctttagatatgtagtgtctgtgcccttttcctctaagtttctcctagagaatgtgggggctcaggaacagagaaaataaggtgcaaaaagtagaaatgggtggtgtttctcaaagtgtggtccatctgcatcctagtgactggggtgcttgttaaaatgcagattgctgggccttatcccaatctgaccaaatcatctcaggatctaccttttgaacanacttgcctaggtcacattcactcttgtggaagtttaagtacttcagaaacaagacagccacagaaggtgcacctgctaatttggtggcttccagtgcctcatctgtaacttctggtganatcctgagatgtcttactttacattgtt

SEQ ID NO: 132528 - DNA, 692 bp, Homo Sapiens
ttttttgaaaaataaatgaaaaaaattttattgagtattactttatacatgcaaattgaaagtgaatctatattaagttgactattccacaataaaaacctatgaaatgggaatgatcaaagctgtctaacacaatactaatgtgttcaataaattatccagatgtttttccacaaatatttggattacctgaattagctgattcttcagcaaaagttaaattttagctttaatatggtagcagcaggatgctacttaaatttagaagaaaaacataagaataaaaaccctgaatagcatagccaaatcttccaagaaataagttcaccaaaaaagtagcatacacctatttggtatccagaggaggaaacaaaacacaggcacttaatcaacatccaccaagtgatcatcactaacattctattattaccagagtaactgtcgatatgtgaactgtagattagaacagacttacatatctaaaaacaaaccagtaatcaataatatatacagaaatactaacttgaagtcacatttaaataccatcaacagtttggtgtatctgatataactgaattcatttcatcactgctataaattcctttaaagtgttcttttcctaattaacattatctttaaaaaatggtagatatttcccagtatgcatcagttttttcactccaccattcagt

SEQ ID NO: 132529 - DNA, 1416 bp, Homo Sapiens
catgtgacctatagaaccagtttgttaaaaaaagcaggctggtccggtccggaatcccgggatatcgtcgacccacgcgtcgattgtccttgaaattgagttccttggcattttgccttgcagtcatcagttaagcatgtgcatcctgaattcacagaagtttagctttgcaggtttgaatctctgtaatttaactcccgtggacttggtcgagttttcagcaggttgggagccacctctcttcatttcagcagtgagtcatcccttgacttttcaaatgacagaattttttccaattgtaaaattagcactgtaaaacaaagaaccaaagtggcatcctaagagttgttaaacctgaagtctagtttactgaggaattgtccaagttggagtttaaatagtatctgcttttgtctcaaagcatctaagttattctgacagaaaatggtaagtcagctttgcaggcagatgcgcctctgggcctcctaccttgctccacagctttctggccatcttgtctcccaggccatgccactgctctgccacatgtcagcaaatttctttccaccagtcttatagcatcttacatgatcaaatcatcacagaataaccccgtgatagattattgatagcaatagaagaggggcggcttgtcactgatttttctctcagattccttttccatctctcatccataaaggaaggactgaaatccaaaggcattctccttttgtacctacagtatccagaacccacgtgggcagccttctgcttatgacaataattggcccattgcatgcagagagaatgtcttcatagagagaatgtccattaaataccttgaatctgcatgacagtttgacttgaatgcaacagcaggaaaattttgcaagttaccataattgtatataccagtaggttttcttaagtctcttcggttcatcctttgtaatttgtgtgtgtatctgtagtattgcaggcttttggagactattcttacaggcagtatgtcagtcatcaaagaaaatgctgtcacctgccattgttgtatttgtgggtatttatagttgtatgtatgtaaatgcatcagtgtgtagattgcatatcagtgtatggtacatgtacatcaaaattatttttgtccttaatcagtgtgatatgaaaagcaagtacaacctcataggactgattatataatgaagttgttgagagtatatatagtggtattgttttattaaacttaaactcaaataatattttgattaaaatttttaataagactttatgctagaaaattctttgagctttgaatcaccagggcaaaaatgactttcaactaaccttgtgaatcttttgcagtgtactgtgtgcaataccaagggcatagctccctgtaatttgggaaatacagaaaga

SEQ ID NO: 132530 - DNA, 738 bp, Homo Sapiens
  misc_feature (539)..(539): n is a, c, g, or t
tttaactggtttctcttaaagcaaagactgtaagtactactttttctggagttcaatagttcagggagacaagtttttctttttaaaattcattctttattgtcactgttgcaaaattatcagtgagagttagcaatcgagttcttcctggacagctaaactgccctcttagtcagttaagatgtagcctggagatggaagcctagaactcagttctttttttggttcactgcagtagccctggttgaagtaatgcaacctctcttgtcaacggccttcactgttgcattcagctgtgaattttttaaggctttgttacctatgctgacataaagagctaatattattttctctgtacctactggcctaacatggtaaagaaacacgcttaaaaacattcttcttcaaagaaattattggcttggaaatatataattagaaaaaaacatatttgattgcctcctcaaaatgccttaccatccacttccctttacacttgctttaccctaactaattggaaagaaaaaaacaaatagtcnatattctctcacaatgtgtgctcactcaaactctagcttatcttatttatgcagaaaatatgattatatgcaagactgggctaaaacgaagttgtacagaatattagcaattaaccccaacaaaaataaaagtcttggaaataataatacaggatagagctgggttctaatcccagctgggccagtaactaaaaagtca

SEQ ID NO: 132531 - DNA, 211 bp, Homo Sapiens
ggtttctttttcttctttttggctccagtgtcattggctggactcaaaccaccccggttgtagctgttgtcctcctcattctcgcaatcgctgcagtgctcatggccgttcccgttcccttccatcatctgcggcagcggaggtgccggcggcttcactgctgtctcactctcgtccgccatcttgagttgcgagagcagggctccgcccc

SEQ ID NO: 132532 - DNA, 876 bp, Homo Sapiens
taatcttgcctgaatagggcccaagtccacttgtctttataagaccattttagtatcagacgacataatacatgtgcaacactttatatacaaggggtctatccggtgcgcaaaagttcaaacacatgaacatccaacagtttgataatacaagttttatggtacaatacaatgtttctgaataatatacattaacaatgaaagtttcgtgcaaagagtaaaacatgttccctttttgtgccacaaaatcaattctccttgagagactgtacttgcactaactgctgtgttgggtcattgtatgattctgcagctctgtttggaagaaaaacttctgtggacattgtgtacagtcatagatcttgtcttcttgtccatgggcagagaaaatatgctgctgcaacttgtttgcttgaacaaatactgtaaagcagactggacacttgaaggtgcctcccatccccttcgaagctgtgctctatcaggtggcactggagtttggcaggagagtccaaaggtctggctgcagagtttgcattcatggttcagtccttcatcaatcatgtgatttgcaacatgaacctgaatatcccattcattgtagaaaaccatctgacacttgatgcattgataggtcttcttctcatccgactgggagggactgattctgggcattggtgatacttggggcgttttcaactgtgtgctgttgctgtctggcacgagctctcggtggatggtttggatgtggttctggagttcactttcagactcaaacttaacgttgcagctagagcagcgtgtcttcagtccccccaccttgcctttcccctcaatggcactcagattctcattctggcccaagcctggtctatt

SEQ ID NO: 132533 - DNA, 871 bp, Homo Sapiens
  misc_feature (461)..(476): n is a, c, g, or t
cttcaaggatgaacattttattggaatataggcacctggcagagtaaatacatggttacaaagtgttttaagtttatttgctttatatagtgaccgggaaagtcaatccacagtgtcgattttttttcttgaagttgcagactttagaaggcaaaccctcaaacccgtctctttatggtaaagtgtgaaggcacatgttgccaactgttgcaccgactgatactattattaagtcaatgatgtccttcccttcttcacatcaaaattgttatgaatcacatatcacttaaccttattataatgaacgaaaatcacttttgtcttggggaattgtgaaaccttttgaaatcactagctctgacatagaagattaccagacttgagaatttttataataaaatatgtaaggccagaaagcttttggacaagttggaatcttaccctggtagtctccaaaatcnnnnnnnnnnnnnnnnaaagaaagtttactatgtgtaatgcaaggcacttatgtctctgcttaaagctacaagggaaaaaatgacaagcccagtttttttcaagggaaatattttttctctgtgaaaggtcagtagtaaaagagctagtttaaagtcatggagtttttgccaaaaaccatgtctcgaggttttatgcatttctaatggctttgcccataggagagatacccagagtggcaaacagaggctaaggaaaaaaatgctgttcatttagatcagaataacctcgctccaatctggaaaccactcaaatgacacatacaagtctgtatgaaaagcaaaacaaactcatggtgatatgcagttattccattcaacatgttaaaatgaagacagagtattttaaatgc

SEQ ID NO: 132534 - DNA, 403 bp, Homo Sapiens; identical to SEQ ID NO: 119571

SEQ ID NO: 132535 - DNA, 349 bp, Homo Sapiens
tgagccactgcacctggctattttatttttaaaggaaaggagatagacatcttattctaacctcattatgtgttactatttcccttaacttcaagcaagatcctggagatgtaggtatggttggtaaatcagtaaaaggttttcactccagatgttactgatggcacatggtgctgttataaatgctacacattacaataaaccatcaattgctttccctgggaaattcccggattctaatcatcagagaaaattcttgaggtttccttagaacttcacacaatttcatacaatgttctctcttctttaccaaggtactggcactaaagccttgttttctcctcgtgcc

SEQ ID NO: 132536 - DNA, 766 bp, Homo Sapiens
ttttcctgtaaagatcagtttggggtatgatataagcaggtattaataaaaataacacaccaaagagttacgtaaaacatgttttattaattttggtccccacgtacagacattttatttctattttgaaatgagttatctattttcataaaagtaaaacactattaaagtgctgttttatgtgaaataacttgaatgttgttcctataaaaaatagatcataactcatgatatgtttgtaatcatggtaatttagatttttatgaggaatgagtatctggaaatattgtagcaatacttggtttaaaattttggacctgagacactgtggctgtctaatgtaatcctttaaaaattctctgcattgtcagtaaatgtagtatattattgtacagctactcataattttttaaagtttatgaagttatatttatcaaataaaaactttcctatataattaaaagtgttcctttatttaagcattttaagcctgtctctgtttatcacaacctgcactgccaaacttgtttcaagttaagttttactgtatttacccttcattatagcacagggatatcatttatgcctttcactgactgcagttttttaaaatgtagttcttacccagcttttatagatcatcatcagtacaactcctggaaaaggctctgataggaatgtgccagctgtagataccagcatacctcaactagaaattgcatcattcatgaaaagccagccaagagcacttgtgaatttggaaatg

SEQ ID NO: 132537 - DNA, 1320 bp, Homo Sapiens
  misc_feature (68)..(68): n is a, c, g, or t
  misc_feature (71)..(71): n is a, c, g, or t
  misc_feature (76)..(76): n is a, c, g, or t
  misc_feature (105)..(243): n is a, c, g, or t
  misc_feature (252)..(252): n is a, c, g, or t
  misc_feature (263)..(263): n is a, c, g, or t
  misc_feature (276)..(276): n is a, c, g, or t
agcgaagacgcccaatagcaaacccttctccccgagcgtgccggatcataatgcagctgcacgacagnttnccgantgaagcgggcagtggcgccacgcaattannnnnnnnnnnnnnnnnnnnnnnnnnnnnnnnnnnnnnnnnnnnnnnnnnnnnnnnnnnnnnnnnnnnnnnnnnnnnnnnnnnnnnnnnnnnnnnnnnnnnnnnnnnnnnnnnnnnnnnnnnnnnnnnnnnnnnnnnnntttgccctncgagccaaganttcggcacgagancaggtgctcaggcctccagatggatgccctggtggtgacatcagcatgggctacagatcagtcctaggatcccgctcatcactcgctattggcctcggcctcactgcctgtgcctgcccagccatatgggtgcaatggcctgcctgagaggagaggatactggggagggggagaaggcctggcacagtactggggaagatggaagcagcaaacaaggctgtgaacacagccaggatgcaagccagtggagccagtgcagagcacacatgctcagatgatgttgttctcctggatcttctctcccaagtaaaagcgggtaaagaggaaggggctcaggtcgatggtctggaacctgcccttcagtaccatctctgctacagctcgcccaatgccaggggcctgctggagcccgtgaccactgaagccagtagcaaagtacatgttgacaactagcgggtgggggcccaccacgccattctggtcaaaggtgttgtagtcgtaatagccggcccaggcgctctgaacctgcgggtgcacaaaacactggggttctcgggaaggctgtagccacactccatcctcactcccctcagggctcagcacagagtaccctctacctgctgctgaggggtctatgggatgggatgtgtccaagaaattccttagcagttgtgacatggagggactacggcagtcacgggtccgaggggaccaatgtgctccactgtcatctgtcccatccaatgtccaaaaataaaaaggaaaaccagcccttgccagttaccttcagagtctcaaaagctgggaccctcagggccaaatggggccacaccttgtcctggaagaaatcatggtccactttcaggttcgccgggtccggttcttcctgctggagtgagaggtggggacaacgcttacattgcctgggacacaaggacaggcccagacttgtttaacaatccctgtgcaggtaggggatggggagaaatggtcccagttcaaatctggagggggctctaatatcaattaacacagcacacagcc

SEQ ID NO: 132538 - DNA, 2115 bp, Homo Sapiens
  misc_feature (57)..(68): n is a, c, g, or t
  misc_feature (181)..(189): n is a, c, g, or t
  misc_feature (243)..(251): n is a, c, g, or t
  misc_feature (281)..(375): n is a, c, g, or t
cccccttggagcgctttaaaaatttcggggaggagaggtttgtcccacaatttgttnnnnnnnnnnnnaaagaggtaagggttccctttcccaaaagtaccccccagggtggcgattttctccccagtcccggggggttttaaaaaacgggggggcccagggcccaaggtttaaaaaatgnnnnnnnnntatagggggcccccttttttccaaaaaaaactggggtccccgtaaaacctgggnnnnnnnnngggggatttctttagagggggccccccccnnnnnnnnnnnnnnnnnnnnnnnnnnnnnnnnnnnnnnnnnnnnnnnnnnnnnnnnnnnnnnnnnnnnnnnnnnnnnnnnnnnnnnnnnnnnnnntaggagttaattacatgtattgattaatggatagggtaaacagacgaaaatcaataaacctgagccaggctgccccagagtgctcccatgcctgggctctgtctgctaagagggtcagaggcagtctttcctggtcagtgccaggatgaagccagtcctgggccagggtgctcaggcctccagatggattgccctggtgggtgacatcagcatgggctacagatcagtcctaggatcccgctcatcactcgctattggcctcggcctcactgcctgtgcctgcccagccatatgggtgcaatggcctgcctgagaggagaggacactggggagggggagaaggcctggcacagtactggggaagatggaagcagcaaacaaggctgtgaacacagccaggatgcaagccagtggagccagtgcagagcacacatgctcagatgatgttgttctcctggatcttctctcccaagtaaaagcgggtaaagaggaaggggctcaggtcgatggtctggaacctgcccttcagtaccatctctgctacagctcgcccaatgccaggggcctgctggagcccgtgaccactgaagccagtagcaaagtacatgttgacaactagcgggtgggggcccaccacgccattctggtcaaaggtgttgtagtcgtaatagccggcccaggcgctctgaaccttcagagtctcaaaagctgggaccctcagggccaaatggggccacaccttgtcctggaagaaatcatggtccacttccaggttcgccgggtccggttcttcctgctcagtggggctacgaccacctaggtagttgctacctaatccttcccggcgaaaataggctccactggtgtctgcaacaagcggagtctctaggcctggtccctgggggcagtgccacacatacacataccttttcctcggctccacaggtagcttggtgccctgcagggtgccaggcggcccctctccaacaccagccagtgctgcgatttgcgcagaccaggctccggctgcgttgatcacaatggcgcattccacaggctggtactccaggctgcggtccatcttcacatggacttcatggatccttttcaagaccaccgctttgtcatctgtggtcaacatgcgttgagatgaagagacaaaacgtgtcacctctccctggcagaaaaggactcccaaggactggacctttcgccgaagcccctggagcagacaccaggggtcaaaccaaccttcgtcctccatcccataagacgccaaagccactccctctgtgtttatccagggaaacttgttccgaagctgatcaggagacatcagagaaactttggctccctcctgcctctgcactttcacgttgctctccatggctgcagcatccttttctgaagccagcaagaggtagcccgaggggttgaaccggaggtccaggggaggagcatcgactacggccaggtactcattgatgttccgtagaaagctggctgaaaagagggagagctggatgattctcaggcaatgagaactgctgacaaatcccacctactgagagcccagtggaggcctgtgaataccagagaaaagcctcctctgcgcgtgcctggcctccgggtcaagaggccccggcccatgccgtgcggcagaaccctccgaatcatagcccctctgagccccctcgtgccgaattaaccacaggggcctcgtacctggcgctatacagt

SEQ ID NO: 132539 - DNA, 893 bp, Homo Sapiens
tggatcccttttcaagacccaccgcttggtcatctgtggtcaacatgcgttgagatgaagagccatacggtgtcacctctccctggcagaaaaggactcccaaggactggacctttcgccgaagcccctggagcagacaccaggggtcaaacctaccttcgtcctccatcccataagacgccaaagccactccctctgtgtttatccagggaaacttgttccgaagctgatcaggagacatcagagaaactttggctccctcctgcctctgcactttcacgttgctctccatggctgcagcatccttttctgaagccagcaagaggtagcccgaggggttgaaccggaggtccaggggaggagcatcgactacggccaggtactcattgatgttccgtagaaagctggctgaaaagagggagagctggatgttctcaggcaatgagaactgctgacaaatcccacctactgagagcccagtggaggcctgtgaatacgtgtggtcccgttccaccactagcactcgaatagcacctcgtctgctctccagcttcttcagccaataggccacagacaagccaagcaccccacctcccacgatcaccacatccgagtgctcgggaggcaggtggctggtgtcttgcagtagatcacaggaccttccaggcaggatcgacttgatcttcttcttaatctcagacacctttccatcccagtccagagaaaagcctcctctgcgcgtgcctggcctccgggtcaagaggccccggcccatgccgtgcggcagaaccctccgaatcatagcccctctgagcccggaccctctgaaagctgcactgctgcctcgctattatcgcctcgtgccgaattcgccacccaggcctcgctacctt

SEQ ID NO: 132540 - DNA, 754 bp, Homo Sapiens
  misc_feature (693)..(693): n is a, c, g, or t
  misc_feature (699)..(699): n is a, c, g, or t
tttttcattggaaaacacatttaatttcaaagtaaacaaagatgtttgtacattaaagtatttaattagtgaaataattattatcaatgtaacaagctgaaaaatacagcaacttgatacaagactgaggtaacaaaatacttcaccaaaaatcgaaagaaccccatggagggctgattgacgttcagtggttactgcgggtgagacgattcacaagaattagagaaagtccttacacaactgcatgcaggggtctgctggagaaaaagacagcccaggagagtgcaacagatttaacaggaaacgaattaaaatgtagaaactgattttcaacttactttgaagagtacataagaaattgaaaactactctctatgcaacattttgaatgctaagtggaaaaccatgcattttggcacgaaatttattaaagattataccatactaattaattactattacttcgttactgaatagtcacagtcgttcagcaatggataaagagattaatggttctaaaatggacagatgatctcctgtgttgctgctgtaagcggggttttgaggctgcccagggggtgtacacgcttgtgcagcatacggctgcaaggcggtctgaagtccatggtacaagttctcaacacccaagaaaatgcagttctcgctcatattgtagttgtatttaacattganattaanaacagaaacctatggagcagatactgtgacagtttgaccctactctctcattcca

SEQ ID NO: 132541 - DNA, 1042 bp, Homo Sapiens
  misc_feature (651)..(743): n is a, c, g, or t
  misc_feature (749)..(808): n is a, c, g, or t
aagataataaattttgttgtgtagataaaaaaatttaaaaatcgattccatctttctcatcaaatcttactttttactctttgtttctttttttcccatttcagttagattgctctcttcattgtacttccagtatgcctcttgagcctttgcaccatggtgtttcttctctggaatggtctttcattatcacccatccattttcaaaaggttgcatgtgctttcgttccaaagacattagtttatagatccaaccaggagtcgcatcctgcatgtcatccctactctttcaaatcacatacctctaccttttctgcactacacagaagggcctacacacggctttcatactttagcttagcctctccgaccatacctcctaagaccctgaggatcagggggcattatctcatagttctcccgcacttctctcccatcccaacacatacactagcaaggagctccgcacacaagctcctccagtaaaaacaacgcactgggcagtgcatctcaacacatcaaattaccggcgtgcataggagcctgatgcggcaaatctgtgggtccttcgggatccttgaaggcagccctataatttgcatttttctacgctccaaaacactttccgggccagatgcggtggctcactcnnnnnnnnnnnnnnnnnnnnnnnnnnnnnnnnnnnnnnnnnnnnnnnnnnnnnnnnnnnnnnnnnnnnnnnnnnnnnnnnnnnnnnnnnnnnntgagcnnnnnnnnnnnnnnnnnnnnnnnnnnnnnnnnnnnnnnnnnnnnnnnnnnnnnnnnnnnngacggcggtgagaccctgtctcaaaaaaataaaagccaccactttcccacttattatcccagggaaacgcacgcgacggaggagcgaaggagcgtttatttgtggaggcgctcaagtaagaaaccctgctcgctggccgactcaagggtctccaaagccttctctgggctgtatcccctccccaaaaggcaaagaaccgttaacaagtttacttccggcacaagcgtccgcccc

SEQ ID NO: 132542 - DNA, 992 bp, Homo Sapiens
  misc_feature (916)..(916): n is a, c, g, or t
gaaaatgaacaaaataaagctttatttgaactccctcccctacagatcattcagatgcccgggaccatgtccaggttcctctcagcaacatggaaagctaagccatttcacaaacgcacaactgtagctacactacagccccccatgcccagggcacagctttgttgctaagcctgtaacaaaagaccaccactcagtatttgtgtaccctgcagccaacaccacctcctgggcttcacaggttcactcacccaagaggccagcacaaccacgaccgagtgggtactcagtggcccagacaccccccgaacactggcactgccacaaggccctgaagggtagactgtggggcaaagaggacaaactctccctcccctaagggacccggctcactgggcctccttcccctgccaaccgccagcccctgcatgcctagcagggaggtaagcacccactggcgtcgtgatttccattatcttgctaatgttgacagcacctaagtcacattaaaacaaagagagactggatccagacctccaagtctcatcattggacctccagtggttctcactgccccaaccacagagtgaaggtcaggcagcgtttgccaggatttggctctgaccaagttagtgctctaacaagtcacctgagtttctaatagcttccctgaagaacccaactatttggagtatgttgcctctcctatcaagaggcatctgggggcacaaaaatctttctggatcacagcttgaagaaacagaacataactggagtagcttcagaactaaggcggccacattcaccccaccgcttaggagttagctccattatacacaaccaagcacaggagaaacactcaccaggaaaagatgctggaggcttggaagttctcaagggaactgtttagacaganggtacgaacatctccaattcagacttccaaatacactaacaataattaaaaatgtggcctctgatcctcatgtttc

SEQ ID NO: 132543 - DNA, 892 bp, Homo Sapiens
  misc_feature (51)..(128): n is a, c, g, or t
  misc_feature (846)..(846): n is a, c, g, or t
aagtgagttcccattcctcagccccagagctgggaccacaggcgcgcgaannnnnnnnnnnnnnnnnnnnnnnnnnnnnnnnnnnnnnnnnnnnnnnnnnnnnnnnnnnnnnnnnnnnnnnnnnnnnntgcccaccctggcgtcccagtgttgggatttcaggcatgagccactgtgcctggccatgtaatagagacttttaatataggagggtgtaccagaagcaccagtttcctgtggcaaacagaattattcctgctgtatttgtaatctggtgccacgaggtagcccagatcccttcagctctgatggaagagcattgcttcagccgtaaatggacacctgcagaaaccttgcaccgatggatagtctccctcagctccgtgccatcgctgcagaggctgttatggacatcactgcagcccagtggctctctctcctggtctccaccatatgagttggcttctgtttctctcctgttttactttgcctttagctgtggtctttcaaaccaccatccctccttatcttcctctgctggttcctcagatcttcctctgatggcgctgcctccatgccatgccctctgccagttctatgtggtgaacagtgagctgtcctgccagctgtaccagagatcgggagacatgggcctcggtgtgcctttcaacatcgccagctacgccctgctcacgtacatgattgcgcacatcacgggcctgaaggtgggctgtctcgggaagggtgacttgccagcctaccacactgagctcttcagttctttaatatgggaaaacaaattgcagagtttagtctctgattagcttttaaatttgatatgtgtangtaagacatgaaccagcttttactttgaaaccttcctcttctggaa

SEQ ID NO: 132544 - DNA, 587 bp, Homo Sapiens
  misc_feature (262)..(274): n is a, c, g, or t
agagttcagaataaacactttattatcacatcagaggaaaagaccatcttagaggctcaacaacccaggaaagctgtgacgatttcttcaaattgttaagaatatccatgcatatgggtttcacattattttgctacacacagtaccaatttttccaaaagccaacagcaggtattctattacccatcctggacttttactccaagaaaaaatacactgagtctgtgagtaatttattagtattttgatcattgctgccgcnnnnnnnnnnnnnaaggtaagaagatctaatgcatcctatatccagtaagtagaattatctcttcatctgggacctggaaatcctggggcagatccaacacatcctccgctgcggggtcaggaagggacgaccgacggggcaccggccaccctgtcggtattgggcatgcaggcgcgctacagcctgagaggtgacgccgcgggcccctgcggaacgggtggcgggaaggagggaggcgcggctggggagagcgctcgggagctgccgggccttgcggaccccgtttagtcctaacctcaatcctgcgagggaggggacgcatcgt

SEQ ID NO: 132545 - DNA, 884 bp, Homo Sapiens
ccaaaaaagtcaattatatatattttaagtgcaaaagcaaactaaaggaagaacattttgttaattaggaagtgacatgtttgtagatgtgatagaacatagacacctaggtgatttagtatttattcaatatacaaagaactactaatgtaccatgaaatgtaatacatattacgtttgattttttaaggaggaattttcattttaactcaatttgagtattaatagctaagccattcaacataagtaaactaagagtacttcatagtatatagctaacatactttcctgcaactgtgtttattgcattatccttttttatttcaggatttccaggtcccagatgaagagataattctacttcactggatataggatgcattagatcttcttaccaggtttctaaaatgttccttaaaatgctgtggagcttttgccactacgtagccaatgaagttagaactctcagcactttcttcaagagggatcttgagtgtgaaattagaggaaggcagaatgcttaagtctgtcatcattgtttgatcttgtttgggaagtatttccttcatgaatccttggaactacctgtattgaattaaagatgatctctgtttctggggcctggatttgccagttctagacacccagccaaattgccctctcatcttctccaccagataggcggtagtcctccaagtgcttccggagtcatctggagaatctggccatactgctgattggatacattgaccaacctgatcgcctcgtctaaattctgtgtgcagagcaggtacatcaggacagtcttcagataggtgagcctgacattaatggcatgtatgcctgaaatttgaaacatcttgacaaattctggtcaagttcac

SEQ ID NO: 132546 - DNA, 1165 bp, Homo Sapiens
  misc_feature (107)..(206): n is a, c, g, or t
ggaaaacagttatgggccatgttcccttttccttgggggggcccgcgcgcccaaacgaaagggtttagaaaagtttttccgaggggccagggcgggcccccatattnnnnnnnnnnnnnnnnnnnnnnnnnnnnnnnnnnnnnnnnnnnnnnnnnnnnnnnnnnnnnnnnnnnnnnnnnnnnnnnnnnnnnnnnnnnnnnnnnnnnacttaaggagagttctttaatctattttaggaaggaactgagcagataagtggcagtacagaatgaacaaagcgtggacgaatgcagaacacttctttattatagcaacatataaaacaactataaagttcataaccacactctacatcatgatcgatggtgttactcagctccctcagatttgagggaatagcttgtgaaattcttaaaatattctaaaaatattccaaaaatagcttgtgaaattcaccaaccttctttataagtacgtgggattgaaatgcacatacatgtttttgctaagagcacatacatttcattctcctcactttgttcataacctcagcattgtcagataccctcagtgagttaactcaaagccttttattatggaaagaactggcacagttacatttgccagtggcaacatccttaaaaattaataactgataggtcacggacagatttttgacctagttcctttttcttttagagcaaaaagaacttttacctcggcatccagcccaacccctaaagactgacaatatccttcgagctcctttgaaagcaccctaaacagccatttccattttaatagttggatgcggattgtacccttcaatctgaaagtcttcagctttgaagtcatcaattttctcaacttttcgaagaatcctgagctttgggaaaggtctgggttctcgctgaagctgaattttcagtggctcgatgtgattcaggtaaatatgtgcatctcccaaagtgtgtataaagtcacctggcttcaggcccgtgatgtgcgcaatcatgtacgtgagcagggcgtagctggcgatgttgaaaggcacaccgaggcccatgtctcccgatctctggtacagctgccatgccctctgccagttctatgtggtgaacagtgagctgtcctgccatgtctcccgatctctggtacagctggc

SEQ ID NO: 132547 - DNA, 1514 bp, Homo Sapiens
gctaaaatttttttaaaaaatattccaaaaataaccttgggaaatttccccaacccttcttattaagttcgggggattaaaatgcccatacaagtttttggtaagagcacatacattcatttctcctcactttgttcataacctcagcatgttcagataccctcagtgagttaactcaaagccttttattatgaaaagaactggcacagttacattggccagtggcaacatccttgaaagttaatacctgataggtcacggacagatttgttgaccttagttcttttttcttttagagcaaaaagaacttttacctcggcatccagcccaaacccttaaagactgacaatatccttcaagctcctttgaaagcaccctaaacagccatttccattgttaatagttggatgcggattgtacccttcaatctgaaagtcttcagctttgaagtcatcaattttctcaacttttcgaagaatcctgagctttgggaaaggtctgggttctcgctgaagctgaattttcagtggctcgatgtgattcaggtaaatatgtgcatctcccaaagtggtgtataaagtcacctggcttcaggcccgtgatgtgcgcaatcatgtacgtgagcagggcgtagctggcgatgttgaaaggcacaccgaggcccatgtctcccgatctctggtacagctggcaggacagctcactgttcaccacatagaactggcagagggcatggcatggaggcagcgccatcagaggaagatctcttggattccaagcgcacatgatgattcttctgtcgtcagggttggttttgatggtgtcaatcactctttgcagttggtcaactccctgtcctgaataatctgattccatatctctgtattctgccccaaaatgcctccactggaagccataaactgggcccaagtccccttcttctctggtggagaatcccaggctgtccaaaaagtctcgggatccattggcatcccagattttcactcccttggaagacagctctttagcatttgtggatcccttgataaaccacagcaactcctccaaaacacccttccagaacacacgtttggttgtcagcagagggaattcatctctcaggctgtagcgcgcctgcatgccgaataccgacagggtgccggtgcccgtgcggtcgtccttcctgacgccgcagcggaggatgtgttggatctgccccaggtactgcagctccccgtgcggcggacgcggctcggcgtcccgctcctgtgcggcggggggcaagggccggcgcggcagctccgagccggccacaggcatggcgcggcgggcgggggacggaggcaggcgaagtggcgcggcgggacggaggcaggccaagtggcgcggcgggacggaggcaggccaagtggcgcggtggcaggaccccttccgcgcgcttttcatcccgggaatcccggaccggtaccagcttctcctcttgtggttgtgggggtggggtgggtgggttggag

SEQ ID NO: 132548 - DNA, 696 bp, Homo Sapiens
tcactttgtcttacctcagcatgtcagtaccctcagtggttaactcaaaccttttattatcgaacgaactgccacagttacatctgccagtggcaccatccttaaacattaataactgataggtcacggacagatttttgacctagttccttttttttttaggagcaaaaagaacttttacctcggcatccagcccaacccctaaagactgacaatatccttcgagctcctttgaaagcaccctaaacagccatttccattttaatagttggatgcggattgtacccttcaatctgaaagtcttcagctttgaagtcatcaattttctcaacttttcgaagaatcctgagctttgggaaaggtctgggttctcgctgaagctaaaaacaaaataaggccattattttgccataattgtacgacctgttgtaattgctcctcatgtccgtgaaacaagtacacaggatgtgatcaacaaagttctattttacaggagtatgatcctgtcgataccttgccgtaggttatgtaacatgattggagcgcaaccagctgttctcttgcacagatcgagagtgaggggtattttgtgacattacacagcatcaggagcctggtgcctcatccaggtgtaagttcttataaccactcttggcaaatttattaaagacaggaacacagtcaatctgtaactca

SEQ ID NO: 132549 - DNA, 1733 bp, Homo Sapiens
ggaggtttgtgagtcggtttgttttcttcatttcagatattcgagtcatggaactttttcaaagaactgaagggggattcccggtgatttttccaccccatacagatgaagacatcaaagggccccgccgcagtgacgaagacaaaagcatgaacagatctgggtccaaagaggctcggcaggtgcggtgggcacgagggagcgacccccgggtggccgagggactgagggatgcgcgtccagccccggagggcggcgtccacctgaccccccagcccgagccgccgccgccgcctcccagcccggcctgcgctgccccctggcggtggggccaggagccatcccagcctctaagcccccgaccctacctcggcccccggggctgccgcggaagggcccccaaagcctgctcatagccaagggacaggtatgtggccaaggccccccacagccctgaactggagtgtgtctgaggctccggcaggggccccctcacttgggcgcggagccctgggagtggagagagcggaccccacacctggggccggaccagcctggggtggcagaaagggagtccgggtctgtgggttttgatgagggcagagggaggggcatgcgtcctggtaagtcgggtgctgcggaggtgaggtggttccattttggaaactgaggaagcagagcttggaagacctgggggttggaggggaagggtctgcacgcacccaggagtgggtgacacagaggcccagcctgccaagcaagccggtgtctgtgccctccgggtgggacgagagacccaggccccgccacccaaggtcggcactcagggctggctctcctgtgtcctctctgccttgcaggcggctatgggtctgcggcatatggaaacaagggttggggggacagcagctccagggctccaagtggtgagggtttgaacaccagtgccagcggccttggggtgggctcggagtctggggtccacagttcagcggaggctctgctcaggccctgctgggctcccgctctgagggctgcgaccttcatctggggttctaggaggaagaacttcttctcccggcgttgctgggaacagcggcacctgtaccaggcgaacatgaccagagcgaccaagaggatgaagacagcagtgaccaccgctggcacaggccagaacccagtgtcgggggcggactggggttctgcacctgaaacctccagcgtgacttgtctgttatttctctggtgtcccacgaggtgccacatgtacagcccagcatgggagtcccgggcgcctttgatcaccagctgtgccacgcctccctgaacctggagctgccagccgtcccgggagaagtagcctggagccacctcattgaagatggcgctctcctgcccgtgggcacgcagcttgatgttgacatgggagaaggcgttggagatgttgcaggacatgacggtgttctcgccccaagacacagagactaccccctctgtgcagatggggctgtcccagccttcattctgagcactcaaggaggcagccaaaaacaggagggtcccaagggcctgggaaacgtggccagggaatgccagggggcaggtctgcatggctggtgggacttgggcccctggtccttgtcactggctcttgaaacactcccgggtccgctcctggacgcgctcctctgggatgcagcttctccgcgccccggagccatcccgggaattcc

SEQ ID NO: 132550 - DNA, 735 bp, Homo Sapiens
ggatttgtattttttaaaactggttttattaaatatctaataaatatgaaaaaaatgggtatgacacaaagaatatcaatagcacaaaacacttaggtactgatcatacagtttaagagagtatcatcatttttgaaggtccctttgcaccattttccagtttgaactgataatggcccttccccaccttagaggcaaccactgtcttgaatttttgttcatcattctctagtttttctttatgcttttcccacacacagttgaatctcttaaaaatacactgtttagttttaaaacttttttatctttatataagtgaaatattatgttttcttcagttacttggtttttagcttaccattttgttcctgagattctgtagctgtaattcatttatttattccactgaaggaatgcatgacttttgatggagagctgggctgctcccagtgctgctgtgaacactctcatatttgatgcaccgtgtgagtttcctcacgggtttttaggccacttggcgcacacatcgtcaccttactccctggtccccatctgtttcccacagtagttgtgtagttgccttcatttcctcagcagcatctgctattacctacctggttagttgtgccaatacagcacgtctgaaacagacttcactatgttttaacaattgcgtttcatctaattttctgatacaattttgcataccaatcctatgtggtcctcgtgccgaat

SEQ ID NO: 132551 - DNA, 321 bp, Homo Sapiens
cttttttcccttcctgtacacatctagaaaacttcacctttctagagtccccccaaaacaacacaaaagttattgtgggtgctactggttttatgctgtactgtggggcgagggggaagacctgtctgtacgctggaaacactcataaccattcctttagattcgtttgccttatggttatttgtcataaacgcgatttgcaaaaacaaggagccttagtgaatgtacagtacctagacttctgtgttctcaggacgcagaagggagcaactttgctatttggtccagtaagtggacaccttgtgatataaatgtggaaat

SEQ ID NO: 132552 - DNA, 1322 bp, Homo Sapiens
  misc_feature (901)..(901): n is a, c, g, or t
  misc_feature (974)..(974): n is a, c, g, or t
  misc_feature (1010)..(1010): n is a, c, g, or t
  misc_feature (1018)..(1018): n is a, c, g, or t
  misc_feature (1076)..(1076): n is a, c, g, or t
  misc_feature (1109)..(1109): n is a, c, g, or t
  misc_feature (1133)..(1134): n is a, c, g, or t
  misc_feature (1138)..(1138): n is a, c, g, or t
  misc_feature (1149)..(1151): n is a, c, g, or t
  misc_feature (1181)..(1181): n is a, c, g, or t
  misc_feature (1205)..(1206): n is a, c, g, or t
  misc_feature (1221)..(1221): n is a, c, g, or t
  misc_feature (1236)..(1236): n is a, c, g, or t
  misc_feature (1279)..(1279): n is a, c, g, or t
tttgcatgttgggattaatttaatggggatgggggggttgatgacactactgcaaccaccccgccccaaggacaatgacagtattctgaagggctccagcctaggtggcttggctacagtagtatctcttccaacctgggagctagaggatgttcccaccattccctcccaaggcctgggtccaagcatcctcccatccttcccccaggccttctggacccaggctttcagttaggtggtggtgacagcagaaaggaggcagagacagcagtgagggtccaggtttactctttgggaatagggaaggatgaagagaaggggtggatgggatgggggcacccctcagtagtcagctgtgtaatctgtgccatggagaccccggcacagcagtgtgaactccttcaccatctccttcacccgcctcttgttcactcgctcgcgaaggatctgctggctgaaggtatccttctgttcagggctgaggcgggcagaggggaaaccaggtggctgcagggcctccttgatccacatgctcaggaggctgaagcagtgcttgttcagggcgaacaggatatcggcaaagcagtccatgaggctgcgggaggcctggcccccaatggcctccagcactgctatgagcagcatacgaccgtcttcctgtaccacctttcccacagactctacttccccacaccgaggcagcagctctgtaaagaagccacaggaggccttgacagtaggtgcctcagggaacttgagggccagcacagcacactggaacacagctttgacatccaatcgttcacacaggaacaaatctggcttccgcttcagagcctgtgccaggagttgcataaatgaatcaacaatatcaggatgatccctgggcccttgctggaanagagtgagtgtgacggaggtgacgagcaagaagagggcctcaattgggggaaagtgggcaggctcatgagcanagatgtggaccagctgtcgagtgaggtcaagagcanaggcctgngggatggtgctgtacatccgacccagcatctcacacagctgtggcaccatgggggcanagtcatccagcagcgtcttaacagacttctcanagatagcgcacaccgcctccacannctgngcatcattcannncattgctcagcaccttctggataagctggnagacctgctgcagcacaccacacnngggtgggtccctgtngactggcacttcganctcaaggcttctgatatctcatgatactgagtccatgtgtganaggtgggagaatccagattgacatggcacttgtgaggatggga

SEQ ID NO: 132553 - DNA, 195 bp, Homo Sapiens
agttataattttggtaagtggttctcctttgcccacaccttaccaggacaaaaggagcttactctacccaggcaattaagcaatctcccaccaccaccaagctcaaatgttttcatcatagactagggttcatttttatttccttccctggagctttgtaattctttcagcgtaaacattgttgaggttcaacag

SEQ ID NO: 132554 - DNA, 1535 bp, Homo Sapiens
  misc_feature (30)..(30): n is a, c, g, or t
  misc_feature (158)..(733): n is a, c, g, or t
  misc_feature (770)..(788): n is a, c, g, or t
  misc_feature (1510)..(1510): n is a, c, g, or t
tcagcgtagtaccgataagcgcacgtcggntgacggggttcgtaaacagccagttgagcgacgacttacacgaactgagtacctacgcgtgacttgagaagcgccacgttcccgaaggagaaagcggacagtatccgttaagcgcaaggtcggaccannnnnnnnnnnnnnnnnnnnnnnnnnnnnnnnnnnnnnnnnnnnnnnnnnnnnnnnnnnnnnnnnnnnnnnnnnnnnnnnnnnnnnnnnnnnnnnnnnnnnnnnnnnnnnnnnnnnnnnnnnnnnnnnnnnnnnnnnnnnnnnnnnnnnnnnnnnnnnnnnnnnnnnnnnnnnnnnnnnnnnnnnnnnnnnnnnnnnnnnnnnnnnnnnnnnnnnnnnnnnnnnnnnnnnnnnnnnnnnnnnnnnnnnnnnnnnnnnnnnnnnnnnnnnnnnnnnnnnnnnnnnnnnnnnnnnnnnnnnnnnnnnnnnnnnnnnnnnnnnnnnnnnnnnnnnnnnnnnnnnnnnnnnnnnnnnnnnnnnnnnnnnnnnnnnnnnnnnnnnnnnnnnnnnnnnnnnnnnnnnnnnnnnnnnnnnnnnnnnnnnnnnnnnnnnnnnnnnnnnnnnnnnnnnnnnnnnnnnnnnnnnnnnnnnnnnnnnnnnnnnnnnnnnnnnnnnnnnnnnnnnnnnnnnnnnnnnnnnnnnnnnnnnnnnnnnnnnnnnnnnnnnnnnnnnnnnnnnnnnnnnnnnnnnnnnnnnnaagaattcggaacgagggagggccgcggctgtaggcnnnnnnnnnnnnnnnnnnncattcttcattttatttgcatgtcccaacaactcatctcaaatactaaattcaaaagaaaaactgtagttctcctcagcattagcactaatttatggtaacaatcatttcttttaaatgtctaacttatttaaccccttcattttaaattgcaaattaaagcatgtatttacatatttatatacaaaaaacttcaaaaacaaattaatccaaatcttggtccaagagtttccactttataagtggtatggtactatgctatatatatcctcttccaaaagtctcttaggacttggtaagttccaaatattcattcacaaatggttcccctttaagcttaatgaaccatatacttcatttctgagtaaattagaggaaatattacagaacacgctttgtacaatacagcaccactactgagaagggctcgaggttttgtaatccaaggttctgacttaaagcaaaaatacacggcatagattgcaacggcaaagaagtgtccaattaaaactagagggttaggagacaatacagaaagcagcccaacaggacccgcaacacattcgcccaccaagtttgaaataaagaaaacaggccttttcttagttgatgcagggaattatctgtggcagaaaataattcataaagagcctgagcaaggatattcacgacaaaggaatgagatgtttttcttgcccagtaaaatgattttttggcctcganaatagctgcatcatcataaaggtca

SEQ ID NO: 132555 - DNA, 949 bp, Homo Sapiens
  misc_feature (560)..(560): n is a, c, g, or t
tttaactgtccgcaagttaaaaagatttattgctattccaggcttcaaatgagcccagaactcagggctggtgtgtgtttcagaagttgttatgatgtaacagggtggtagaaaaatccaggcagtttgatgtcgaggccaccctctcttccttggacccctgctccaaaagcagctgctggtgaggctctttcccatctgcctcattcacccaacaggactccaagactgaggcaggcagccttgtgatccccacagctcacaggtgagaggctgctcatacctctcctagcactggaagagccttgtccttgggaccggacactatggctttggccctgtggagggagaaacggtgccacaggagttgtcttaagaggacaaggcatgcacggtctgagatcagaggttgtgacgtggccacccatgagccagtccgtttgggacacatcacactgcacagctttttaaaaaaataattagctgccaatcttttaaaatggtaagatttcatatacaaatctggatttttggcttctctaggagtaaacattgaaacntttctttttgagacagagtctcactctgtcaccaggctggagtattgccagtatctggcagttgtcttcacagactggctatgcactctccaactgactccagtccttgccacccttaattatatttccaactggagaccaggcctcagcagccttgtatcaatgggcacatgtgctgtgactttctgtgtagaatatttacatgtaatacatctttatcaaaaggaaaatcggtggtgtatgggtcagctgtatccacgcttgcaggcaaggtggcggtaccagtacagatcaacatctgccacatgggaacccatctcacaaataccaataccgggggggcaggccgtatcagcactggagcgagcagaatgctgacagagggggtg

SEQ ID NO: 132556 - DNA, 498 bp, Homo Sapiens
atgggtttctagaggttttaaatacttggcatgagggggaaaaaactcaaacctatacccgaaggtataaaacattaattctgtttgtctcctgttccagggacctgggtgcagccggatgctttgtgaaattttaaaaatgttgcatctctgcttctctccctgccccaggagccctcccaggcgctgagtccctgctgctgcagcatccagccaccgacccagctcctgctgaccacgatgtcgggtaactcggctgcttctcctagggtcgggtcaggcgggccaggggcatttcaatccgggtgtgtttccacggcttttccgaagggcggcctcccggcggagtgcagggtcatcgggagccccggacggctttccccagctcgcgctgcgcggactcgccccggagcctcagtgcgcctcggagaaacgcctgccccagaaagggagggggtatggagagaggggaagaaggggagagtatgagcgggggcg

SEQ ID NO: 132557 - DNA, 1130 bp, Homo Sapiens
atcattcaatatggctttattttctcatcggccggctgcatcccacaccagcctgagccccagacggtcagtcagtgcatccatcatgacgactcgtgctcggccccagggactgtggagcggcgggggctccggctgtgggggtggctgtgtcactgtgtcttggccttcacgagcagcctctggacggtcttgtagaggaggctgaagtgctggacagccacgtaggccatgccgaggtaggcagcaatgccaacagccaggagcaggtcaaagacggccggcttgactctgtacgcattcatcacttgcttcagctggtcgtagaagacaaactctgggtcccgcttgtcagccttgacgtggtgctgcttcacgtccttcaggtagcggctcaggtggtgctccagcgtgctgaggaaggtgctgtccttgtccaccagctgcgcggcccgcggctggttggtgagccagtccatcaccgagtccagctgctcctgctggatctgcatctgctctgtgaacaccggcatgtctgggggtgtccccttctctgtcaggttgtagatgactcgagtcagggcctctgcaatgatcctcgtgttacgggtcagggtcttagaatccacccgggaccgcacgtccatgatgctgctgcgctggccgtcacggtggctctccaggtgggacagcgtgaaggcgggcagtcggcggatggcgaagcgctcgtgctcccaggccagcacgtcctccgccaggttgatccgcttgtgcaccatggagaaccgtacctcagggaactggtgcgcggccaccgtctccagctcccgcaggaaggcgtgctgcagggtgccctcccgaggcggcttggacacgtgcaggtgcaggctgctgccccggcccacggtgtccaggcacagcacgaaggccacattgtcctgaagcaggctggagtctgtgtggtccaggttgtcttccagccagcgcttggttccctggtagttaaacttgcctcctccagacgcaaagaacaggaggttgtaggccctcgtgccgaattcgccacccaggcctcgctactttggttttttttctctcgtggtgtcggttaagcgcggggcggcagcgcc

SEQ ID NO: 132558 - DNA, 2246 bp, Homo Sapiens
  misc_feature (802)..(802): n is a, c, g, or t
  misc_feature (817)..(817): n is a, c, g, or t
  misc_feature (2128)..(2182): n is a, c, g, or t
ctaattctcacagcccccagaccaaacactggtggcgatcattcaatatggctttattttctcatcggccggctgcatcccacaccagcctgagccccagacggtcagtcagtgcatccatcatgacgacctgtccaggaaggaaggaaggaagctccctccaaaatgctggccccgtggcacccagacaggagcctgctggctagcatgcaagcactccccaaattctctcatggtgacaaggtggcagctgcctgggtcccagagtctcagcacaagtgcccagaggccagtggtgatgggcccttgggcaagtctctggaggaggcgggcaacccgcagggcagacgggagaagagggtcccctgccaacctggaggaaagaggggtggttgtcccctcacccctccaggctgcaggttctggagggcagaggtgctggccgaagaactggtggccaaagtgagaccccctggtcctatctggacagaaccccaggctcccatgggccggcccaggtccttcggacagcaaacacctccctgggccacggaagggagacggctgcgggtgccaggccaggacttgcccagctcaagtcccttccccaccaagcctgctgggcacgcactgggtaggttatattgttaaagaacggacccacccgggtctccctgagctcaacacgggccttccttctttcccacacacacagggcgcctggtctgcggggtggagggttctgtccaagggcttcccgagggccccggaccttcctctccgagttccaggaagggtggcnccagaggccatgccncaagtcctctccttcccagcaaacgttctcacctgacgcccccaccccgaacacatcctttctattgatgaggaagctgaggcccagggcgaggagcgaggggaggagccacaaggcctccccgggccacctcctgcctcccagtactccacccgcacccagttccccagggaggaccaactggccgtggcaaagcctggatggcctgggggcccagtaccgagcccaggaaacaccaggcactggctcaggactcagggcagggagctgggccagggccaagcaggtgacggccctgggagctgggctggggccgcagaggcacaggggccggagggatgggctgggagaagaggagtgcgggggaacgggggtttgcagtgggtcgggggtcggggaggccggggccctgccaggcccccacgaagcaaaggctgtcaatgatgacatcagaccctgcagtcggagaaggggaaggctgggtgatgcagctccccgagcccactgtcagggggtcgggtcactgagaccacatggggttactaaaaggctccaggagggctggaatccctagaaccccagggctggcactgccctcctccaggcaagaaggagcagagataaataaccatgtccacgccaccatcggggagcgggaggggacgtcctaggacagacacggagcagggagcaggtcaggcctgcagtccaggccccttgcggcaggaggcggtgggcggaggccgcgcgcgatcgggcagggggtcccggcgtctcctctttaatcgtgcatgtgtgcttacaccagaccgagggcggccggctcccaggattggggggctcgtccgcaagtccgtagcttggctcggggacgtctcccaagctgtcctccaaggaagttcaaagacacggaaaagaagaaacaatccccccccagtgctcggagagcaacaagaaaaaagctctgtaattcagtgttccaaccaccagccggggagggagagggcccctgtccctgcagggccgcccgcggcggggcagtgtccactcactcgtgctcggccccagggactgtggagcggcgggggctccggctgtgggggtggctgtgtcactgtgtcttggccttcacgagcagcatctggatcggtcttgtagaggaggctgaagtgctgtacagccacgtaggccatgccgaggtaggcagcaatgccaacagccaggagcaggtcaaagacggccggcttgtctttgtacgcattcatcacttgcttcaggtggtcgtagaagacaaactgatgggtcccgttnnnnnnnnnnnnnnnnnnnnnnnnnnnnnnnnnnnnnnnnnnnnnnnnnnnnnnnacagaggaaaaggcaccgaaccctgctctcgggctctctccccccagcccgctccggacactgc

SEQ ID NO: 132559 - DNA, 1440 bp, Homo Sapiens
cctgggtggcgaattccgacgaggggcggctacccatgccgaggtgagtccgcgggagccgccgccgccgccgtcccgtcccagctgccgccccgcgcggccccgccgccggccaggatgctggaggaagcgggcgaggtgctggagaacatgctgaaggcgtcttgtctgccgctcggcttcatcgtcttcctgcccgctgtgctgctgctggtggcgccgccgctgcctgccgccgacgccgcgcacgagttcaccgtgtaccgcatgcagcagtacgacctgcagggccagccctacggcacacggaatgcagtgctgaacacggaggcgcgcacgatggcggcggaggtgctgagccgccgctgcgtgctcatgcggctactggacttctcctacgagcagtaccagaaggccctgcggcagtcggcgggcgccgtggtcatcatcctgcccagggccatggccgccgtgccccaggacgtcgtccggcaattcatggagatcgagccggagatgctggccatggagaccgccgtccccgtgtactttgccgtggaggacgaggccctgctgtctatctacaagcagacccaggctgcctccgcctcccagggctccgcctctgctgctgaagtactgctgcgcacggccactgccaacggcttccagatggtcaccagcggggtacagagcaaggccgtgagtgactggctgattgccagcgtggaggggcggctgacggggctgggcggagaggaccttcccaccatcgtcatcgtggcccactacgacgcctttggagtggccccctggctgtcgctgggcgcggactccaacgggagcggcgtctctgtgctgctggagctggcacgcctcttctcccggctctacacctacaagcgcacgcacgccgcctacaacctcctgttctttgcgtctggaggaggcaagtttaactaccagggaaccaagcgctggctggaagacaacctggaccacacagactccagcctgcttcaggacaatgtggccttcgtgctgtgcctggacaccgtgggccggggcagcagcctgcacctgcacgtgtccaagccgcctcgggagggcaccctgcagcacgccttcctgcgggagctggagacggtggccgcgcaccagttccctgaggtacggttctccatggtgcacaagcggatcaacctggcggaggacgtgctggcctgggagcacgagcgcttcgccatccgccgactgcccgccttcacgctgtcccacctggagagccaccgtgacggccagcgcagcagcatcatggacgtgcggtccggggtggattctaagaccctgacccgtaacacgaggatcattgcagaggccctgactcgagtcatctacaacctgacagagaaggggacacccccagacatgccggtgttc

SEQ ID NO: 132560 - DNA, 739 bp, Homo Sapiens
cagcagcgacaatttaatatgcaccagtctcaagtagaaaataccaaaactctttccgaagaggcaaacaaaaagtatgatggatcacagcaacagttgtcttcagtagaaagggaattagccaataaaagaagactgcacaaacaggctgcaagtagtcaaagtgccacagaggttcgcttgaatagagctctagaagaagcagaaaagtataaactggagttaagtaaattaaggcaaaataacaagatgcatattgaagctgccaagatgctatctttcactgaggaggaatttatgaaagcacttgaatggggaaattcataagtgatctacttcagttagtctctatgacagtatgtgatggatacccattttacttattgtagtggtttgaattatttttattcttcataagtaatatatttgattatgaaagcaaaataatttcaaagaattccctttttagatttaggagattagctattagctctttttgagttgttttttaagttcttagcgtgacaattaagcacatcagataataaaattcttgactcttttcatttataattctcctcccttacagtagaccaaaaaagatgctttaaaagaaaattccaaatatttatttccctggctaaatcaagtaagtaaagttcgtaaacacagacagaaggcagttcactttggggtagagttctgtattagtcaaggtaaatatactgtcttgaggatg

SEQ ID NO: 132561 - DNA, 786 bp, Homo Sapiens
  misc_feature (20)..(21): n is a, c, g, or t
  misc_feature (702)..(713): n is a, c, g, or t
ctcacatcctaagtccaagnntagagacctgaaggtccttgcttcatgcttcatgctgcccagctgcggctcaagccctgtcagattttgagaaaaattatcaactaaaaagcagacagatcctgggcatgcgctagccgggtagagagacacagagctgtgtacaggatgtaatatcaccaacttttggagactgatgttcaaatgctgtagcgttacatacttggttccatgagccgtgcctttttgtatagtccacatgatatttcagaattggtgttgctgttcttcagcaactgttgtacaaaatgttcacatttaatttttctttcttcttttaagaacatattataaaaagaatactttcttggttgggcttttaatcctgtgtgtgattactagtaggaacatgagatgtgacattctaaatcttgggagaaaaaataatgttaggaaaaaaatatttatgcaggaagagtagcactcactgaatagttttaaatgactgagtggtatgcttacaattgtcatgtctagatttaaattttaagtctgagattttaaatgtttttgagcttagaaaacccagttagatgcaatttggtcattaataccatgacatcttgcttataaatattccattgctctgtagttcaaatctgttagctttgtgaaaattcatcactgtgatgtttgtattcnnnnnnnnnnnnctgtttaacagaatatgagctgtctgtcatttacctacttctttcccactaaataaaagaattcttcagtttc

SEQ ID NO: 132562 - DNA, 575 bp, Homo Sapiens
  misc_feature (537)..(537): n is a, c, g, or t
tttttttcaagtcatatgcactgtgttctttattgagatagaagtggggtggggagggtagcccataggcagagaagtgaaaggagggaggagtgggagccatctatttcccaactctgcctttcctcccagctgatgatggtgggggcgtggccaccagccatgggattaagaaggaagaccccccacccttagatacaagcacagtgctgcgtgagaaggttgggcactgtctcatacttgaaagagtaacctccatccgaggtggtgcggacatgtaggggcctcatggtccctgggagagcagcacagcagggctgggcccctggcagcaaggagtagggctgggctggggtagggggagccccagggactggaagggacaggtttggtgggatgtgcagcccacaaccaccatgacagtagtggaagatgaaactgggagggtacacgatccaccgttcccagcccagctcctggaaggagaatgttcagtgctactcttgtggcagttggcatgggcagccggttcctccnggaggcctctgcagcaggcgcagagcagagggagacca

SEQ ID NO: 132563 - DNA, 1101 bp, Homo Sapiens
  misc_feature (920)..(920): n is a, c, g, or t
  misc_feature (985)..(985): n is a, c, g, or t
  misc_feature (1042)..(1042): n is a, c, g, or t
  misc_feature (1046)..(1046): n is a, c, g, or t
tttaggtttcatgtttgttttatttaaagtgtggttgggtacggagagcagacagacacttaacaggttaaaatatccaaataaaatttactgcaacttttgtagaattttatttgtgctacaagacacgttgcataggaaactatttaaagcccctgaggaaaaaatatccatggtttaaggtgcaactggttttgtttcttctttggggaaaaggtgatagatggtctctgggagaaattatggggtggagttgagaagcacaatcgaaggttatatggtgggatgattggcgaattgtgtgtcctggttcttgcagcataaaatagctaatgtttgttctttttttcagtccgttggtcttcagtatctgaataagtagctatacaacgtttcaggccagtaagggagtatacattgattatactaaggaagtaacatgtttcaagaaagcagttttagagaatgagattcgggatcccaaatggtccctgacaactgcaggcacacaggaagtgtcctggcacgttgctaaggatcacctcactctactgatttgccagtatcagtccttcctcctgctcccttccaacacgcgacatctacgacgcattgtgagattcacacagcatgtctgcaccctaaagttattaatgcaacactgtgtcaagttcctgattttatgtgagtcacattttcatttttacaaaatgctcatcttgctcagatgatctttacattgtacaaaaaatggtttcatctaaactatgacttccttccgaggagacacaggtacaccaggaaggggaagagggggttaagcttagatgaaatgaaatgcagagtttggcaaatggcagctggcactctgcacatcagcataggggttgcttgtgagggcaccacagcatctgcaatangcacgagagtcagtgggcaccaaggctctggatcggtcatgaagtttcttccttgtcacagagangcagcaactctatgggaagcactgctttgactcaggaaaacagtacatggctcgtanacanggacactcatctcaatgcattgtctgtcatgactattgaactggcagggccctaa

SEQ ID NO: 132564 - DNA, 1463 bp, Homo Sapiens
aactttccaagacctttctttatttcctgagatgaataaataagtggcaatggggtgtggggatgtggtgaacacagaacaggaactggcagcatgcagctggcaggagggagctgtgatggccccacccctgtgaggaccacctaatcctaagcaggggccaaagctctagcagccaccattaaggaaaaacttttgaaattcacacattgtgaagcctgccagtccccgccaggtgcagagctcatggtatccaccttcagggctactttttaccccaggggccttgtctgcccgggcctgggtacctgggctgctctgtaaggcaacattccacccttccttcccccacctgcccatattccagcctcttcaccattcatgctgggtgaggcactcccaggtgcctgtgtcccatcagcaggagactcaccgagacacttggagcccacctgctgatagccagggctacacttcttacagcgacctggccctgcccccatgcagcctaggcaggccttggcacagtctcggcactcataggagccctcagtgttcacgcagaattggtcagctccacagttggctccctctgtgccacactcatcaatgtctacacacttgagatgatgcagggcccagcccttcttgcattgcaaacagtttgattcctcaggtcctgagcatcgggcaacagggtccaaacatagccgaacataccagatggctggcgttgcgttctgcctcaaagtagccaaggccacactggccacaggcctcacccccgtagccggcttggcagtcacagtgcccgctgccccctcgtgtcccttctccttcacactgcccgtagccaccgcagggcctctctgttcccccaggacagggaaggcaggagggcccgaaggtgcctgcggggcagcagagcttcagggaatctgagcacagccactggaagaggtccggggcctcctgctgcttgtgaaaccaccagctctccaccagctcctcactcagctccagcaggcggtggcactcgaagtctgacttgctgcacacaccctccagcacctctaccaggcgggtctcactgtctttgtatttggacaaattctcttcctcccaggcagtgtttccacctccaaagttgtcccggatggttctctccaggcccttgttaaagctgtcaaccagtccccggcaggtatgacacggatggggctgaggcgggggagaagactggggaggtggagagggctggagccagataggtcctgggaggttgaggaagaggctgaggccccagagcacagctgggactaggcccttcgggggccatggggccatctttacccaggctggggaccctcgtaggccacggagaaggaagaagcgaccgccccagcccgcgggcgccgtgggccgtctcctcctcgtgccgattcaccacccagcctcgtaca

SEQ ID NO: 132565 - DNA, 1315 bp, Homo Sapiens
tggtcaggtccacagttgcttccatctgtgccacactcatcgaatgtcttacacacttgaagatgatgcaggccccagccctttcttgcattgccaaacagtttgattcctcagctcctgagcatcgggcaacagggtcctaaacaagccgtacataccagatggctggcgttgcgttctgccctcaaagtagccaaggccacatctggccacaggcctcacccccgtagccggcttggcagtcaacagtgcccgctgccccctcgtgtcccttgctccgtcacactgcccgtagccaccgcagggcctctcatgttcccccaggacagggaaggcaggagggcccgaaggtgcctgcggggcagcagagcttcagggaatctgagcacagccactggaagaggtccggggcctcctgctgcttgtgaaaccaccagctctccaccagctcctcactcagctccagcaggcggtggcactcgaagtctgacttgctgcacacaccctccagcacctctaccaggcgggtctcactgtctttgtatttggacaaattctcttcctcccaggcagtgtttccacctccaaagttgtcccggatggttctctccaggcccttgttaaagctgtcaaccagtccccggcaggtatgacacggatggggactgaggcgggggagaagactggggaggtggagagggctggagccagataggtcctgggaggttgaggaagagcgctgaggccccagagcacagctgggactaggcccttcgggggccatggggccatctttacccaggctggggacctgcagatagagggcgtggagaggctttcactgaaggagtcaggccccacgcgagaaagaaaaaggtctgttctaaggtgccgtggcgctgggatctgcgttattacaagcaaaagaggccaaactgggtattgcaggggctgtggggatgggtggggaaaggcgcataagatgcaattccagaagagaaataagttatcctcgctagcatggggtggagaggaaagtggcctcgctccttgacaagggggcagaagtcagcctcttgtctgagggtctgataaagaatattaggggccggatccgcagaattagggagaagagatcagattccaagtactgaaggagaggaggccagaggggttgtcttgggggaggtgtccggaaccccgggcttggagggaggagcccggatccggatatgaagggaagggatcagattcagggcctcgcagaagggcaaaggcacggcccacgagccggcagagaaggatccagaccctc

SEQ ID NO: 132566 - DNA, 1423 bp, Homo Sapiens
gaggctctggtcataatggcgaccacacttttattgaatatctgttgtgtactgtccaggtcttcacatttgtcacctcatttaattctcatgttaagcctgagtggaaagcattatgaagcccatttgaggaaagagaagagtgaagttcagaggcaaaagtcatctgtccagggtcctttgccaaatgacagctggcatggaaccctcctaaggctgattcctctatcctccttctcctaacagcacttcaggggcaaccttctcctctatcttttctccactcaccatcaaagaagccctcaatttcccaggattctaggacatttccctaaggtgggggtggtgggacaggtagtaagactgatgccttttaactttccaagacctttctttatttcctgagatgaataaataagtggcaatggggtgtggggatgtggtgaacacagaacaggaactggcagcatgcagctggcaggagggagctgtgatggccccacccctgtgaggaccacctaatcctaagcaggggccaaagctctagcagccaccattaaggaaaaacttttgaaattcacacattgtgaagcctgccagtccccgccaggtgaagagctcatggtatccaccttcagggctactttttaccccaggggccttgtctgcccgggcctgggtacctgggctgctctgtaaggcaggtaggggtgcttaccccactctcaaaaataaaccaagctgtcctgagtgtccagcaggagggcagcccaagctctgggggcagcgtgggtgggaggaggtcctacaggtggtggccgcgattatctgcccttgatgaagccctccagcacacggtcactgcgctctgacaaccagtagccagtcatggccgccacagccccaatgaagatggcggtgaacaccaagtcgcccttagcagccagcgtggccagtgcacagatgatgatgccaaagaacatctgctgcagcaccaccaactcgtcttctgtcatctctgagaagaagcctgctgactctgggatctgctccttcacacagatgccttccatctgcttgtagccctcggcacagatgcagcgataaccgccctcggtgttttcacactgcttgttctctcccggacacacctctgtctcacactcatccacatcgagacacttggagcccacctgctgatagccagggctacacttcttacagcgaccactggccctgcccccatgcagcctaggcaggccttggcacagtctcggcactcataggagccctcagtgttcacgcagaattggtcagctaccacagttggcatccctctgtagcacacactcatcaatgtctacacagccttgaggtgatgcaggaccagcccttcttgcacttgcaaacagtgtgattcctc

SEQ ID NO: 132567 - DNA, 632 bp, Homo Sapiens
gtggctggagttttgctttattgaagttgaacggttggggccaggctgcgaaggagactgagagcgcgacaaggccctggacagatgcccgcgcggggaaggaaggctggcttaggagggggcgtcagctatggtttagcagcttccagcgaccgaaacctacatcacagccgcagcacacaattccaggaaacctggtgctcaatattgggatctcaggaatcaggaccggcggctggggtgaaagcctagcggtcagagcttaggagtgaggcagaagctgttagagactcttcgcaagtgaccccggggctacatatggatgattcaagagggagtctcctcgccagaaagttcacatgtttcactccttctggccttcataccaacccattgttaaaactggaagtccctccacctggggtcactgactccactgttttcagataggatggggaccctgcactggagactgctctctagcccctgggcaggagaggcacagacactgctacgcacgcggagcagggatcaccagcgctttgactgactttgctcgtccaggaggctggggacatgcgtgcccatgctcagcccaccccctcctgtagacacaatttggtcgcccattc

SEQ ID NO: 132568 - DNA, 644 bp, Homo Sapiens
ataatggatgggttggttctcgcttaaccacttgggtgctagtggtcttgaactgtgatacagtgtagacagtatttgtaaccttgcacagcctctgggggtaactgtcaaactgtcagatttaacttagactaatagaatatattgctgtacagtgtgtgtatatgtttatatatgagggcggaaggagagaggttttgattagactaatgctttgctgctaatcaaacttatagtatttttagagcactttgaagagtttatagaatctatgaaaaagatgcaatattcctcatcctaaatccctccttattacaattacctaaattgtttatgaattgtttaggattttgaaatgaaaataagttaaatcccttttttactcattgaggcagctcaatggaagtgaaatcagaatgccaaactgtgtatcatcctttatgccgggagaattatgatgaaaatctgctagattctcactgggcttaaactccttctcttcaatcagcttcttaaaactctggtgtaatgtcaagaaatacccttattgcgaaatctgtctacacttctagctacctaaagagcaatttattctacataattagtaatctgaaagttgaaattatactttttatttacttttc

SEQ ID NO: 132569 - DNA, 353 bp, Homo Sapiens
gcctttcccttccatagtcctcaacccaaactcacagagatagcacagttgactctaatttaagagttgtataaccaaaggcacaagtcctaacttgggtgagaaaggtataaaagttgtaaaattatttttgaaacaatagaaatgttagtgtccatgcccataagcctcagtttctttgtctgacatttaagggtttccacaatgtttcctctgcctattttccaactgcattttccacccttcccttaaatttctccagtcaatatggccaacacctgacctgtgcaaacgccatctgtctcctggtattttctctgcctatgtccctttctctctctgttcctcgtgcc

SEQ ID NO: 132570 - DNA, 854 bp, Homo Sapiens
  misc_feature (499)..(518): n is a, c, g, or t
gcaggctggtacggtccggaatcccgggatatcgtcgacccacgcgtcgcactattcaggaaagacccaatgctgaaggcaggtacaagtctctacacagcggaaggcaaatatatcttcaaggaaagagaatcattgatggccgaaatattttaaagtgttgagaacttctacttggctccctaaagctgaattcaattcacatctctcagaggttcaccggtagacagcttggaaactacgcttcctgtggacaaatgacttctcctgaggtggatcttggaaagcactagaaactaaacatcttcaccaggtgctgaagaaaagtgtcttcgttttaattgccaagcagggatgtggacattggatggtgactttcctgggtggttccccatagattcaccatgcctctaatggtgtctacacccgtcatactaccagctgagatggtggtgggcataaggagaatttgtgcctataacccttagtgtgttctggnnnnnnnnnnnnnnnnnnnnaaagtgtcgtaaaatactcataaaacatactgtcttcaccatttttaagtgcacagttcagtaacgttaactgttaatacattcataatgctgtgtggccgtcaccgcgttccatctccatagggcttctcagctgtgtaaaagtggaaactgtacccattaaacaggtaaattcccactcctcccaggcccccgcagccaccattctgctttctgtctctctggttttgactattcctcagtatctcatataagtggaatcatacagtgacttgtctttttgtgactggcttatttcacttagcataatgtcctcaaggttcatcccctcgttcc

SEQ ID NO: 132571 - DNA, 657 bp, Homo Sapiens
  misc_feature (467)..(467): n is a, c, g, or t
  misc_feature (511)..(511): n is a, c, g, or t
tacacagggtatggaggggggtggaaagtaaagtgaatctgctaatagctgtcatggacatttttcaggccagagagggaaggaacccaggcctttattaaaagtaatggcaaacatgcaattacttttgtaccagcctaatgttttttaggacaggaatactgcatactgtaaacacatctggctgagatgttaacatctgttcatgttacttccttcttactggcttttagtttctgagtaaagtaacactatgaactcccagcatgtacccagtaaacactaaaggacagttttgttcagcttcagcttcaagactaggcacagtatctttggaggctgtacacacagtgagaaggtgagagggaagggaaactggcaaagctgctgcctccctccagaactatgccccatgttgctcttctgttctattctcagagcattttgcttggttttaaggggtgtcncctttgcaagccagtcagggtaattaatggctttcctttcttcntgagggtccagatgcaaacctcctagcacctaatcctgggcttttgtagctctgctgcctcctctgttgctgtctgataccagcagtagagagcgtgcaggctttggggtgcaagatctatagctgctggctgctacatctatccc

SEQ ID NO: 132572 - DNA, 1075 bp, Homo Sapiens
  misc_feature (239)..(247): n is a, c, g, or t
tttgcatatgaagagatatttgtatttttcaaatgttaagtaaaacaagatgtgccaatatcataggtaaataaattagggaaaatgtgggactttatggctgtttttaatttagtttcacccgatcttgattcttgaattagctatgtttatatttttagttcttttttattcaactcagatttgtcaagaaatgtaacctctaaattgtgtagtacctctccaatcataaattttcnnnnnnnnnttctactttccaaaaagtgtcttgaattctctgaaaaggcacattaaactaatatgaacatcagataccagggggaaataaatggcaaagtaataatcatgaggttttaggtcaaagactacattatatatatttttatacccttctagtagagacatcctcctgggtgcatttcagtggccttctccagggaggaggttatttacttactgatgagtttctcgtcacgtcaaaaccagttcacatttgtctggctgctctttggttgtcttcattcgttatttatttctaacactgtattaaattgttagaaaagaaagtaaaacttgcacattcaaagcacatgatttgtacagtcacacctggcagtagcactgcacagttacaaatatgcacacacgttaactgctatgcataaatattgacagttaaaccagaacacaattgaaacagtgacataaatacctacaggattcagaattgttccagggtaatataaattattctacttgttcactctccccaccctcttgaacttgttagaagatttgctgctttagcagaatctttccaagattgagaaaagtgtatcaacctaggattttcattactatatagtcacataaatggaggaggagatatatttggcttctgcctctgcaacaattagtatgaacatatttctttctctagggaataataggttttaaacatttgagatatcatgaagcaaagtcagggtataccactacaatccccactaatctctattcccacattatgaaattgtacagaagaaagggtgtcattaaatcaaggtatccagat

SEQ ID NO: 132573 - DNA, 1038 bp, Homo Sapiens
  misc_feature (838)..(838): n is a, c, g, or t
  misc_feature (849)..(849): n is a, c, g, or t
  misc_feature (868)..(868): n is a, c, g, or t
  misc_feature (936)..(937): n is a, c, g, or t
  misc_feature (946)..(946): n is a, c, g, or t
  misc_feature (952)..(952): n is a, c, g, or t
  misc_feature (1020)..(1020): n is a, c, g, or t
aatcactgaatttaggatttacttttctgaaagactttggagagctgggcaggggcccgggttaggaaaggaagaacttctacccccaacccactgcccaaggcctgtcctcagtccctacctagcttctagggaaactattacacagtcctaaaaggatgcctggaaacactgcaggatttgtcaaactcacccacctcagagtcctgtccctagaactgtgggaaaacatttcctccttttattaggtcccagtttcagctaactagaggagcttttcccttgactttaaccatgccctggctcaagttcactcgcatatgtccctttgctcccgacgctgggtcaactcctgattgctcagtaggtagtcatcaatgaatgtgaagatttcctcgggggtgacaggttccatgtagcggtctcggtcaataccctgcttgtcaatcaacaccatgttgaagtaggagcgagtgaggcgctgaaattgcctgagctcctcgatgatgttggctgacagctgttgctcccggatgcgccccacctcctgaggtggctgtcccaccagttcaatgatggtcacatgccgcaaatccagtccacaggtggattgctgtagcatagagatctgcattttataatatcggttggaaggatcaggagctgagatgatgaggagtcgctgtttctcatagaattgatccaagagaccagcagctgagttgacgttgacgttatcttcataggagcaagattggtggtgaactgacactggcggctggctgacagaccgggagggtgtccctggcgatcataccgcatcacagtggtatcacangtggcacatanttgtccccgctgaggtgangtgaggtaccgtgctgcggaggttcaaagtgggcacgtccactgtacttcacatgacttgcactgccnngtgtagccngtcaangcatgtacgatcaatgtctccttcggaaatgaagccagtcaggcccgatgtcactgtgatggacacanagatcatcacacgtggtc

SEQ ID NO: 132574 - DNA, 1415 bp, Homo Sapiens
  misc_feature (115)..(840): n is a, c, g, or t
  misc_feature (882)..(899): n is a, c, g, or t
ccacactcagatttgtgcccgcatactcctccttgataatctgtaccaggatctccagtggcgtaggtgttctaccgggtgactcagacgatagtaccggataagcccagcgtcnnnnnnnnnnnnnnnnnnnnnnnnnnnnnnnnnnnnnnnnnnnnnnnnnnnnnnnnnnnnnnnnnnnnnnnnnnnnnnnnnnnnnnnnnnnnnnnnnnnnnnnnnnnnnnnnnnnnnnnnnnnnnnnnnnnnnnnnnnnnnnnnnnnnnnnnnnnnnnnnnnnnnnnnnnnnnnnnnnnnnnnnnnnnnnnnnnnnnnnnnnnnnnnnnnnnnnnnnnnnnnnnnnnnnnnnnnnnnnnnnnnnnnnnnnnnnnnnnnnnnnnnnnnnnnnnnnnnnnnnnnnnnnnnnnnnnnnnnnnnnnnnnnnnnnnnnnnnnnnnnnnnnnnnnnnnnnnnnnnnnnnnnnnnnnnnnnnnnnnnnnnnnnnnnnnnnnnnnnnnnnnnnnnnnnnnnnnnnnnnnnnnnnnnnnnnnnnnnnnnnnnnnnnnnnnnnnnnnnnnnnnnnnnnnnnnnnnnnnnnnnnnnnnnnnnnnnnnnnnnnnnnnnnnnnnnnnnnnnnnnnnnnnnnnnnnnnnnnnnnnnnnnnnnnnnnnnnnnnnnnnnnnnnnnnnnnnnnnnnnnnnnnnnnnnnnnnnnnnnnnnnnnnnnnnnnnnnnnnnnnnnnnnnnnnnnnnnnnnnnnnnnnnnnnnnnnnnnnnnnnnnnnnnnnnnnnnnnnnnnnnnnnnnnnnnnnnnnnnnnnnnnnnnnnnnnnnnnnnnnnnnnnnnnnnnnnnnnnnnnnnnnnnaagaattcggcacgagggttggagcggccgcggctgtaggcnnnnnnnnnnnnnnnnnncagattcacaagctttaatcattactttttctgttatacattgaattgtggatgtcctttaattagtaaaacagccactaaaattgtttttatggtttgctatcacaaaagtcgaaggattgctagaatgctgtttacctgtttcaacagctcccatcaactaccgctactcactttacatagaaataaaaacagctactattcattgagcctatttctatatgggaatcttagtgtcctcacacacattaattcactcaattctccccaaactctatgaggtaaactattatgcccattttagagatgaaactgaggtttaaagagattaagtttccaaaaatcagataactaataaggagtagagtgaatctgagtttaagtctcattgcagaaaacttaaagtttttacccagcatggtatgcgacctttcaaccactggaaggggcattgggaagtttgcatatagtatgccagtcatcaccaattatggggcctgactaagccttttgatt

SEQ ID NO: 132575 - DNA, 752 bp, Homo Sapiens
ggcataattaaaactttactgccatgctttaaacaatctattgaaccacataataaaaaatttctttttttatttgtgtctcaaaatttcttctaaattaaaaagatcacctataaacagatctttatttatacatttgataaagtaactttctttcaaaggcataagaagacatcacatgaaggaaaatgatgctggttaccatgggcattcaattccaagtcaaatattatgttgggacctttgctaacattatttcatttaattttccactgcaatcctatcaaggattattcaaccagtagagaaactgaggctcagagaatgtcaagaaacttgtacaaggtcacattggaagcaagtagcagaacgaagaatcagtcacagattggtccaactccaaagtccatgctcaaacctctatgctttatttcctttacagcagagacttttagatgaaccaatcactattgaaatataacctatttccatttatatttctctggtctggactatgagtactttatcagcagagtctgtttctcatacaactttgctttcccaattcctattagggtagaagtaacacattgttgctaagtgaaaaggggatattgaattcatccttgctgtgcctaaaagtgccgggacacattattctaactgggcctcacctggaaaaaggaccaaatttttaacgaacaagtttaaaatgcgtacataaaaacctttcaatgaccagtcctcgtgcc

SEQ ID NO: 132576 - DNA, 794 bp, Homo Sapiens
ttttgatttatgatagtaaacatcaaaatgatcgtattttaataaatttccacagattcatccagtttaaaaaacctttcttgatttcaggtgttttctctccttctccttgatcaaggttatttgggtttctatctgtgacttcttttgtttttataagggtctcgtatattttctgggctctgacaatttctttctgagcatcaaaatggactttttgcctggtcaggatgggaacaattaaattaaaatcattaattcgcttgtttaattttctgatgttttcttgaaactgctcacaaacatggttccactgtttcttttcagttggtgtcattggattcccaagttttttcctagacactaaaattgcctctctgagttgctcaatagtatcgcttatttccttttgcttaaggatccattctggttggtatccattatcgatcagtattcggttcaggttgtgagtcatgggatcaatgtaagaacagtcagaaaactttttcagaggttttcctttcccactgagattgtcaaagtctccttttgccatggattcttgaatgaggtcctccactaaacgttctatagcttgcgttatcttttgctgtttgctctgtcttatatttttaacaattacactatcaggaaaatactggctttgtagtttctgcttttgatattccatcacttgttcagcagcacggtctgccctaaattgcctataatgcttctctcgttgagttggagtcccaaaaccaataccttcaaaacttaaataatgtcggtgt

SEQ ID NO: 132577 - DNA, 926 bp, Homo Sapiens
  misc_feature (182)..(191): n is a, c, g, or t
gcaatccatatcttgtttactcagtacctgtttcattcagaggtcaagctatgtgacattgcaggctaaatagtgtgaattccaagacgccaggttattcaatcattccctgtgggcccccgcttttatggttatattaagtcagaattcattcaacagaggtgacagagttacaaatctgnnnnnnnnnntttatgttaacagtaaatctctagaggattcctcaaagtcagattgattttgaaaacgtgaagttttgtggtataaggagagctcatttagaaaatgttgcatctgataagaatttaaaattcccactgagccttttgaatttgtctgtacaaggactcccccctgaggctcaaaagagtagtgaacatcacaattcataaccatgccctaaggggtcatggagctgtgaacatcactgcaccaaaaattcaccatttccagagacagtgggttcatgactagtttctggctgctgactcatcaacgatattgaagaattccatttctggagctcactgatgagtgtcccacacagaggctgatgggctcactcaacttggtaccctctgttttattcagcccccaattccattttaggattatctgacatgtaggcagcaaatggctaaacagccacttgactttaaatataaaacagtagttctcaacgggggtggttttgtccccccaagggacatttggtaaagtctggaggcatttttgactgtcttgattgaggtgggcatgctgctggcatctagggggtggaggccagggatgctgccaactatcctaaaatgcacaggacagccgtccacaggaaagaattaccccacccaaaatgccaacagtgctgagtctgggaaaccctgatataaatggagaaggaattaaaagatttggactgtggggaa

SEQ ID NO: 132578 - DNA, 777 bp, Homo Sapiens
catacacgtaaagtgcatagaatagcacctggtacacagtaagccctctatattatcattcatggtgatgcctacctgctacgtggccggcacatgctgaatcctgggtttaatatgacggtgactgaggtgtggttcctgcccacaaataaccctggggaaaatgcagcaggtacagatggaggaacttacgcaaatcctcaaaaatctgaacctagaattgcagtgtgacccagcaatgcctctcctaggtatttacactgaaaacaggtatttagaactgaaaacaggtattcagacaactacttgtatatgaatgctcatggcaacattgttcacggtagccaaaaggtggaaacaacccacatgtccgtgaacaaatgaatggataaacaaaatatggtctatccaccctacgtaatatcactcagccagaaaagggaatgaagtacaacttatatatgctacagtgtgaaggaaccacagaaacagtatgccaagtgaaagaggccagacacaaaagggcacatatgatatggttacatttatgtgaaatgtccagaagaggcaaagcagattagtgattgccaggggcgggaggaaggggaaatggggagtgactgcctagtaagttatggaatctcctttagggaagatgaaaacattttgaaactagacagaggtgatggttgtacagctttgggaatgtactaaatgccaccggattgtctattttaaatgactcattttatgttttgtgaatttcacctcaattac

SEQ ID NO: 132579 - DNA, 696 bp, Homo Sapiens
  misc_feature (69)..(69): n is a, c, g, or t
  misc_feature (267)..(277): n is a, c, g, or t
gggggaggagagacccaaccgcttggtgtcttgtggggcggtttttcttttggggaaaacacgtgtgancccctgttgtggctttgtctctgtggggggcggccggccgcccagaagaggtgtttttaaaagttttttgcggggccgcggggtgctcccgccctatttttttgtgtgttctttccggcagtctgtgtgccccgccgctcaccctgcggttcgcgacgggggtgatcaggtaaggtgttattcatggtttagtggaannnnnnnnnnntcggctgatcttgtggggtggcgtgttcggggtctgtgggttttttgttcaggaaggaggagtgttcccctcacaaatttatttctcgtgggggtggtaagaggtgtgtcctctctcctctccagggttgggtgagtaggtctcaaaagataaatccactctgacactccaacctccccaagcctttgagtcccatcctctgccacgcagagaggcaggcctggcatttcagcctcactttgtgtaggtcactttttggtctgtgttgtagctcaccaaccaaccagtcaaaccccagcagtggtagcacgaggtccagaacctctgcttagtgggcccgtatcaataaacgcaacctgactcaattttttgttcctttccccattatccctactgtagggtctcctggttccccctgc

SEQ ID NO: 132580 - DNA, 744 bp, Homo Sapiens
  misc_feature (99)..(114): n is a, c, g, or t
ttttcatctgaaaaattgagtttataagaagtcatcacctttacaaaataaaaacaaaagccccaacaccacttggattccaatttattcatgtttccnnnnnnnnnnnnnnnncctctcttttaaagtctggttcagccccaatcacttggctgatgggggggaacacgggggcacgttggctggtggacatgggcatgcttcagagaaaagtgtctgaaacgaagacaggaatctgagaggcggctgcccaggcagatgacttctgagaacagagggtgtgtgtagcaatcctgctggctggagtggcatccggtggtgtgaagaatcagggggtctcttctggagagttgtgagagggacagagtctgtgctcttctctggcctttttgtttgttgtgtttttgctcaggaaaaagccaaggcaacaggaagagctgaagtctctttgtgcccatagcacagggattggggactccagccctgggctctccctggggacgaaccctcctcctctctgggctgctcagaaaccaaagcaaacttggcaagaaaagagaggggagggaaggagagagaaggtcaggaaggcacggggccagcagagccttccttttcaggacctgctgcaaattcaagaaccaggagaacatgtgacaactctaactcacagagcccttcaaacctcagaggcctccacctccctgcactgagcccttttgtcaaaaatggggagccaaatac

SEQ ID NO: 132581 - DNA, 1052 bp, Homo Sapiens
  misc_feature (209)..(257): n is a, c, g, or t
  misc_feature (782)..(783): n is a, c, g, or t
  misc_feature (792)..(792): n is a, c, g, or t
  misc_feature (798)..(798): n is a, c, g, or t
  misc_feature (800)..(942): n is a, c, g, or t
  misc_feature (978)..(978): n is a, c, g, or t
  misc_feature (1003)..(1004): n is a, c, g, or t
accttttaaaagagcatctttattatttccccaggccgatcacagccctgaacaaaagcatccgatacacatttgtcagtctggtggctttggtgccatgactgcctacacaggctgatgacagccactcggttgtcaccagacgcggtgtgagggaagggggaggggacaggggaactctcagagcaaacaatcacaaacacactgtnnnnnnnnnnnnnnnnnnnnnnnnnnnnnnnnnnnnnnnnnnnnnnnnnttaagttaagaagagtcccacagtgtggctgtttggcaacaaccagtccatagaagaggtagctgtggaggtcacacgcatgttcccaaggctcaggctcctgctcctccccactgggcccaccgaggtcgctgggcctcgaagcttctggacccctcaggcactcagctccaggtcgctgacatatttctggacccactcctcactggggtcagcacagacctgccggcttcgcttggttaggaagatgacaccgggcttggagcactggctgctcgtctcaaagtagtcagctatgaaattctgtggaatctgccgggaggtgtagctgaagcagcaggcggtcggcgtgtcagcagcaagtgatgcagagaactggttgcagagagccatggtgcagaggaggacagcaagggcagcagtggagacctgcatgattctgagcaggtgacggaatgtgggctcgagtgtcagcagagccaagaagggactgactactgtttgctgcccctcgtgcccgattcnntggctcganggccanannnnnnnnnnnnnnnnnnnnnnnnnnnnnnnnnnnnnnnnnnnnnnnnnnnnnnnnnnnnnnnnnnnnnnnnnnnnnnnnnnnnnnnnnnnnnnnnnnnnnnnnnnnnnnnnnnnnnnnnnnnnnnnnnnnnnnnnnnnnnnnttactgcgttgcgtcactgccgctttccatcggaanctgtcgtgcagctgcattatgatcnngcacgcgcggggagaggcggtttgcgtatgggcgtcttccgctctccg

SEQ ID NO: 132582 - DNA, 885 bp, Homo Sapiens
cgggcagcagagagtggtcagtcctttcttggctctgctgacactcgagcccacattccgtcacctgctccgaatcatgcaggtctccactgctgcccttgctgtcctcctctgcaccatggctctctgcaaccaggtcctctctgcatcacgtgagtctgtgttgttgttgtgggtatcaccactctctggccatggttagaccacatcagtctttttttgtggcctgagagccccgaagagaaaagaaggaagttcttaaagggctgccaaacatcttggtctttttctttacgacttttatttttatctctagaaggggtcttagccctcctagtctccaggtatgagaatctaggcaggggcaggggagttacagtcccttttacagatagaaaaacagggttcgaaacgaatcagtttgcaagaggcagaatccagggctgcttacttcccagtggggtctgttgttcactctccagctcactctaggtctcccaggagctctgtcccttggatgtcttatgagagatgtccaaggcttctcttgggctggggtatgacttcttgaaccagacaaaattccctgaagagaactgagctaagagaacagtccattcaggtatctggatcacatagagaaacagagaacccactatgaagagtccaggggaaccgagggatatagacagaaacaaagagacatttctctgcaaaaatgcccaaatgccttgcagtcacttggtcttgagcaagcctgcttcctcaactggtcggggatccagaagctgctgggcttttcttctgagctgtgactcgggctcattctcttcctttctccacagtgctgctgaacgccgacgcctgctgttccagtaacctccc

SEQ ID NO: 132583 - DNA, 546 bp, Homo Sapiens
  misc_feature (418)..(462): n is a, c, g, or t
cacaacttttatttttatctctagaaggggtcttagccctcctagtctccagttgctgctgacacgccgaccgcctgctgcttcagctacacctcccgacagattccacagaatttcatagctgactactttgagacgagcagccagtgctccaagcccagtgtcatcttcctaaccaagagaggccggcaggtctgtgctgaccccagtgaggagtgggtccagaaatacgtcagtgacctggagccgagtgcctgaggggtccagaagcttcgaggcccagcgacctcagtgggcccagtggggaggagcaggagcctgagccttgggaacatgcgtgtgacctccacagctacctcttctatggactggttattgccaaacagccacactttgggactctttttaacttaaattnnnnnnnnnnnnnnnnnnnnnnnnnnnnnnnnnnnnnnnnnnnnncacagtgtgtttgtgattgtttgctctgagagttccccctgtccctccaccttccctcacagtgtgtctggtgaaaccgagtgg

SEQ ID NO: 132584 - DNA, 654 bp, Homo Sapiens
ggggaaatttcttttattttccccaaataaactcttctcccttatggcatcatatatgaatgatgagaaatcctaaatttagtttattccataaagtttaagaaataggtcaggtttggcatctgtttatctccaccaatccctttgttaatcaacacgttgtggatgtgcaaatgccagcaactgttttatttaggaaaacaggcatggcaaagcaatagtcttttccctgggtcacaaactgagcatgtgacagagctgaaaacagcgaaaaagatttactgtctggagtcccattgggattctacttcctcaacagagcctcagggcatctgatttattataaagtactctgagtcataatgacttaattgtgacttttatttaactagcatgttcatgtaactagaatgcacctgtacatgaattttaaaatgtcatactgtgctatttttcttaattctgtaagggtaacaagtaactcagtaatgacttaaaacttgctatatattttcaatactaagataaaagttttaaccaaacttacaacaggcacattttggcagttagtgtaaacacaacattaacaagccatatgccagaagatgtttgcttccaaggccttagagaaaatgactgaacaagggcctacat

SEQ ID NO: 132585 - DNA, 1599 bp, Homo Sapiens
gccagtaactatacggttctaaggtagcgaggcctgggtggcgaattcggcacgaggcacagctgaagatggcgagcccggcgccttccggagcacgccgtaggagggatgcccggctcctgccgccgaggatgcatggcgccgccgtcgccgccatcgccccaggcatcccccgcagagcggcagcagcaggaggaggaagcgcatggaagctgtgtggcggctggagggctgcggggttgcaggtggatggaggccgcgggccgtgcggtggccgcggtaacctggctgctcggggagccggtgctgtggctgggctgccgcgccgacgagctgctgagctggaagaggccgctgcggagcctgctcggcttcgtcgctgccaacctgctgttctggttccttgcattgactccatggagagtatatcacctgatttccgtcatgatacttgggcgtgttattatgcaaataataaaggatatggttttgtctagaacaagaggtgcacagttgtggagaagcctcagtgaaagctgggaagttatcaattccaaaccagatgaaagacccaggctcagccactgtattgcagaatcatggatgaatttcagcatatttcttcaagaaatgtctctttttaaacagcagagccctggcaagttttgtctcctggtctgtagtgtgtgcacattttttacgatcttgggaagttacattcctggggttatactcagctatctactgttactgtgtgcatttttgtgtccattgtttaaatgtaatgatattggacaaaaaatttacagcaaaattaagtcagttctgctgaaactggattttggaattggagaatatattaatcagaagaaacgtgagagatctgaagcagataaagaaaaaagtcacaaagatgacagtgaattagacttttcagctctttgtcctaagattagcctcacggttgctgccaaagagttatctgtgtctgacacagacgtctcagaggtatcctggactgataatgggaccttcaacctttcagaaggatacactccacagacagacacttctgatgatcttgaccgacccagtgaggaagttttctctagagatctttcagattttccatctctagaaaatggcatgggaacaaatgatgaagatgaattaagccttggtttgcccactgagctcaagagaaagaaggaacagttggacagtggtcacagaccaagcaaagagacgcaatcagcagctggtctcacccttcctctgaacagtgaccaaacctttcacctgatgagcaacctggctggggatgttatcacagctgcagtgactgcagctatcaaagaccagttagagggtgtgcagcaagcactttctcaggctgcccccatcccagaagaggacacagacactgaagaaggtgatgactttgaactacttgaccagtcagagctggatcaaattgagagtgaattgggacttacacaagaccaggaagcagaagcacagcaaaataagaagtcttcaggtttcctttcaaatctgctgggaggccattaatctaggaatcagcttgcaacagagcac

SEQ ID NO: 132586 - DNA, 1110 bp, Homo Sapiens
  misc_feature (214)..(227): n is a, c, g, or t
aacgggtgatgcggttgcctttgaccctgcttatttgtctcactggttatctaatgaggaacaaacactaacctaaggtacacatcccatctgggcggtggcttcactcctgagtctgcaaaatcccaggaaacttgggtcttgctgcccatccttcctcagcacagggaacccggaagcccgttgcactgacagaggctcacaccctctgggnnnnnnnnnnnnnnctttaaacttcatttctcttccaacccattgtgttcctctgccctcattctttacctttgttgtaagaactttagctccagggaactgaggcagaggccctgtttgtggtctgtgttgacagccacccaccctctcccacctcatgctcctgcacctgcaccaccaaggttgatgccggattcgaagccaggaaggcccagtccctcctctgctctcctcaaagacgcaaaacattttccaacaagagctgtcacagtggcagcaaagcaggggccacccgtctccacagtccttcagagtttcagctgcatcctggtgtcccacccaggtcgagcccccaggcttctggaaaagagtgtgtgctctactttgatggaaacatggcaaggaatttaaagacaggaatgtattaatattattgaaggtgtgttcgtaacctctgattctgtggacttgccactttctccaaacgctcggttcctttgaagatttcttctgaacgtgtgtgcgcacgctgggcgggttcgtgcatacatgcggggaccccagactgtcagcacagggaagatggatcccatcctaatttttatcacctgaaggttggaaccagtgagggactgggagagagtgatttataagcaccaatatcaacttcatgtggatttttgacaaggaggggtagtttgtaatttcatttaaattcttttcagcagctggaaatattgcactatctgaaacactgaatctccttttgtaactggtgttcactgacaccttgatggctcttgatggctctaaaaagttgtaggattttttgtttttgtagctaacttatggattgagatgtgatcaaaggctttattaaatttgtacttcagcata

SEQ ID NO: 132587 - DNA, 1084 bp, Homo Sapiens
  misc_feature (46)..(46): n is a, c, g, or t
  misc_feature (1005)..(1039): n is a, c, g, or t
atcctggaggcaaaggttcattgaccgagatcgcggcactgcactncaaacctgggttcacaggcgaggactccctctccaaagacgaaagaaaaagagataaaaaaagttaccaggaaaactggcaagatcagctataaaacatctataaaaggcaatggagtagttcatatgcaaaagtatgataaaatggtgagcaatactgtacagtatctgcttattagttgatataatgtaaagtctatcacaacccaacttctactttagctacagtactgtggactttcaatgctctttaactagtctggtcatcataattttctcccccttcccccttctaaagtcatgaggaaaatataaaggatctatcataaaatatacatcaactgtattgttaccatatagaataacaaccagacttctcaataagcaacttatctattgcagtaagacaatatgctatgcttatctttctggattccccaggaagagatacttccaatctaacatcagatatttttactttctaaacagagctaacttgtaccatttttagaaacagatcacaaatgcaaatttgcttctggaacaaaacataacattgatttcttggaaagacttttggaaatgttgagaaaaagcttttaacatttcggatacatccaacagttcatgtctgaatgtaattaagcatccaaatcaacactgtcatttatctgcagggacttaatgtttttctaaaatactctttgccatttagattcaatcatgtcaacatttaccaacatttgagtaggtatactctttaagaaggtatattatactgccttcaaaatacttattacctgagtgttaactatcatctttcctccacctgaacaagcaccaaaaatgtagcatctcttaccagtcacagaatcaccgttcagcgtggcggggggtggtctccattttacagataaagaaactgaatgtgtggcggatttgaatccagggcttctgccnnnnnnnnnnnnnnnnnnnnnnnnnnnnnnnnnnngagacagaggttcgctctgtcaccccggctggagtgcagtgcagt

SEQ ID NO: 132588 - DNA, 887 bp, Homo Sapiens
ttttttttttcagtagaaaccattgaagtttattggcggtcacaatgcttacactgtatgcagcaaacacccttacaagtctatccgcaacctgatcacgcaagaaaggattcatcacacagtcgccagaggagaaggaaaaaaaattaacaggcttgtttctgggggtagaggaaagacataaaaataaaacctaattgatgagtgtcccgtgggcaagagctgaactagagatgtgtacaactagcagcaacaattgtggaaaaagtacaaggcaaatagctgtctccattaattttcctctgtaggttattattttttttaatattcaaaacatttattatggttttcattttataaaaatgtatattttttaagggatgggagaatgttaaatacttcatgctaggtagaccttgttattaagaacccttccactgtagtaacttcctccagttcatacattcatgagtgcagggtacatatataaatatccacacgcatacatccacacacactgcctcgagggctggggaagactaaaatttattggccacacacagcagggcctctggtggactcacccacattgctcccaggagagcagtgggctcacttccttctctctggtctctgccttcacacagaccaagaaccctacaacacgtcgttaaatccaacttttaaagcaagaggcatctgtctgaggatgagggtaagcaaagtaggaaatgagggtggagataagacaccattacacttttagctggagttatttatcactagcatccggctaaggattgcatagcagtaatcgacacctatgcctagaggtagcggacggctggtactcgctacgcggccctcttaaatcgagggcgaatcag

SEQ ID NO: 132589 - DNA, 1249 bp, Homo Sapiens
  misc_feature (821)..(881): n is a, c, g, or t
ggggaagggatacagagcttggtgggcctaacaccattcatattccttaccctctgtctctcctccctgtatcccacctatggttcagtgttgcaagagtctgggcttggggtctttaaaaccagcagggggaaatgataaaaagagagctgctttcccttttaccttgaggtattcgtccctcgggacagagcacagcttgtgcaactctggtagcgttaccctgtgacactgttttgaggtccacttcctttctttcctctgggaggaatgtcttctgtctttggtattatagttcatcttcccattcttttacttagtgcatttgtgcagatatttttaactctgtacatcagaagagagcccttggtaaccagttttgctcttcttctgccactcctccctgcttgcatctcgttgctggcagagtcctcttgtacttcaagaaagcaaagtgattttgtctgctcctagagcaggtccataccaagtaatagaggcactttagcttccacttggtgggtaaggcctgatcatagtattctgtcagataatgcctaagaatgaccgctgaagaacgttgacccattttgagtacccggtctcagtcgtcatttttaagtccagtgagcattgtggtagttgttcttagattgcagtttcttatgttttgagtttgaagttgattttcagaatgttcttagaaaagaactgcatttttttcctttgtggatctgctttgtttggctgctgggatagataagcatgggcttaaaaaatgtgttcctcccagttttcttgcctttcctgttgtactctgnnnnnnnnnnnnnnnnnnnnnnnnnnnnnnnnnnnnnnnnnnnnnnnnnnnnnnnnnnnnnaccaggcatttttcaaatttacatcaaagatacctgaagtgttggtatctgagaatatctgtcactcctcttatctgagaagtgaccttttatttttaagatgactacagacctattttttagatattgttttcaggtaccatttgaacaggcactttttaatttaacatctttccgtgttcgcagttgcgacacgttcttggccagtctgctgttctttgtcccatcttttgttccttgtccccgggatctttccttcccctatttgggtgtgccgttggggcgcttgcgggggttgtaccggcctcgccgtgtggggtccaacccctttttgggcccgtggttccctcccccgcggggggggaacg

SEQ ID NO: 132590 - DNA, 1134 bp, Homo Sapiens
  misc_feature (284)..(284): n is a, c, g, or t
ggtgcctgacttgatggcctcatttggggaaaagtggtggttattagggctttttctgaaatgtgtatctatgtaacatcacttaagtgtgcttaataaatcttctgtaaggattttagatgataaggctacaattcagaatcttctgaaccatctatgtaatgaatggggattatacattggaatttttgtcatgacacatttgccaaatcagtaggatatatttgttttggcagcctatcacgcagaggctagtggtatatttatgtaagaaaatgactgtnaatctcaagaaaaatctcagcagctaatagcaactcatttatttcattttggtcttaatgctttgtaaacaggtcaaaaaatactgtcatactctaagcttctattttccacactggacatacttctagttgtattctccatactattagactgtgtagtgatgtgacttccaagtagaatttaatctccccattgagtgtgtcatggtacaaatcactattcgtttttggtgttttttagggatgtgcaatgtgcattacataatgacagaaatactgagaaggttctgtgtgcccatgtgaaaggagtgggaggaatacagcagtttgtttttcaacatgaatctgatattgatttaaactgtgtttcacttacaagttttaaaaaaatgacagggtttaatggagcgtgcataaaaatgtactgttttcaccttttttttatatgtaaatgtttgtaagtatatgggcctatctgtaagtgggtaagtctgtatgtgtgtatcatacacatcaacctccatgtccttagtcctgggtttttgaaaaagtgttaaaacggacaagtagaataaatgttgctgtggaatgccatgctttagaacaaaccctttttgatcttaatgcttctgaaaactaggtctgactctggggatttttttccagccgaaggaaaatcacttccgttatgtccccctctaatttagccgctcgacattttacacaacccggatatgttgtatattttgacccaaagttacaggtaggtttaagagaatttttagccatgacttttggagcactattccattgtcagttattaataaagaattccattgcttagctaacc

SEQ ID NO: 132591 - DNA, 729 bp, Homo Sapiens
  misc_feature (609)..(625): n is a, c, g, or t
actctggcctcctcctttttcctcttaggaattgtttccaggtaacctaccatgtgcacttctcagctgctctgctcacctttgcccaccttcccgtgaccctgagagtacagatccgaataatgtggcctgtgcagagctcagagaactgtgaggactacccatgcctgtcagactctgctcagggacagagatggatgggtaaatggtgctgttggagacatttttatcttcataccaggctctgtttcatccctgcaccccgcacccccactcactcccctgagggggtaaaatgcagaggtggttgacctgaagggtctgattccctccttcccaagccttagggcctaccctggagtgctgcagtgtgtgagagctgctgcttgcttgtttctccactaggcctgctccaaatgcttagccaatctctggagccgacacagttgcctacggggtgacttagcaccaggttccattagctctccaagtgactgtttccacccagtacttttggcgcttgaggatggggggagggggattatttaaaataaataaaatccgaggtggcagtagaggattccttttgctttaaaaatctttggactnnnnnnnnnnnnnnnnngttttttatatataaatatataaagtaaattgttatgtaactattatctctttcttgtatgttctactccccctttatgatgtaattaaagaaagtataatgtg

SEQ ID NO: 132592 - DNA, 820 bp, Homo Sapiens
tctgcagtgccgcacacagacaggagaccagcattacagcaacaaccgaggggccactgcctgatgaattgccagaggggaaccaccagctcggctcttaataaccggatctgcatcctgctgctgcccagctgggctgagggccctgaccacagctaaggggagtcatcacagggcttcagggctggaattccagtgctgcaggatgagtggcgctggtctcgggatccgcagagtctacagggccctgggcttggacaccgtctcaggggtttgtgccttcagagcctggtggagcagccaagcaactgggcacatgaagacaaagtgcttggtgctggagcccggagcaggaggccaagagaggaacggagtgccatccaatggcactggcgtggcagacaggatcacagttactactcatggcagaaagcttcaaagtagccaggcccctcggtggaaggaagagacgaggcttctaattttgtttttactacttactagctgagtgaccacaaatgcagcctgttggaactcagaaaataacacccgaaaatgaaagcctcagaagcaaaagtgaccttctagccttctcctgccctcctgtgtctcaggcccgttttcccccaaggacggacatagaaaagagaatccctcctcctcaaggcgggttatagaaatcaaaaccccttttccccaaagctagccataaagcctacaaactctaactttccccaatttctgtgtaaaaactggctacaaataaattctcaggcctaggtggggcatggtggctcacacctataatcccagcactttg

SEQ ID NO: 132593 - DNA, 893 bp, Homo Sapiens
  misc_feature (556)..(556): n is a, c, g, or t
  misc_feature (560)..(560): n is a, c, g, or t
  misc_feature (564)..(564): n is a, c, g, or t
  misc_feature (567)..(567): n is a, c, g, or t
  misc_feature (569)..(569): n is a, c, g, or t
  misc_feature (573)..(574): n is a, c, g, or t
  misc_feature (580)..(580): n is a, c, g, or t
  misc_feature (582)..(582): n is a, c, g, or t
  misc_feature (591)..(592): n is a, c, g, or t
gtattttcctcatgagctcatgtgagactttgggctggcactgctgttacctgcctataaattgtttctccgcctgagtgcctgtttaaaaacctttcagcatctacaatagttgttgctttcttcctcagccagtagaacatatgccagtggcacagtcattgtttaattctaaagcttgataggctgctttgattcgagctggaggatttcgtttccctcgcagccttctgcaataactgtgtctgaaggacgtaggatatctgtgtcacaggtgaaaaaggtctgatggtcctgagctgacaggttcatgtcatagtatgtaagtggctctttaccagtcacccaagtgtatctcctatattctgctcctctgaaaagatttagagggtttctccataccttacagttcgtgacagattctgtctgctggtttcattttcgtgctgttcctcgaaggagaacctggttctgaaatgctgctctctgttcctcccatcagtggttgcaaatggcttacagatacttgctcaataaaagatgtgccatgtgcttntaantggnganangtannccaccnanatttccaannatataaaattatttagtcctgatatcaatgaagaggtccctgtaagtgccacatagaatttgggtgtcaatgaatttaaaaatacagtcaccgctgccaaattctcacacagcctcaaagggatcctcagggcgtaaagcagccccagccccgccacgaaccacaacgaggccccagtccccgccagcccggcccgcagtcgctccctccagcctagcgtcgggtttaggccagggacagatgcaggagacgctccaacagctgcggcttcacccacgccgccacgtccgccatcttgccg

SEQ ID NO: 132594 - DNA, 616 bp, Homo Sapiens
  misc_feature (590)..(590): n is a, c, g, or t
tttttagattataaacagtataaatttatttttaacagttctggaggctgggaagtctatgaccaaggtaccaacaaatttggtgtctggtgagggtctgctttctggttcacagacggcgccttctcgtggtgtcctcccacggtagaagtggcaagcagctctctggggtctctcataagggcattcatcacatccctgagggcactgccctcatgacctgatcacctcccaaagaccctacctcgtaacatcacattggtgattagaattttgggggaaacacaaacatgcacaccacagcactctgctgttttgagttttctatctcccagagccaaactcaatcttaaatacacagctctgaaaacacattagaaaagtagtcacctgacaaattctgtctgctggtttcattttctctgttcctcgaaggagaacctggttctgaaatgctgctctctgttcctcccatcagtggttgcaaatggcttacagatacttgctcaataaaagatgtgccatgcttatggaagtaccaccattcacatatatatattagtcctgatatcaatgaagacgtccctgtnagtgccacatagaatctgcgtgtcaa

SEQ ID NO: 132595 - DNA, 572 bp, Homo Sapiens
ggaacgaggaatattgagtaatttctagttagacgctgtaaacctgtgctattacggatttctcttcttcccatttttacagggctgctcgctccactgtctgtgaccttttgcagggattttgttcctctaaatcttaaatgttgcagttggcttaggtcggagagcaatcagggaatcaggaagccttctaaacctattattacaaattgcatctataaagaaagattaagaaagattgttgtctctggctcacactatcgattaaacacacatatacgctctgtccagtagcagatactgtgctcccaaggtcggcattgcctgggtgggaaatggctcaaacacaatccagggaagctctctatgatatgtgtttgacatccccctctagtttctttgtgtgtgtgtgttttatacatatcacaagcttactggtaatggtaacatttgccttgcccagcgagcaagacccactggtttttgagaaagtgggtccaaagatttctgtaggccttgtaggcctgattaaggttcatttttcatctattaattctcattatttggaaaaa

SEQ ID NO: 132596 - DNA, 1090 bp, Homo Sapiens
  misc_feature (953)..(953): n is a, c, g, or t
gcccttcaagtcttcagaaatagggtgtttgtcttttggatctgctgatttggtgtaaacgtgattggcttcattcattcccagtgtacgtacttgctgtaaatttatatacagaattaaatagcccatttattaatttataaaccataataaaaccagacagtcatttcccgtcaccagcagatcttgcattggaaaaggaaaataatatacaaatttcagcaacttcagagatttcaggaagcctgaatggaggtcgaattcattttggagttcaataatatgttcaaagaatcaggtactatatataatcatatagacaactcccgtaatatctccgcagtgcaaaattatccctgtttcttgtcattcaccagtgagaaaaatccaactgcagacttgactgccttcggtgaaggcacacggcaagttcttctgacaaataacaccctttgggattgactcttcacgttttacacagcaattgtctcagcttgggaccaaagtatttacaaagcaagcgaacaagagacgaagcaagagggacacttctgaggccggtggtgcggaaactcaccgccaaacagggtggggggccagtcacctcttcaggagtgtcccatgtgtcagctgacataacatcttaaatacagaattccaattgaaagaaaaacaaacaacaacaaaagaaacaccagtcaagcataagtgatgttacttcctctctgaacagggaaacatctcgctcgctgggagataaaaggtaaatctctcatttgctgctctcttcccctaagtgccagcaagaagctgggtgtggtgatgaagaaagaaggcagccatcacctaagaccccacaagccaagccgtggtcccctccgtgagggcacggtcctttcatgaagccgtaaaagagaccacagctcggacctgagcactccagggttacctanctggggtcttgtcatattcctttatgttgatttctgcccaagacccaaaccggacgcgtgggtcgacgatatcccgggaattccggacccgtaccagcctgcttttttgtacaaacctggttcatagtgtacaagct

SEQ ID NO: 132597 - DNA, 691 bp, Homo Sapiens
  misc_feature (26)..(26): n is a, c, g, or t
  misc_feature (44)..(44): n is a, c, g, or t
  misc_feature (85)..(85): n is a, c, g, or t
gaattcggcacgaggtttaaagcatntaatgaaattataacctntggaacttggtggttcacttctgaaatctatggcaatgttntgacagatttcagatgaaacaaaatctgcattcccaggtcacacacaaggactgtatgccatgcactcctatgacagcttgagttcaccctggagaggggagggttagaaaccaaatccttaacaagcctgccctgcaagactcaatactgtgcattaggaatgacctggtccctgcccacctctccaaatggccttaccccaagttcattccctttgctctctggagctctgccaacacaggctactcaggcctactttcaattcctttaacactcacttcctccagaggcctttgcccaagagttcctgctccctggaatgttctccttccccaggccccacaaccactgcctagtttcctcctgctcggcttaatcacacttccttaggaaagcctggccgccctgacaggtcagttctgtctattacacactctagtagttacgtgtacttctcctaggggctcttatctgagttgtaatttttcatttagttgtatgtaggacacattacctggagaatagtaggtgctcaataaatatttgttcactgcatggaagggagggagcaagggcacttcaggtaatgtgtcctacatacaact

SEQ ID NO: 132598 - DNA, 1016 bp, Homo Sapiens
  misc_feature (638)..(846): n is a, c, g, or t
tttggtacccacagactttaattattgatattccccctcaccgccctcagggatcgggagaagtcacacgaccatagggagcttggacttggtggtcgtcacggtgctggcagacgagggtctttccaggaaccccttgctagaatcagccctcatacaagtgtgctcagagatcccaggagcgatggcatcctccctgatgggtataggcaagttctgagtgaacagtagaagcctcctgcggaggagggccgtcctctaacctggggactcttaaatttcactgtgcttgagaataatctgcggaactttggttaaaatgaaatttctgggcctcatcactccccaacgcacaactacaggaaggctagaagtggcctgaatctgaatgtataactagttcccggtgatttctgtccaggtaatctgaggactccacctggagaaatgttgctctgatccctatcctagaccctgactggcagctaaagtggatgacagaggcagtttcccctcccctttcctgatttcctccacagaagaattgaactcagctgactgctcaggacaaatccatttcctggcatctacaagccactactactcccaggtggttaaaacctcgtgccgaattcttnnnnnnnnnnnnnnnnnnnnnnnnnnnnnnnnnnnnnnnnnnnnnnnnnnnnnnnnnnnnnnnnnnnnnnnnnnnnnnnnnnnnnnnnnnnnnnnnnnnnnnnnnnnnnnnnnnnnnnnnnnnnnnnnnnnnnnnnnnnnnnnnnnnnnnnnnnnnnnnnnnnnnnnnnnnnnnnnnnnnnnnnnnnnnnnnnnnnnnnnnnnnnnnnnagctgcattatggatctgccacgcgcggtgagaggcggttgcgtattggcgctcttcgctctcgctcatgatctctggctcggtcgtcggtgcggcagcggacactcatcaaggcgtatacggtaccagatccggagatgcagaagactgtagtaaagcacgaaggatga

SEQ ID NO: 132599 - DNA, 663 bp, Homo Sapiens
tttttttatgggacccacagactttaattattgatattccccctcaccgccctcagggatcgggagaagtcacacgaccatagggagcttggacttggtggtcgtcacggtgctggcagacgagggtctttccaggaaccccttgctagaatcagccctcatacaagtgtgctcagagatcccaggagcgatggcatcctcccgaaggtcactacccccatatgtctccttgggcttcttccccctctctttctggaacctgaccaggcagaacgcagcaactgacagcaacagcacgcccaggagcaccccaatcagagctccggccactcggccttgggagggttcggtcacagagagggtcagctcacaggatgcactgcccatctggttggtggccacacagcggtaggtgcccgaggaggtcagggagaggttggtgagaatgagctggccagacacctcatcttgaaccatgctgccaggagaaggtgtaggaaaagttccaagacgcacccagttgtacactggcttaggagccccctcggaagagctgcatctcagtgcagtagagcctcccacagaggtttgtccactctgactgcataagggattactggggggaaccagcacagtaaggttgattagccccaacccattggt

SEQ ID NO: 132600 - DNA, 1703 bp, Homo Sapiens
tttttttggtacccacagactttaattattgatattccccctcaccgccctcagggatcgggagaagtcacacgaccatagggagcttggacttggtggtcgtcacggtgctggcagacgagggtctttccaggaaccccttgctagaatcagccctcatacaagtgtgctcagagatcccaggagcgatggcatcctcccgaaggtcactacccccatatgtctccttgggcttcttccccctctctttctggaacctgaccaggcagaacgcagcaactgacagcaacagcacgcccaggagcaccccaatcagagctccggccactcggccttgggagggttcggtcacagagagggtcagctcacaggatgcactgcccatctggttggtggccacacagcggtaggtgcccgaggaggtcagggagaggttggtgagaatgagctggccagacacctcatctagaggatgaagaggaagtgttccacgactcattcaactcagtgagcagctcttgaaccatgctgccaggagaaggtgtaggaaaagttccaagacgcacccagttgtacactggcttaggagccccctcggaagagctgcatctcagtgcagtagagcctcccacagaggtttgtccactctgactgcataagggattactggggggaaccagcacagtaaggttgattagccccaacccattggtgtagaaatctggtgggttgttgacttggcagaggtaggttccagtatctgaggggtggacgtcagtcagtttcagtgtggccacccccactgtgggggggttctgaagcaggctgacccgctttgacttagaaccagttggatacagatggccattggtgaagtacaggattggatgggactcagagatgggtttcgcaggctgcacaaagctccactccagggcgaagctgtctcccaccgacgtgctgtaggtgcaggtcagctcggctgtcttccccaggggcgtgctcagcggctctgtgggtaccttcacctccacggccagccctggggccggggaccagagggaggtgggaacccagattccagtgatctggagggtcagggcccacccccgggcatctatattggaagctgggggctccctccccagagcacaaccctctccgccgtcaatccaacccctcccttcccaagacctgaggtttccgggaggggccgggtctttgtgggtaaaagagccggaaccgggccaggtaagagggtgtgtgtgtttagcagagaaaggaaaacactagccctgcggtggggtggttcaggcctgtgccgcggagaggcccaactcgctcagccggcttgggggtctctctcgtacgccctccgggccttggacaccccctctccggcctcacctcaggcgccttagggccctggcgcccacggcagcctcatctggcctggcggggacagagtgggtccgaggagccggggaagccaggcctatgccccccagccctcgccgtggtcccgcccggcccctcctcaccactcaggcacaggaagcctagcagggccccgcagagaaagggccccgggagctcggccatggccgcgtccggccgtcctgtcctgctcctgccaggtgggcggtcaaggtcggtctgggtgtcgggcagggaagggagcacccaagggcagccgcccgggc

SEQ ID NO: 132601 - DNA, 435 bp, Homo Sapiens
aagtgaagtccacttaggtcgttttctatctacccatcaacagttaggatctgctgggcttctaccatggacacagcatgttgccaagtgtctgggaaagacaagaatttttttaaattgcattttagataaacaatcacttagcattccagtgacatctattgtcttaagggaagaaaggatctgactgggtctccagaaagcctggaacaaagaagcaagagattctgtgatttctgctttctgaaataaaaacagaaaacaggcgtttaactgggctgccagttaccatctcagaaaggagtcaagaattattccagggccataagtgtaatagcttttcaagaccctgcaacctttgtgacttttgtatgtttgtctttttgtttaaccctatttccacgtggtgattagaaataaaatccttaaaataaa

SEQ ID NO: 132602 - DNA, 667 bp, Homo Sapiens
ttttccatccacagtaattttattttaaagttgtaggatgctaatatttttacatctgtcacataaaattaacatttttaagcaatgtcacattttaaattgtattacaagtcaagaaaacatgttattattttaacacatgatattttgatattatcccaaatagatacagttgtgatattttcatagtttaattataaacatatcttaaagtgccatttatttgagcactagtgtctacaacatttttctgtaactttaagcacatttcttaccacaagctgaactcttccaccattaagtacatctggatctaactcaggcaaaaagtgattgcatttcatatttctggaactagtcgtttcatgaaccccaacctgtgtgtgaagccattggtatgtatattctctattccgttctaatttttcatttgcagtggtatctttgtggatagggtcttcttctataccttcaaagtaaccatctcttctgggctgtaccatctttggtgattttggaagagacactttattttcattgtttttgaataaggctagacgcacagtggaatctatttttttctttagtttcttcgatttcattttctgtgccctcttcaacatttgctgagcagtagaaatatccttaaagcctcattcttctgaaa

SEQ ID NO: 132603 - DNA, 783 bp, Homo Sapiens
  misc_feature (227)..(236): n is a, c, g, or t
  misc_feature (708)..(722): n is a, c, g, or t
aattttagaaataatttaattttgtttatatcaaaagaggatatttaaagaaagaaaaaatttaaatacacatttttgggcagttcaggttgctggcatcctaccccctatctgaaaaagaatgcttgttggcattaggttccatcaattcgtttgtgatttctaaattaattttgaaggaaaccacaacttacttgaagatcctgctgagtgtctgtgtgcctgannnnnnnnnnctctgttcacagacaaagcacttccattggtcatggaaaaaaggtctaaatccgtgtcttctctgcttacaagtcttgccacaagctgaactcttccaccattaagtacatctggatctaactcaggcaaaaagtgattgcatttcatatttctggaactagtcgtttcatgaaccccaacctgtgtgtgaagccattggtatgtatattctctattccgttctaatttttcatttgcagtggtatctttgtggatagggtcttcttctataccttcaaagtaaccatctcttctgggctgtaccatctttggtgattttggaagagacactttattttcattgtttttgaataaggctagacgcacagtgggatctatttttttctttagtttcttcgatttcattttctgtgccctcttcaacatttgctgagcagtagaaatatccttaaagccccattcttctgaaannnnnnnnnnnnnnncagattttagcaaactctttctactggtctttgattcaggtgtccaggaagaacctcgtgc

SEQ ID NO: 132604 - DNA, 944 bp, Homo Sapiens
  misc_feature (313)..(340): n is a, c, g, or t
  misc_feature (372)..(372): n is a, c, g, or t
  misc_feature (421)..(421): n is a, c, g, or t
  misc_feature (552)..(552): n is a, c, g, or t
  misc_feature (554)..(554): n is a, c, g, or t
  misc_feature (561)..(561): n is a, c, g, or t
  misc_feature (575)..(575): n is a, c, g, or t
  misc_feature (589)..(589): n is a, c, g, or t
  misc_feature (689)..(689): n is a, c, g, or t
  misc_feature (745)..(746): n is a, c, g, or t
  misc_feature (780)..(780): n is a, c, g, or t
  misc_feature (820)..(820): n is a, c, g, or t
  misc_feature (832)..(832): n is a, c, g, or t
  misc_feature (845)..(845): n is a, c, g, or t
  misc_feature (890)..(890): n is a, c, g, or t
actaacaaaacattgctttattgaaatcttagatgtttccgcattttatgtctacatgttgagaaatggcctcaaccataatcaaaatcacatttcccttaaaagcagcatgttccagacactgtgttgagagtcttccacacgttatctcgccaatctaggctttattagtcttatttacagattaggcaactgaagctcggggaagttgagtaacttggcggggatcacatcacaggtagagcgtggagctgatccaccagctgatctgaatcacatctccctgcagactgatctgtgaaaccccccccannnnnnnnnnnnnnnnnnnnnnnnnnnnctttccggccccgggctcggaagaggccaaanaaagccttcccagctcactgggcagacctcagagtttctgctaacttancaaggttttgaggtctgtcccaaaggatgtggctggcagggtgtggtgacactgggcaaaatccttccttgtgaatacagctctcagaggcagccagcctcagtggctggttcagatttcccgccttgccnanttctggncctcgagggtcgcnttcccgatagtgtngccttagtaaattcggggtcaggtcagttgtgctgcctgtgtgaatttgttaccggctagttttcgaaaaccattcgtgcctgtatctatttgtgccaancctgtgtgggctgttggctcggtgactcacgtttatgggttgttggtaggggccgnncgccctggtgaaagggtcgtcctactccagtganataccgttaacgttttggataggggtttgtttagggttgnttccgcgccttnttaatgttttttncttgtcttggtgttcggtgcgggtcattatcttggtgtatttggntcagcatcctggtaatggggttgcaccttgaatgccacaccgcatagtgttggg

SEQ ID NO: 132605 - DNA, 393 bp, Homo Sapiens
actaacaaaacattgctttattgaaatcttagatgtttccgcattttatgtctacatgttgagaaatggcctcaaccataatcaaaatcacatttcccttaaaagcagcatgttccagacactgtgttgagagtcttccacacgttatctcgccaatctaggctttattagtcttatttacagattaggcaactgaagctcggggaagttgagtaacttggcggggatcacatcacaggtagagcgtggagctgatccaccagctgatctgaatcacatctccctgcagagcctgggatctgaatccaccactgaggctggctgcctctgagagctgtattcacaaggaaggattttgcccagtgtcttcacaccctgccagccacatcctct

SEQ ID NO: 132606 - DNA, 670 bp, Homo Sapiens
  misc_feature (537)..(537): n is a, c, g, or t
tttaacgttttaattttatttatttgggtaccagtgattgattccaaataaacctttttacaaaaaggcaataaggtggtttatggttacatatgaaatataataggataacaggtagatgagaaagtaaaatgaaaaaatgaggttaggagatacaaagtagacccaggaatgaggctagaacatttataatttggtgttgatgctgtcatctgataggggatgttgctcgtactgttgctctgaggggagtacatcttgagtattttcaaataatgatgtgaagtttgaggtaggtatctttccaatgttctaactttactagaattaggttattaagcttctctagtgcccttaacttttgttacatagagatttaaagaaaaagaaagtagtaccttagtatgtaccgcatccttcttttcctcagccaccctatcataacagaagttatttcccttccattctttatttggctttgttctttccctgtctgccttctccattttctcagttatctctaccagtggttctcanactttagactttttgagaatcacctggtgggttgctaaaagatgcagattagccctttcccagagactgataaacaggggccagaaacctgcatttttaacatggagcccaagtgatcctcgtgccgaattct

SEQ ID NO: 132607 - DNA, 573 bp, Homo Sapiens
  misc_feature (62)..(62): n is a, c, g, or t
aggcacagtcagattacccagttactcgcgtcccgcccccacatgatttatgtcacatgtcncttcctttaaaaaagaaaagacggtgtttcttctcagaagtgccctacgattttagacatatagctttaattgattctataaatatgtctaaaatgtggctttattcttctcagtttggaatgatcaacatacacaattgacatcaaggaggagagctgtaagtgttcacctttactcttgaagacagggtaaggtacaaaaaaggatcctggcctttctcatttcaaatgactgcatttcattccaatgagcagagattcttcataaacctgtgattttaatgtcttctacctaaaaagatgaattaatggcaaacaaaagtttacactatataaactaaatataatgcagagttgaaactaaagggctaaaatgacaagggctaaaaaggagaagatttgttacaaatttattttttatcacattgttccagcatttttaaagtcagttgtttcgtctttggcagcctctgccaactttacagtgaatccccatcaatgttctttaaaa

SEQ ID NO: 132608 - DNA, 498 bp, Homo Sapiens
tcaatgcaaggtatgtataaatataaagtttatttagcatagtgtttagaaaaataagttcacatcatttcagaaaacaaataaaacacttaattgtccaggcataaacccccattacagtacgacatacatacttcagatctctttggttgggtaattaagcacagaaatgttctgggacatgctctgtgtgccatcacctaacagtgcagtaaagactctgttaccccaccccatgacatacattctgtatagagtttctctttgtgtaaggcacagtaaaaccatattgagtatataattggttgcctctaaacatacagtacatgcaacaaaataatatttttgagaactctgaaagccaaaagagtcacatgctatacaattttgattaataaaatgtatggtggtaaattaacataaaatgtatcaattagatacaaagtaactgctaggctctattatctaagttttacaaagagtttaaaatatcttttg

SEQ ID NO: 132609 - DNA, 985 bp, Homo Sapiens
  misc_feature (237)..(259): n is a, c, g, or t
  misc_feature (552)..(815): n is a, c, g, or t
  misc_feature (900)..(900): n is a, c, g, or t
  misc_feature (920)..(920): n is a, c, g, or t
ccttctcaaaatattttttagagcagttttaggatcacagcaagattgagaggaagatacagagatttccaatatatccctcccctcatatatacatagctcccccgttatcaacatgccttcattattacatctatctcactaaacaaaattcttttttcagtatgcatctattttctctttcaaattcttgattcaataattcattgttttgatttcctggaatcctcttgagannnnnnnnnnnnnnnnnnnnnnncacactccagctgtgtggccgggtgcctgacaggccaaagaccagtggcagtccgcagtcctggggttggggacctctgatctaaagaactaactctataaaagagaaactgagatcaagttaggtcaaatcaatgaaaacatatctaggtgtcaaagctaagtcttctaaatccaatttgcgtcctcagttctggagggataatgatatttttgtgttttattccctatttaagatttgcagataatcagtttgcaaattagtgaagagtcaccataattttgtaggtactnnnnnnnnnnnnnnnnnnnnnnnnnnnnnnnnnnnnnnnnnnnnnnnnnnnnnnnnnnnnnnnnnnnnnnnnnnnnnnnnnnnnnnnnnnnnnnnnnnnnnnnnnnnnnnnnnnnnnnnnnnnnnnnnnnnnnnnnnnnnnnnnnnnnnnnnnnnnnnnnnnnnnnnnnnnnnnnnnnnnnnnnnnnnnnnnnnnnnnnnnnnnnnnnnnnnnnnnnnnnnnnnnnnnnnnnnnnnnnnnnnnnnnnnnnnnnnnnnnnnnnnncatgcagactctgagtcaatgaactctttcctttatattaccagctcagcagtcttatagcatgtgaaatgactatacatctcanagagatagagtaactaccanataatcatcttggagtgtagtgtcactgattccatgtctaagctaagagatgctactttagacat

SEQ ID NO: 132610 - DNA, 1303 bp, Homo Sapiens
  misc_feature (283)..(283): n is a, c, g, or t
  misc_feature (719)..(793): n is a, c, g, or t
  misc_feature (797)..(820): n is a, c, g, or t
  misc_feature (972)..(1045): n is a, c, g, or t
acttagaccttttgaatttgcttttaatttatacccctggccttgttctcttgaccaaataaaagccctaagagagcttccactgccagcagccttccaatttgctctgttcccccttgggccctgttgattgggcccagtgatcacctaaaaagagtgcaaagagtcaggaaggcttgtgggttcagtctttctgtgctaacaccaggccacatccaggcctgatgtactaactgatctccagttcattccttttgcaatttttggccttgattcatagttnctgattcttgattggctctgaaatcctccccattttcaaaagggatgcagtcaagcaggccaaagcgctccatgttagctaacaaatgtttgcaaatcataataatgtaggaagagaaccataaactaaatgaacaacaggcattagccctcatgctgtcacataagcattcctcaaaatataatcatgcttctaaacatgggctggcaattcaggaaagggccactgaaaatattagcctcgttcttttctctgtagagtgagcacagactattcctaaaccacattgcagtatgccaacattgtaaattaatgcctgattggttacctaaaagtaagacaatcttacttttaggcatctagaacactgagaaatccaggatggacacttaacattaccaaagattgatctattttggagttagttctttagatnnnnnnnnnnnnnnnnnnnnnnnnnnnnnnnnnnnnnnnnnnnnnnnnnnnnnnnnnnnnnnnnnnnnnnnnnnntatnnnnnnnnnnnnnnnnnnnnnnnntctcaagaggattccaggaaatcaaaacaatgaattattgaatcaagaatttgaaagagaaaatagatgcatactgaaaaaagaattttgtttagtgagatagatgtaataatgaaggcatgttgataacgggggagctatgtatatatgannnnnnnnnnnnnnnnnnnnnnnnnnnnnnnnnnnnnnnnnnnnnnnnnnnnnnnnnnnnnnnnnnnnnnnnnnttttgagaaggaataatgatgtggtaaacatgttctgttatttaaaaagagagacttttcatagccgcctccctccccctctacacacacacagagtcctgtccgtcttcattcccttactcaataatttgtacagacacagccactgggctccagtaatcctaaagtttctagaaaatcaagcacagaaaaaggttaaaaccctgagggaataaaagaatcctttgcatccattgcatttctcaggaagtgaactaa

SEQ ID NO: 132611 - DNA, 785 bp, Homo Sapiens
aaatttaagacagttacatgtctttattacataaacatcataatatttctcataggagttggtcttcagtttgcttgttgctttcgcagaatgtcaaatatctatagaaaatgtctaattatttatgaacaaacattcccatccctgccccgcaaaaaatctcattgcctgcaattcctaaccagattcctgagaaaaataataggatttattttatagcatcatacatagattttctttcaagatataaaaaaggacagacttctaaaacatgaatctcctttcgtttacaaagttctataaaaatacattaagtatgttcaaatgtttgttctttcactttatattccagtttaccagaaacaaaaaatggcagtacataaagatatgtaaaccacattaatcttgcagtaatataatgtcaacatcatcatgaacaccttgcagaagcagctctcctggatatgttacaatcttccttcgttttgcagctttaagagttcctaccaatgcttcaaagaggttggcacatttatcatcacggaagaggaccccaaatttcacgcttaactttccatcagcattttttgaacccaaacgatgaatttcctccactaagaggttaacctcgtgatccacattcattgctgcctctctgcgcggttttccttcccgccggagaactggcgccgcgtgggtctggacccggttaccttcttcagtgcactggggagggtgaggcgaaggaaggaagtggctgaggcaaagagaaagacggctgtccc

SEQ ID NO: 132612 - DNA, 1031 bp, Homo Sapiens
  misc_feature (756)..(807): n is a, c, g, or t
tggaataataaatacgttttctctgctacagtctcggcaaaggccacggccctagaacggggcgccgcctccgatgcagtctcagggccacagcctcagcgcagccacggcctccagggcccacccgggccctgcggccccgccctgggggcggcgggcagcgcccgggtcagacccggcagcagcggcggcgcgagcagagggaaggggccgccgagcgatggcagcagcgggcggcccgcgtagacctcgggcgctgggccctctgcgggggcagccggggacagcgaggccgggcggcgggagggtcccagctggcgcaggcaggctgccaggtggcccagcaggcgggagcgcacgtcggccgggacgccctcgcagccggccaggaagcggttcacctccgccagacactcgtggaagccggcgcggtacttgcccagaacggcggggtcggcgctgagcgcggccgtcacctgcacgcgacgcaggctccgcaggtgtctcacggtcatctccaggatgtccgccttctccagcttcgagtggcgggagctctgggggcggggataggcgggaggtccaggtcagctgcgacccagactccgggtctcgggccttcgcccccgacttacctcttttctgagggcgtccaggatgagggttttgagctgagcgaggctctcgtttatacgcgctcggcgccgcttctccatgaccggcttggaggactgcgggtcgggcaccggctgagtnnnnnnnnnnnnnnnnnnnnnnnnnnnnnnnnnnnnnnnnnnnnnnnnnnnnaccttgcggtgctcggccgcgctccggggcttgtctggggtccggctggcgctggccggcgctcctgccatcggcgaggcgctcggtttccccggcgtgtctgcggccatggtgcgccccgcgcctccccgtgccgggtggagcgcgccgccacggaccacgggcgggctggcgggcgagcggcgagcgcgcggcgatatcccgggaattccggaccggtccag

SEQ ID NO: 132613 - DNA, 1028 bp, Homo Sapiens
  misc_feature (591)..(619): n is a, c, g, or t
  misc_feature (727)..(727): n is a, c, g, or t
  misc_feature (738)..(738): n is a, c, g, or t
  misc_feature (792)..(792): n is a, c, g, or t
  misc_feature (805)..(892): n is a, c, g, or t
  misc_feature (898)..(898): n is a, c, g, or t
ttttttatttttcgggagaagaaaagctttactgggagaaaatacaacaaattccagagtgcatggtttttagcccaccctatcaccccaccagcaataggaacacagaccactcgatcaccacacattccctacctcagggagtaagtacagcagccaacatctggtctcagagctgctgggaaaaggggcaggaggaagaagtatctgggaataccattctctcactcttttcccctccttcctggcctgatttagaagaatctgactgtcccaggatacagaattcttggttggatcttgtggaactgggggcaaaaaaatagcagcaaaagcacttaagggcaagaattcagctgggactttcagactcagtgaccagtgataagacaagtgcccaagctccagccactgtaatcagtccttagattaatgacttattcctcaatcctaaaatatcaagaggtggacaaggtttaagtcaaacccaggaagtctttcccttcactcttctataaagaagggaactggcatgaagttggatggcttaatgatcaagcagctaaaggtaagagagacagagtgagagannnnnnnnnnnnnnnnnnnnnnnnnnnnnacatgtcttctgtcacaaagtaccacaatagtctgcagtggtggcaccaccctaaagtagttaagttttaaagacaggccagcctctggttagaagagcatccttggnaccccctacangactttaggagaggtaggagatctgaggcagagctgagaggattttccctcgtngcggattcttggnnnnnnnnnnnnnnnnnnnnnnnnnnnnnnnnnnnnnnnnnnnnnnnnnnnnnnnnnnnnnnnnnnnnnnnnnnnnnnnnnnnnnnnnacacanatacgagcgggagcataagtgttaagctggggtgctcatgagtagctactcaattattgcgtgcgccatgccgctttcatccggaactgtcggccagtgcattatgattcggcaccgcgggagaggcgtg

SEQ ID NO: 132614 - DNA, 633 bp, Homo Sapiens
cagccaagagttctctttattccctttgatcctcccccaaggtgagggcttaggcagctgtagaaccccaggaaagaacggaatccaggcaatctgtttagagaccccccactccaaatttatccttttcctttccttcccctaagatgtttccagggccctctggtgcccacactgtcctcttccttccacttgggggtggggaaatccttcctgcgaggtcagggcatttctctacaaagtggcctgaatgaggccaggccctgagaaggagccaccagctggaggaaaggggctcccaagccttgcttttaacacccctgcaaaacccccaccctcccaagatgttcacaaaaggtgagaaattcaggtacgaaaccatcaatggacaacttgaaaatgcatgttcctcaggcctatgcagttcccagagactcttgacaccggtctctgctgaggctcccagcctcagtttcccccacagcagcacgggccccactgtgctgctcttcaggtccccacagccctgcctttggttcctggacatttggtattctgccctccactctggtactatcagagtagggcaggctctggattaaagcttttagccggtctaaagctactttcttc

SEQ ID NO: 132615 - DNA, 1452 bp, Homo Sapiens
  misc_feature (42)..(61): n is a, c, g, or t
  misc_feature (233)..(249): n is a, c, g, or t
aacgcttaaatgttgcatttattaaggaaatgttaaataagnnnnnnnnnnnnnnnnnnnncggtgtcacggatgtcaagagcacttttgtggcgtaaaccgtgcagtcacgagctacgagttctattctgggtctttgtcccagggccagcaggaacgctagacgcctcccaaaagacccagtgggaaatgcactaaaagaaacaactcaccccgttcaaattcgcaggctnnnnnnnnnnnnnnnnnttctcccacaatgacaaaactgtaactcctcaggcaggcaaacaggccactggggcagaaaaagacttatcaaacatttgtattcaagcaaacaaacacaaaacctcttaaaacggcacgttacaatcaaaggtatttatcgcccctcccctccagggcagggggggagcaggagaagagtgggagcgcacccggacacggatttgtgagaccccatgagtctgctgcgtggcttttaacaggtcactcttccggtcacaaggcgatcagtgccgctgggtctctcccctgcccgccctctccacctgcccccagagcttggcccacctgcgggtggagaagggccttcgcaccgtcggtctccccgcattccaagtaagtagcagcttccaaagttctgcgccctaatcgccctcttcttgccactttctgctgagttcagagtctgggcgctctcctccgactgccaggcatgaggactttcagagggcgagggagaaaccgggtcgcttctttccgaaaggccgaagtcgagagaaataattgactccgacaggtttgcttcgcccagtctctgatagtgaggggcacagccggggctagcaaagtgggcaggcgtgggagcggtttgccgcgggggcagagggcgggtcagtagggccccacgaccaccgcctccacctccttttagacggcctccggtccttcacgaggaagttgatcatgccctcggacttgatgagcagattgcagccgaggaagaagatgccgaagaccacggtgagtgagagcacgcacatgaccgcgatctgcaccacgcgcattatgtacaggctacgctcgtccgggcctccctccgcgaagccgtcgtcggtcaccacggacgcctgggtgcagcagcgcacggctcgctccagcgcctcgctgctgttggccaggaacaggcccgccacgtccgtctggttgcctagggccggattcatcgcaggaacgggcgggcgccgcgagcggcgcgggtccgaggggtgggaaggcggcggcgctggaggaacaggtgccgggctgagcgctcactcgcagactagcgcgtgcgagggctcctcgctctgctttcgaaagtcctggccgtgggagtttcccaggagcctctccacgcgcgcagcagctcctcgtgccgattaaacacccaggcctgtacctagc

SEQ ID NO: 132616 - DNA, 439 bp, Homo Sapiens
  misc_feature (157)..(176): n is a, c, g, or t
ttggggtgagttgtttcttttagtgcatttcccactgggtcttttgggaggcgtctagcgttcctgctggccctgggacaaagacccagaatagaactcgtagctcgtgactgcacggtttacgccacaaaagtgctcttgacatccgtgacaccgnnnnnnnnnnnnnnnnnnnncttatttaacatttccttaataaatgcaacatttaagcgttttgttcctggcctcctggtggtcattctgcgctccccagcaggggggaacggggcggcggtgaggagtctggctcccggccagggcaattaaccctggagagctgcgattcaacttgtggatcccctggaggggcgagggtggggccagacggagaggccctgggatgactgagaaggagcccagcctcaggcacagtagccgtcctggaggcagcatcctt

SEQ ID NO: 132617 - DNA, 1176 bp, Homo Sapiens
gttgggttgtttggtttgggaaggggaggtgctatggaggttattgttgtgacatgttgcttcgaaatctataaaccacacaacaggaacaactgtttttctgttttctgtgacaaggagtactgcagggacaacctcacccagagctgcctgcacgatggtgcaaacatcttctccggctattctaaaagtaacaggtattccttcaaagaagctggcagtggaaggcccttcactgcatcggggagatactggagtcccatgctacggcgcacggcatagcgagcgagtgtttttagagttcctggagctgagcacagaacagtcagtttttcacatagctgcgggtctctggccacctctcgtggcatggtgccatttttcctcaattcaaagtgtccaacagctctgtggaggagctcaaagcaagagtcctctttctctgttccaagtcccctgactagcagagccaccaggcgggagatgggtgtctggcctattaggttgatgactctgacctctgcgccataatccagaaggatgctgacactctcaagatttcccttcatggcagcccagctgagcggtgtatcattgttgtaatccagggcattgacagaggccccgctctctaggagagcccgcacacactcagcattgttcttaaaggctgcccagtgaagtggggtatctctgttgccatccaaagcattggggtttgcaccatactccaataggacctccacacaagcctcatctttctctgctgcatagtggagggctgttcggttatacccatccagggcattcacctcggctcctttttccagaagtaactccacacagtcagcatctgacaccatacaggcacagtgcaagggcttcagtgtgccatgagtgcagttcacatctgctccccctctgatgaggtcctctacattatcatgtgggaaggaacggatggcagcaattgttcggattaagcgctcggagagagagtatttgctctgaatgctctgcataatataccacatactggaactcatcaaggctcaaggtgttcacatgctccaaactgccgaattgctgggctgaggtgggggttgaaagccgctgtcaaggcgtgacccggaagcagaagctgtcgggggcaggccctctgtttaccctcgtgcc

SEQ ID NO: 132618 - DNA, 652 bp, Homo Sapiens
ctcgtggcatggtgccatttttcctcaattcaaagtgtccaacagctctgtggaggagttcaaagcaagagtcctctttctctgttccaagtcccctgactagcagagccaccaggcgggagatgggtgtctggcctattaggttgatgactctgacctctgcgccataatccagaaggatgctgacactctcaagatttcccttcatggcagcccagctgagcggtgtatcattgttgtaatccagggcattgacagaggccccgctctctaggagagcccgcacacactcagcattgttcttaaaggctgcccagtgaagtggggtatctctgttgccatccaaagcattggggtttgcaccatactccaataggacctccacacaagcctcatctttctctgctgcatagtggagggctgttcggttatacccatccagggcattcacctcggctcctttttccagaagtaactccacacagtcagcatctgacaccatacaggcacagtgcaagggcttcagtgtgccatgagtgcagttcacatctgctccccctctgatgaggtcctctacattatcatgtggtatattatgcagagcattcagagcgaataccctcgtgccgagttcgacgcccggcctcgagcc

SEQ ID NO: 132619 - DNA, 903 bp, Homo Sapiens
tttacatttcctgttttcattttattgggaacttcaaagaaaagaaagagagacggattggttcccaagacaagccgtgacgtagactcccaacaagctggggaattctggacagcgaaggggtggacagtgagactcagcacagcccaaagtcaaaggcattagggttgttctgaaaatagagattcaagaagccctggaaaatgctcttatccatgagaagagcacagactgtggggtcccacttcatggctgatatccagagccgcagggctggcgtgtggctcacacagtccagtatcccatacacatccagccgctcaaaccagggccagaggaggtaatcaatcatggatatacaggttccaccaaagaaggtggtgttctgatactcaagaatctcttccaggttgctgaattcctgacgcagggctgccttcagatcagtgcattctctcccacatctcaacgctaccaggcactccttggtcaaatgtgggaccttacaaaatagctccaataacatcttttggcgagctcgttcataagggtcatatggaaacagcttccttcctggataagcatcatccaggtactcacaagcaataacagattcatagatcagttgacattggctggtctccaggacaggaatgtggccaaaagggtgctttgtatagtaccattcaggcttgtttctcaggttaatgttgaccacttcatgtctgatgtctttggccttgaggacgaggcgggtcctgtgagaataggggcagaacctcatgctgtagatgcggatcagcccctccgggactggccctgggggctggcttcctttccccagggtcctggtcgcatccccagcggacgcggggtcgacgatatcccgagaattccggaccg

SEQ ID NO: 132620 - DNA, 604 bp, Homo Sapiens
tttaagaaaagatatttattatttacaccactgaaattagtcctgtaagaacaatatacaccatgtttctttaaaaggatcaattcctttcaaatacaagaactgtataaagcaatattgtcaacacaaaacagtggtcacattacgtatctgcaggcttaagcattgcaaataatatatttttttaatcttatggctagatattttcactgaaacagtgttagcacttagacaagatatagctggaacagaacaaaaactttttgttcatgctttttaggaatgaatcagtgatatgtcccttttaaaaatttattgcctttaactgcttttatgacaatggttttaggaagattctacttagccaccaaaaagagactcattcttgttccttagtttttattcttcagtcttctgtttctcatactaagacacagctgtgtcaagactgacattttccagctttacttggacatgtacacacatacaggcctaactgagaccgctcagaatttagaaatgtaactagtggcatacagaagagaaattgtgtctatgacaaagaaataaaaaattcttggtaattttcctcgtgccgaattct

SEQ ID NO: 132621 - DNA, 1539 bp, Homo Sapiens
  misc_feature (68)..(294): n is a, c, g, or t
atcaatccgactaatataattttccccaagatgaattcttcccagcctgagtgcaatggtgtatcctnnnnnnnnnnnnnnnnnnnnnnnnnnnnnnnnnnnnnnnnnnnnnnnnnnnnnnnnnnnnnnnnnnnnnnnnnnnnnnnnnnnnnnnnnnnnnnnnnnnnnnnnnnnnnnnnnnnnnnnnnnnnnnnnnnnnnnnnnnnnnnnnnnnnnnnnnnnnnnnnnnnnnnnnnnnnnnnnnnnnnnnnnnnnnnnnnnnnnnnnnnnnnnnnnnnnnnnnnnnnnnnnnnngccactggagtttaaaggacagtcatgttggctccagcctaaggcggcattttcccccatcagaaagccgcggctcctgtacctcagaatagggcacctgtaagtcagtcagtgaagtctctgctctaactggccaccggggccattgtcttctgacacagccttgccaggaggcctgccatctgcaaaagagagttcactccttccgctattttcatgtgagtgtatccaatttccttgataaactccagtttcaggtattctgtcatttggaaagttttacacactcgaaagatgttggcaatgatatcttctggtgagtagcccagatgccacaagtgagcaagaatcttgtaggcttcgtcaatgttggcattcacacagtgctggatcatctcctttaccagcagtgggtggggctcgtcacagaccttgaacacgttctcactgttaatgaagccaaatcctgagaaggtggactgcaggttgttcagcgcctgcctcatgtctccctggcccgtgaagatgatggcttctaggccgtcatcagtgtagggtaccctctccttctcgataacattcatcagcctggtgaggatctgggcgtcggtcagctttgtgtaccggaggactgcacagcgggactgaatgggctcgatgatcttatccgaagcattacaagcaagggcgaagcgagtggttttagagtagatttccatggttctcctcaaggcttgctgggctccgtcggtcatgctgtctgcttcatccagaatgatgatcttatgtcggcctttgggaagagtgactttttgttgagcaaacattttaattttattcctcacaacgtcaatgcccctgtcatttgaagcattgagttccaacatggcatctttgagtgctgggcccagcagggcccgggccaagcacagaatgcttgtggtcttgccggttcctggagggcccgcaatgatgatgttgggcacatttccttcccttgcaaagacctctagcctgctcacggtgtcttcattcccgacaatttcattcagctttactggcctatatttttcaacccacggcagttcgtagtggccggcgctgccgggggccttgctgaaggcaggggcagggtcagagtcctgggcctccacctcgcccgcgccaccacagacggccatccacctccattctcgcgcctcctcctcgtgccgaattcaacacccaggcctcgtacctagccta

SEQ ID NO: 132622 - DNA, 1600 bp, Homo Sapiens
  misc_feature (1215)..(1215): n is a, c, g, or t
  misc_feature (1290)..(1290): n is a, c, g, or t
  misc_feature (1510)..(1510): n is a, c, g, or t
tggactacaggtggcccatgcgctatgaccagtggtgggagtgtaaatttattgcagaaggcatcattgaccaagggggtggtttccgggacagcctggcagatatgtcagaagagctgtgccctagctcagcggatacccccgtgcccctgcccttctttgtacgcacagccaaccagggcaatggcactggtgaggctcgggacatgtatgtacccaacccctcctgccgagactttgccaagtatgaatggatcggacagctgatgggggctgcccttcggggtaaggagttcctggtgagtagccttatccacacccccgtccgatcagccctggcccttggaaggaaaggccagccaaacctgggcagctcagggtgagaagacagtgggggagtgtttgtcacacaggtcctggccctgcctggttttgtgtggaagcagctttctggtgaggaggtgagctggagcaaggacttcccagctgtggactctgtgctggtgaagctcctggaagtgatggaaggaatggacaaggagacgtttgagttcaagtttgggaaggaactaacattcaccactgtactgagtgaccaacaggtggtggagctgatccctgggggtgcaggcatcgtcgtgggatatggggaccgttctcgtttcatccaactggtccagaaggcacggctagaggagagcaaggagcaggtggcagctatgcaggcaggtctgctgaaggtggtaccacaggctgtgctggacttgctgacctggcaagagttggagaagaaagtgtgtggggatccagaggtcactgtggatgctctgcgcaagctcacccggtttgaggacttcgagccatctgactcgcgggtgcagtatttctgggaggcactgaacaacttcaccaacgaggaccggagccgcttcctgcgctttgtcacgggccgcagtcgcctgccagcacggatctacatctacccagacaagctgggctacgagaccacagacgcgctgcccgagtcttccacttgctccagcaccctcttcctgccacactatgccagtgccaaggtatgcgaggagaagctccgctatgcggcctacaactgcgtggccatcgacactgacatgagcccttgggaaggggtgaggcgtgccgccggctgtgggaccagcaagactgcacgtgtccctcttggccttgcccagngcgaagacaccttccctgccctggtttggctgacgtgctcagcaaaaccccatgtgccctgctcctgtgtgcagnttggggtaggggcagctggcatggtcaggtaacattagtggcccagccccgcagacccacaagccctacccgtgctggggcttgcttcccgaggtatttcacctctttaagagggaatcttcccacagcccagcacaagctgccagggcctgagctacttgaagggggccatctaggtccccaacccatggactttgcctccattttcagctccgccttntttctcctattttctctctggctttcttcagccatgactcacaactaaaaactaaaacactggaaggtttagtggaaggccccctcccaa

SEQ ID NO: 132623 - DNA, 916 bp, Homo Sapiens
  misc_feature (41)..(66): n is a, c, g, or t
tcactaaaggggaataatgcttgcggccgcatacgcggtcnnnnnnnnnnnnnnnnnnnnnnnnnnaatgaattcatccatttattcaactttccggtatgcaagaacttcttttcatggagtgtcacggaggccctgagggaggaacggtaaactggggcaggggtgtgcatagctctaggaacaggtttaaggtctaggctttagagttggggaaaggggagctattacagatttcaaaaaggccataactggccttaacctgtgcaaaatcttgggggtgaaagggcagacagggagtcaggctggaggtgatggagaagtgaggaatatggggaggtcgtggtagtagagttcacattgagtggatgtgggttctgagtcagggaaggtggtggcactttgtgtgttgagactgggttggtagaagaacagagctcaccacatctctggtgtggagggagaggggaaaagagcagtatgtgagggcaggtgctcagctactgcttccttcttggagcaggtgaccaaggagtttggctatcactccctgcccatcccaggctccctgcttggggaggggcctccactaacctccagtgttttatgtttttagttgtgagtcatggctgaagaaagccagagagaaaataggagaaaaaaggcggagctgaaaatggaggcaaagtccatgggttggggacctagatggcccccttcaagtagctcaggcctggcagcttgtgctgggcttgtggaagattccctcttaagaggtgaaatacctcgggaagcaagccccagcacgggtagggcttgtgggtctgcggggctgggccactagtgttacctgtccatgccagctgcccctaccccaactgcacacagtagcgatcgggatcctcaagagtcgggc

SEQ ID NO: 132624 - DNA, 1361 bp, Homo Sapiens
  misc_feature (1146)..(1241): n is a, c, g, or t
tttttttcttttcaagagttgaatgaatttttatgtatcaacacagatggattccagtattcattcactaagcagaaaggaataattaatttttatcatccaagtaccatacaaatatgaagttaaaatataattttcattgatggtcagtactgtagattccatgttatgatgaattccaagatcatcaatttctgcatctttagtagaaagtgtacttttcagtgttacgatgtcttcaaagagtcttcggtttgtctttatcttgctctttttgactgcaaagtgcaaaagattcctgaacaaactgcctgcacattgggcactgctgaaaatacttcacacagccatcacacaggcatgtgtgtctgcatggtaagagtacccagttcacagtcccattctggcaaacaacacagtccttgctgttctcttccgatggctcaacttcactttcagagagtcccaccttttccaacaaacttctgtctgtgtttttttcttctgaagaggaattgttggagggagtgaaattattatttgcagacatgaaaagttgcttaagatcatgaaattgaccttgagccaagagtaaatattgatacaatattctgcaggatagtttataagtcctatcaggaatatgaatcactgacaccatggaaataatatcataaatttcccggtcatcctcatcagctaaggtcaatagcgctaccaatggatagcgagatctgggtactgtaccaaagtcttcaattttagtatctcttggtaactggcaatatatttcttctttgctatcctttttaataaaatactgttcctgatagagatattcactatacagagcatcttctaatggttggggagtgcttattctgaagcaattaacatgcttctgcagagcttcatatattttttgaacactgcacccccagtagcatgtaaggaggctatcttcaatggcaatcgtgttgtcaatggttatgccatgttgtaatttgaagtgctgaagactggatttagtgatctctaagccaaaaggattcttgacttgtctcattgtgctttttgaaaactcttgtgctgaactgggtctcttctgaattgtctcagaattactggtacatcccataccaaacnnnnnnnnnnnnnnnnnnnnnnnnnnnnnnnnnnnnnnnnnnnnnnnnnnnnnnnnnnnnnnnnnnnnnnnnnnnnnnnnnnnnnnnnnnnnnnnnatcctcaataccaggccggtggtcacgatgaagcaggtaagaccaccgcgacctagaaaagcggcgagtattatgaaagcgttaccagaaacagccgcagccatcaggatccataactcg

SEQ ID NO: 132625 - DNA, 988 bp, Homo Sapiens
atgaagtcgcggcgcgccgattcggcccgagggggattataatttctttaaaaagaggggaggggagaggccatggccgtcccagccaagaaaaggaagatgaacttctcagagcgggaggtggagatcatcgtggaggagctggagctgaagaagcacctgctggtgaaccacttcaacgccggggtacccctggccgccaagagtgcggcctggcacggcatcctgagaagggtcaacgccgtggccacctgccgcagagagctgcctgaggtcaagaagaagtggtctgacctcaagaccgaggtccgtcgcaaggttgcccaggtccgggccgccgtggagggtggtgaggcgccggggcccacctgaggaggacggagctggggggcctgggacaggcggtggcagtggcggcggtggcccagctgtagccccagtgctgctgacccccatgcaacaacgtatctgcaacctgctgggcgaggccaccatcatcagcctgcccagcaccacagagatccaccctgtggccctcggaccctcggccaccgcagccgcagccacggtcaccctgacacagagtgagtgacctctcctgcccaggcggcgtgcataagtgggaagggccagcaagctctggggtggcctggggaaggttggctgccaagggtcagaggtcagatgggggtcttggaagaccatgaggccttccaagagcagcacccagacagaagtgatcttgctctctttgggacttcctcagcacgtgggctggacttctgacgtgctggatagctcgccactgagcattgccaccatgtttgtccatgacttacctccacttgccgaactgggtggtccttgaaaacaagagaccgtgtctgtatccccacaggacttttcacagggcccggcttgtagtagacagccaggccatatttgttgaaaaaattgatgggaataatactgcccaagtgagacaacg

SEQ ID NO: 132626 - DNA, 505 bp, Homo Sapiens
  misc_feature (410)..(459): n is a, c, g, or t
ggtgcctataattgattggtcatttctgctggcttttctccaatgaacattgaaatcttcctgtatatgttaccaataagaaaactaccctggaacagtagaaaaacccaacaagagacttggcattcatcaagcacattatcagactttgagaacatattgaaggcattgactttgaaaatcatctctttttctcaagaagaaagcaatggagaagcaaatttgtttcattcagtgaatccccagtttggggcttgtggggcttagagacattgtgaaatcaaatcttgtgttatacttttctcctggctcactttttttgagaaggtttatgggctatttggctggtgagacacgatcccctcctaagaaaatgtaggtgctcagacaggtaaccactgctgctactnnnnnnnnnnnnnnnnnnnnnnnnnnnnnnnnnnnnnnnnnnnnnnnnnnactaggattttaaaaaatgtaatatattgcaggatttataaccagg

SEQ ID NO: 132627 - DNA, 651 bp, Homo Sapiens
  misc_feature (274)..(282): n is a, c, g, or t
actacttttaactttgcagaaagcttcatttttactgtgggttgtggttaagttaaaaacatttgactatgccatgtaggcgactccaacacttcaggaatacaaagctctgaaaagaggttatgtagcaaagctcattttcattcacattgataataggtcagacacatttttgaagaaaaaaatggacagagcgtaaaggataacagagtacacattttcattttctatgatgaaaaggaattttaaaaattgtctgttgtacataaaaacnnnnnnnnnaaaccaaacaacctagaattaaatggagtaaaatgtgagaagccccccttttttcctccttcagcagacaaaaccgctgtcaatagcttgatatgtgttatcacagactcttttctagggtgcacacacgcatatatgctacgtataggtaaacaagttttaactatacaaatgtaaacaggagtgcgtggttactgtgcaacttcttcgtcctgtcaatgtcttagaaatattttcatgtccacactagagagctattgtctttatctgctgcagagtgttatatgtcagaaattggtatgtactaattcaacaatttctgcatttctgtacatttatgctgtttctagttttttattatctcaaaaa

SEQ ID NO: 132628 - DNA, 678 bp, Homo Sapiens
ttttagtttgaccagaagtacatatttattcagcaaatatttttagtgtctattttatagagacaaataactccattccttctaagtaaatgtataggacagagaatccaccaaaatatacagcctgtatggtcctcaaacatttccatgctctgtatctgtgctgcagggggcgatatactcagcaaccacagactcatctgtctcatagtaatcatagactttaacaattgctggcttcaagtctcctactgggttgtcttgcagaaccatgaaggaaaaacttagcgtctgatttgtcacctgttccacataaatgaggacatggttgttgctcacttctgtccggctcacagagctagatctttcaagcatttttactgttggtttcaggggaataaaaccagataccatctttacatcaacaatcaccatattggaagcaggacggtttcctgtgtaactgatggtcagtgagatctgaaagctggtgtgggctttgtgtccatcgcaagtctggggcacagtctgcacttttaaagcaaatggggagtcctctttctctggaagaatattgtatttcatggatgtctgaagatacacacatctttccccagttactgttatgacatattctccagggagctctggcaatgagatctgctgcagtaataggag

SEQ ID NO: 132629 - DNA, 595 bp, Homo Sapiens
aacacactgtcatttatcaaaaataaagttcctgaggcattcacagagggttgtgatataggggcccatatcttgtttttctatgaaaacaatggaagaacatgccccttttgtgccctctgtagaaactcttccttaggaagaaggcctgattttcagcttatgtgcagagaaagcaaatagcacagaagcttgtttgctgaacaaatccagatgtaccccgagcccagcatggcccccagggagtgaccaatagaatgatatggaatcaccgagtcttagatgatgggcctatgtggggatggcaaacacacggcacatgcacccatttcctactcctgggcccgcaacagacatggataattgatccctttattccttcccactgagtctggttgctgtcccaaaatctctcctcaatcatctctggggacaattgagttagcatgtgagatgccccactactcccactgcttgggcagggaaagagcatgggcccggaagacagccagacctaggttctgacaaaaactctgaaatgcacttgctaactgaactagatacttagcctctcctcgtggcgaattcttgggct

SEQ ID NO: 132630 - DNA, 2416 bp, Homo Sapiens
  misc_feature (78)..(78): n is a, c, g, or t
  misc_feature (128)..(483): n is a, c, g, or t
  misc_feature (513)..(513): n is a, c, g, or t
  misc_feature (528)..(546): n is a, c, g, or t
tttcctcgtctccaccttgattacgcgattttgtctctcggggcgagctatgaaacgccgcacgcgctttttcggtcntgcctttctgcctatgctaaatgtcttcatcgtatccatgatctgtgatnnnnnnnnnnnnnnnnnnnnnnnnnnnnnnnnnnnnnnnnnnnnnnnnnnnnnnnnnnnnnnnnnnnnnnnnnnnnnnnnnnnnnnnnnnnnnnnnnnnnnnnnnnnnnnnnnnnnnnnnnnnnnnnnnnnnnnnnnnnnnnnnnnnnnnnnnnnnnnnnnnnnnnnnnnnnnnnnnnnnnnnnnnnnnnnnnnnnnnnnnnnnnnnnnnnnnnnnnnnnnnnnnnnnnnnnnnnnnnnnnnnnnnnnnnnnnnnnnnnnnnnnnnnnnnnnnnnnnnnnnnnnnnnnnnnnnnnnnnnnnnnnnnnnnnnnnnnnnnnnnnnnnnnnnnnnnnnnnnnnnnnnnnnnnnnnnnnnaagaattcggcaagagggatgttggagcgnccgcggctgtaggcnnnnnnnnnnnnnnnnnnnaaagatgaagattaagtttgttttatttattcttgattcctcttttgcctttcaaagtcatggtcatatattaagtaggagattccaggttctaaattaaaatatcgaactgagatgacagcattagaaaaccaggcccaggacctgggattctgggctgagacaaagaactcaatcccaaaacacaattttctgataaattagaactgttatttaaaaactttcctagtgttccaatgtattttcatactgtatatatgtaaaatacaaaaggagcactcttagtaaggatacttgtacatttgtaacttgaatataagaaaaagagaccaaaaaagagacaaaattcataaagcaaagcatgtttaaatgaatgcattcctcttacttcatcctgcttcagtattgctcaagaaaatgaagcaattatttatcttgatttgctaccaggaatttttttaaaagcaaaagaaatattacactatttagtgtttcctaataaaaaataaaatttcactaattatgtaaaaaagaattgtattcttttacatagatcaacacaaaacagtacattgcctttgtatgttaaatgctcattatgctgagtgacaattctaagagcaaagacatgtagttatctaaattttatgggtcctcaattactgcagatagacagtacagtaagagacagtacagtaagaaataaaaaggctgaaaggaatgttttggacattataggaggcctaactttgggtggtgtagatacagatcaaaatgaattctcaaaccagagatgggctttgtggaatgggcctaaagtagtgacaaggtagtcacagacttctggaggagggtacttgggctggtgtctacctggcatatttaggaacattccataacgagatgtaatatcagcacaattgattatttagcccaaggtctcagtcagttgatggctacaagtgttaagtaccacaagccccacctctatctctgtatgtttagagtgcaaatattttccccatgcttctcgtcccctagtcactgcccacccccctccgcccttccctattcttacaggacttagcaggctggcacactagagctctgtctttcaaagtcaagttcacatagaggagatacaagtaaccacaagcccttgagtaacccacgcaaagaaactgcttggctttggtctaaatgacttacatttttcctcgcttgaattagccggtaattacatgtgggcagacttagccagaatagtctaaatgatcaattagaaggcaaaaagaagttcctttctttaaagttcaagggtccctgttgaagagccctacttccaaagtgatgctcacatgggcccgtgcccagctctctgcggtgcctgagcatattgtacatttgcttaacgataatgaatttagtacttattttgcaggaaaatatagggcatttccattacatgcaatcaagcaaaaaggctgcaaaatgtgccactccattaattctaaacaaaatccttcccaaatgtcaccctgaaaccaaagtacagagttattataaatctgaaggaattaagagtaattttcatttgtacaaaggatgtgagggacatgactcctgccacacacacactattaattgggttaaatccaatttgccaatttcagtgtgaatcactaagctctgacctagcttgccccagtggtgagatcagtgggttctcgtgtttttggctcaggtgtacatgtgcacgtgctcagatgtgcacacacatacacaactttagaacatgcaaagaacataatgtaattggcttgttataaacatgttgtactgtctactattgaggaatgcatacttagct

SEQ ID NO: 132631 - DNA, 579 bp, Homo Sapiens
  misc_feature (405)..(419): n is a, c, g, or t
attttaaaatgtgaaaggagttctttttaatacccagggtaatacaatatccaagatataacattaagtaagtgataaaaaacaaagtgtatgacagtatagatgacatcctacttatattttttgaagccccgcagattttatatgtatgttttgtgctttacatgcctagagtatctctgggcagtgtgtgtaagaaatggatccaaacagttggcctccagggagaggtaatgggtgccggaggagagagggaggcttaggttttccactagatacctatttgcgctttttaaattttgcaccatgtatgtattaagcattaaaaataactgagtttaaattaacagaaaagaaaagaaaacccagtgagcctatgaagtgttgattctcattttgggttcnnnnnnnnnnnnnnnaaagatgaagattaagtttgttttatttattcttgattcctcttttgcctttcaaagtcatggtcatatattaagtaggagattccaggttctaaagtaaaatatcgaactgagatgacagcattaaaaaaccaggcccaggacctgggattctggggtg

SEQ ID NO: 132632 - DNA, 144 bp, Homo Sapiens
gcctgtaagcttttcccaagtgtgttcaactttatttaaaaaaagtgcttccctctctcccagtctttagtctcctttccacccctcccacttgaccactatccctactcctacctatctccccttttatactaataatctttt

SEQ ID NO: 132633 - DNA, 644 bp, Homo Sapiens
  misc_feature (576)..(585): n is a, c, g, or t
tccgcagcttccatccgcagttcttcagccgacccagccgggccacggcccacgtgcctcattatgataatcagtgtgtttttccttcgcagacaaagaaggatccttatgcgacgaatactggaatccagcagctaacctcattaacgtctgcagcctcttccttcgacaaggcccgagattagccctgtgttcattaagggaaaagggcggaaagtggaataaaactgaaaaacaccgccagggtaagggggaggggaggcccttttttgttagccattcattcactgaaatacttcgtgtaccttcaggatttaatcaccagcaaagggggcggtagggagggggcagggtttaccaggatgtgggaggtaaagaggttaaactcgatggaaggagttaaaaacccagaatagggtgatttgatgtgaaagcttcctgggatttgtcactgggataatcaatttaaaaccttcttcccatttgctttcttttagcccaactaacgtaaggggaaaccgtctttggatgtgtttttggtggcttttaatattttctaagtctccctttcctacnnnnnnnnnngtctttaatgtctttgtttagttattctcttctcctgtctctcctgcacgccaacactt

SEQ ID NO: 132634 - DNA, 711 bp, Homo Sapiens
  misc_feature (521)..(521): n is a, c, g, or t
  misc_feature (687)..(687): n is a, c, g, or t
cacaaacacaggtgttggcatactttattagatacaaacccacactcacattttatatattattgatctctcaggtaaaaataagttttctttaaaaagtatgacttcatagctaatcatcaaaagctggtagaatgacctgattttaaactgctcttttaaaaaattcacaactaaagtgtagtgatgtcaagtatttacaacactaaaaaggaaagcagtgaaagttggtccagtgtcaactctggaaaggggcatcgtcagtgtagagacgagcaacgcaggggacaggcacgctcacccctgtgccagcagccgggccctgcagctctcgcggagcttggcgacggtggccatggataagcttccaggttctgaaaatattttctgcataaacgtgtgacactccatcacgaaactccctttgggttatctgcttaaacttatcgcaaatgtctggaacgctggtggcttccaaaatcaactcctggtgctgcttaattaaggtcagggccacccgngaagataatcttcgagccttcgttaaacaaacagtcccagatccgaagcactgtctccacgggcaagatgtccacaaacaggcagatgaaccagcgggacaccagcagcgtccacagcacaccgagacgctccatcagggcccccacagccggcagctcgcccgcnacagctcccgaggactcctggtcg

SEQ ID NO: 132635 - DNA, 856 bp, Homo Sapiens
  misc_feature (377)..(386): n is a, c, g, or t
aaattttaataacacaaaggacaaaagaaaaataaagtggcatagttttgaacaactcccatttaaaattaattcatttcaaattaaactattcaactagtgaatacctatggccaggcacttataaaataatgttggctctagtacttagtaaatttattttgatgcatgaccaaaataaaagggaaatttaacatgtatatcatgtgaaaataggttttagtgaagaaataaaaactgagtttgattttaaaatccatgacactataaacaaactactacttcaaacataagctaaagttaattcataaagagttctatgtactggttaagaagaccccagaaactaagaaatgaacaacttgatatacactcannnnnnnnnnatacatacatctttaatgataaaagaagctgagatgctatgcaccaaaaaattcgtaagggtattgttattttacttttttcaaaaataatccaaataaactatagatacaaattctgcggcagggcaacctaacttatttcagggacagataattctagtgtacttaagatctgtctaagtatttaacattcctgtaagcattataaaaaagaataggaaaagaatgaagttgtctgttaaaatgttaacagtagttctctctgaaagaagggattgttgagagttttttaccttcttccttatagaggtataacctatacttatgaagtcagagaaagaaaaaatatttaagggtaaagttatgtattttaagttttgcatactgaatggtaagggatgtagattttattcttattgtgaatgagaagtgttgaaggattttaatcatcgagttgacgtgtcatgacc

SEQ ID NO: 132636 - DNA, 728 bp, Homo Sapiens
tcactcccaccagaatctgttgaagaccacccacagagactaagccatggtgcccatatgaaaggttctttttaattgtttttaagagcaatactttacagactgtcttgttgtcaaacaaggaacatggcactgcttaaacaccaaactgggaaaggctgcaaagagagcctgggctctccctgtgggagctcttcctctccctggtttggggcaatgagtcccacatctagacaggcttccccaacccttggctcagaaataggctgtgcttcaaaggagaagaccaagagatggacttgggccacatcagcttggtggctggttgaggccacaggttctcaagagagaacagtcagcttatttatcaaacaggatctgatactgactgcagtttaaaatccatgctacacctaagtggtgctgtggtccttttgcctttgtacccttcagtggccaatgccaggaaggggttacaggtggtggaggctgcaatgggatgggacacctctgtttctgaccctgtccgagtttgtagcttagcagtgagcatattctgagcataggcacagtggcaaagaacagtgtaacagccgctggtcaattccatttggtggcagcgcggtagcagcaaggaaaattcccaaacagctccatgtgtatccagcttttggaaaggaaagatttaaaaatcaataaacagatttcttttatatccaagggtttta

SEQ ID NO: 132637 - DNA, 787 bp, Homo Sapiens
taacttttagctacattaactaactttcttatttaaaaacaagaaagggagactaaacatctgcttaacttgtacacattttcagaattctttttaaaagtctagttaaagatgtttcttagaagttggagactgtttaccaacttccataaaatagatccaggtttttcagttccctgaagcagcattcagtagcatctatataaataaaggcaccttctgagaataaaactattttatggagtgtgtgaacacacttgttctgtcacctgggttcatcttgttgtgaagcacattaggtccaggtccttccctctgggagtctgactgtgaaactctttaacccaacaactcaattagcccctgtagataagacatgcttcccagagtgagatttttgaaatccccttttcatccagaactatatttacccacctattgtaactattcaaatagagcaaaattaggaggcttgataaatactaagaatttagtaccacagaaattatttattattttccctgtagtccacaattagtgataacgaatcctatttttgttaactgtgacataactttgatgtcatatgttgtcctatgtggttcttcctaagtaaactctgtactgattatatactgacttagcaatgtggccttggaatgctgagcaaaatgtggatgtactggttgtaaatgtttatatattgtacagtacctttatatatacacttgaggttctgattagagaaagatctgtaaattgctcattattttttatatagatattt

SEQ ID NO: 132638 - DNA, 1102 bp, Homo Sapiens
  misc_feature (121)..(121): n is a, c, g, or t
  misc_feature (249)..(282): n is a, c, g, or t
  misc_feature (313)..(322): n is a, c, g, or t
ttaaaatctccggtagggtaagttggttcccaattaggttcaccccccaggaagttaaggttcccttcacaaaaggatcccaaggttagcaagtttccccagtcacggacggttgtaaaanggacggcccagtgccttagcttataaatacgactcccctataggggaccactttgtaccaagaaaagctgggtaccgcgtaaagctttggccccctggaggggatactctagagcggcccgccctttnnnnnnnnnnnnnnnnnnnnnnnnnnnnnnnnnnggtgggctcaagttttatttggaatcatttnnnnnnnnnnttcacagcagcataagtggggtcagaaggaccagagggtgggtggggccgagggagggcagtgaggttggtgcagcagcacaggtggacaggccaagggtggccagggagacgagggcaggagcgtgggcagccgcatgtcactcaaggcgggcactccttgtgctaggaggggatggtgtccaaggcagaggagcgctcttcaggtcatccacgctggcctgtagccctctagtctcccccactctgggcctcctctgccacttcctctttctctttggatgcctcaccctcctgttggggggcagatggcctcaagtcctccttgcgcaccaccccggaggtgaccgcgatgttctccgcctcctccacggtcttggtggccacagtgttgacgctgctcaccacagcctcgctcacggcgttggcctgctccttggtcttctcggccactgaggtcacgctctgtacaacattctccttggtcttggctcccacatacatgaccccctccttggtcttctcagctgcttccgtcaccccctgcttggtcttttccaccgcacccaccacgccctccttggcgatggagaagcccttcttgaagacatccatggtgggtgtgcagggttgggctgctgcaggcaggacggagctggatctccctgcgagctgcgggcttgagctggctcgagtgctgccgcagcggctgtccccgatgcggacgcgtgggcggacgcgtgggtcgacgatatcccgggaattccggaccggtaccagc

SEQ ID NO: 132639 - DNA, 1437 bp, Homo Sapiens
  misc_feature (999)..(1046): n is a, c, g, or t
  misc_feature (1277)..(1277): n is a, c, g, or t
  misc_feature (1306)..(1306): n is a, c, g, or t
  misc_feature (1345)..(1345): n is a, c, g, or t
  misc_feature (1387)..(1387): n is a, c, g, or t
ttttttttaaagatctgaagataatgcatttaataaatcctaactattcacattattgcatctgtatatattttaattttgtacaacattgtctttttcactagtcacacgaaaaatacatgaaagtgctctgataattttaaagcatcatataaattaaaggtgtcattggtaataatctcatatgcatttcttaacccttccatttccttgaagactgagacgacatcccatgtcccacagcatattgcacaatgatgggcaaacaatatgccctcagtaagtgtttcttgtttgactgaagcaacatggcatagcataacgagcacagacatcaggagactaggctgggatgaaattagtttaaggcaggagagccagtctgcagtcataatttattcattcaacaagcatttgttgaacacattctatgtgctagatgttgagttcagataatttcatcaaaagaagattgtacaagttctgacaaagccaagcccctgggcagtctccacaatcccagcccactcttaaaagcacaaaggctgtagccaccattgtctgccactggacaaacggccaattgctttggggaaagccccatcctgcctggctgtaagtagctctgattgagggttggaggaaggagtaaaagtgagggagtgggctgcttccaacagaactgacaggaactactacctgttaatttatttttatttacactgaatcagtccacagttcaatcccctagcctatacgatgctctttcccctggccatcatctttccctccctgtcacctacacagtcaacctgtcccaaaccttggcccacttcatcctgcccttctgcggtcacagctgcctgctgggtgggagtccgggggaatggtatgtgtggtcaccagagggcactgagtgggcttcagtggcatgtgaatcctggcagagtctcggatccccgatggggagaggagaaagcacaagccaagacaacgagnnnnnnnnnnnnnnnnnnnnnnnnnnnnnnnnnnnnnnnnnnnnnnnnaactccagtgtacacattgacagtctctatgttggcttcaccagcgcttctctgtttgtctcgtccctggatttctaacagttgcctcgagatgctctggttctggtctgtcaggaaagtgtggaaggatccagcccatgggctgtgtgcctgctgcctgtgggatggtacacttgccaggctccgcctctgtcagaagcactggccaaagtcaaagccacaacagcatcncagcccatgagactcctctccagctgtcncagcagaagtcaggcccctctcagtcgctgacctgctanaggagaggatgtctccattgtctgggcgactaccagattcanatttgcatctctccttttcgtactgggaaggagacaagagctggggtgca

SEQ ID NO: 132640 - DNA, 686 bp, Homo Sapiens
  misc_feature (415)..(415): n is a, c, g, or t
  misc_feature (656)..(656): n is a, c, g, or t
gcatgagactcaagattctatttattctgaggcaaaattccttcttaactgtgaacctgtgaaaccaaacaagttatgtgcttccaaaatacaatagtgggacaaacataggatggatattactattccaaaaggaagaaagagaggaagagaaacagtcatgggactcaagcaagtacaaatcatagcaaaggaaacgtcctaagatcttacttaaggctggagaataatgcctttaagataatcatggcccactggggcagcaccacctccctgaccccgttgggtggaggacccattaaaagtggcagcatgacccccacaggcagggaaggcactgcccatgctgtgtctctctgctgtggccctgcccatgaggcaatttcctgtggagggtgggggttgcactctcagntgatctgctggccttctcttccttcactgatcccctgggtggttggtcctacctttagaaattaaaacagcacccctcccccagcccatccactctgggcttgtggtgggagaggcagccttggggatatctgaattgcctttaggatctctcttcttttgtcttggagaatcatgcatgtttgcagtgaaattgttctatggtttggtcctgtggagtctaagaatctgacatctttggncattttgtcctgtttttgtttgtttccttt

SEQ ID NO: 132641 - DNA, 910 bp, Homo Sapiens
  misc_feature (61)..(79): n is a, c, g, or t
  misc_feature (910)..(910): n is a, c, g, or t
gtgccaagctaaaattaaccctcactacaagggaataagcttgcggccgcatacgcggtcnnnnnnnnnnnnnnnnnnnataaaggcatttagtttatttttcaaaaaaatactttgctagaagggttgagtactgtaattttacatgatcataatctctaaataaattctttttctgaccaacaggtaccagttaagtgaacagctcgtctaggtctgcttttgtaacacccaaatacaattagcacttctctgctggtattccctgggccgtcttaattatctagaggccaggaggcaaagcctagcacgtaacaaagtatgtgctttgtaactgctgattaattcagtttcttaactaggcagagcaggtcatcagtgtatctaattcacactattaatacactgtcttgctgaagagtctgacctgcccagaaccccgttatggctagcccagggaagcagtaaactgcaaagcagagaaaaggggcagctaagatgaggctagtgctggctgagtcccagttaggtctgttactgttctgttccaactataaatccaggatgactgttactcagattcagtgctatgtagaaaatagaatgcacagccaaaaacataatttggggatgactggcagcacctttttttccctttcttaagaggctaactgaaagttgattaggattcttgagagaacgtaactaaaagttgaatcaaatctatattcactgctatagatttaataaaaggaaagaccactgtaaagatgcaactacaacctgatgcgtctgctgaggagaggactgggcagcttgttgaaggctcgtcaaaagtagcgcttagttatcacaaggcctgcactcaacctcaaaagcgtaaggtttaggccaggcacggtagctcatn

SEQ ID NO: 132642 - DNA, 505 bp, Homo Sapiens
ggcacgagggcttattgtgcatgttttgggcgttaccaactgtggggtggcaatagcatttttaggatttgaagttattggctttaatgtttcacttatgcttcatgaattttgatttatatatgaattgagtctcctcctcctatgacctgcggagtggctgcttggtttgggaggcttagaagcgtggtgctgttggtgtaggtccatctgtttgggaatattcatagtcagcatcctctgcattctttgtgaagtgaatgtaaagctgctcttttcctttttcagatgccccacaaccttgtggtcttaattttagagtgtcattttgttatcagtgattcatttcttttgttctggtgcttgtgttcttttgcagagtcccagggtagatgtaattatagatcatgtattctataagtgagctttggtggaaaagtcaagtgagggataatgaaatatttgtaattaacgtttaataaaaaagggtgtttgaagtggtgct

SEQ ID NO: 132643 - DNA, 1102 bp, Homo Sapiens
  misc_feature (61)..(83): n is a, c, g, or t
  misc_feature (922)..(922): n is a, c, g, or t
  misc_feature (935)..(935): n is a, c, g, or t
  misc_feature (990)..(990): n is a, c, g, or t
  misc_feature (999)..(999): n is a, c, g, or t
gtgccatagccaaaattaaccctcaactaaagggaataagcttgcggccgcctgctcaggnnnnnnnnnnnnnnnnnnnnnnnaagagaagatggcctttattgcagcacgaactgagggggactgcatgtccacagctctccaggagctgccaaaggcaacgggcccgccctgcccctgcaacaggccctccaggggctagagcatggctcccctcaggaagggtaacgcgtgcttgtaaacaagggcccagacaacacagagaggagaggcagcatcatcaggtgcagctttgctacaagaaagatagttcttaatttcaaagaggagacaccgctacacctagccctgccctcccatgcactggaaggctctggaagtagctctcgcctgcctgggcagttaggtccacccactgcccgtgagctgggcccaggcacactgcagccacacaaaaacgctggcagctgactcctaatttcagaaacacaattagaaaagaactggaattttacatttttctcccatacattaaaaaataagaaaaagccaacattttgactgtagaccctggtaggtggcatctgactttaacctgaagttctcattggaatccttttctgtctggcgctccaccgcccacaatcagccccagccccaggcgccccttgccgaaggatcctggcccatctcacacaagggcgggaccccgtggagtgcccggcgagcagggcaaccactgggaagacagatactgatttccctgttggggtctgtgaccctcagcaaacgaaaaggaaacggtaacaagacggtggcctcctgccaggacctcagcaggaggtttgctggtgaaggttctgggtgagctggaatgggtgataaggcgggcttgctgggtggtggcctcaggctgttctgngccctgtcgcaanagcctgtgggtgagtgtggggccacagcgtcccgggtcgtctgatgcatagagcnagacccggnagagaccggctgcccgtgtgaacagggctccaacgctcccggtggacctgctcccgagaacttgtccgctcacggaccttccccagcaccctggaacaagagc

SEQ ID NO: 132644 - DNA, 439 bp, Homo Sapiens
caagcatagaaagaaggggcgggggatgtccttccaggaatgtgactttgtaacctaccatcatcctgtgtttaaatgaattcaaatcagtttcattgattaccagtatttgctgcccactgaggcaaggtgtccctccaaggtcatcaggaaagagagttaatgtagggttaccaaacctagtcaaaaacacattataccatcattatagttattccaatgaacatatcagtcacctcggatttacctcaggcctttttctaagctctccctcccctctctggccctcaaggcaaccattgatttataccttcatttataataggtttgtttgtattttctataatatatgattttattaataaaatgtctttttttccagtttcattcatgatgcataattattttgagattcttcaatggagcttatatgtggtgg

SEQ ID NO: 132645 - DNA, 1187 bp, Homo Sapiens
  misc_feature (1068)..(1102): n is a, c, g, or t
  misc_feature (1106)..(1145): n is a, c, g, or t
tttaaaatgctttatgatattttatttgatattattcagtaatacaggttttgtggcaaatatgcatttctaaaagtgcataatgaaacattttatttttctagctcttgaatttgtcatagaaataagccatagattgttactttctgatttactacttatagattcatattgaagatgccatgaagaggagataaatgagtttatatgacactatttactgattatgaaaatagagaaatacaaaaatattatctaataataacaaaaaatatatttcttttaaacataaacactaaaacagagagtagtcaaactgatttggcacacttaatatatattatcaacattatatttttcattcttgaataatgaagcattgcatactttgagctttgttcaaacattagttgctataatcatgaaggtgactatttaaaaccagtcagagcccgtatgtgcacagtaaaagagtggtaaccaggatctatcctatcatctgcattttgttaggaacatagtttaaagagaaatgccattaaaagaggatgagtttgtacacccatctcacgcatgagtagtgaatggtatttagttagtaaatattctgccctatcctctatccaacaccaaaaataagcaatttcagcgaaggggattttacttaattaagttcgtacaaagctcaattttaggctttcttatcctgccatagcaaataattttttgactttcttcatttgtactttatggagctaactacattttcttagaaacagcagttaaaattaaaggtaatttttaatgataaaatgtttccttggatacatgtttcttgtatgttaaagagtactttgtttcaaaatgcttaatttcacttacaattagaaatcaaatatggagcacagcatagggcaatttggaaactgtcacactaattgccacaaaaaagttaatttttcacataagacaactggcagtgaacatccaattaactgccacacagttatttaactacccggccgtaatggccgaattcccgggcatatgtccggtaccgtcgactgnnnnnnnnnnnnnnnnnnnnnnnnnnnnnnnnnnncggnnnnnnnnnnnnnnnnnnnnnnnnnnnnnnnnnnnnnnnnctaatacgcggagcgccctatagtgagtgatagattgctgtc

SEQ ID NO: 132646 - DNA, 607 bp, Homo Sapiens
  misc_feature (565)..(565): n is a, c, g, or t
tttagaaagaaatgtttttaatataatatttaaacatattaaaaaaaagcaacaattcaataaggatccttccattgttctttatacagatttaaatgctgtcacgtactttatcagttacatttataattaataaccttccaatcactgagtttagaaattgcagtatttactgagttaacctttctcacaaagtaaggcacaactacatgatcacaagtagtaaacacaatacaaataatgaacccaagaactaaatgagaaaatgttcatgcataagtatctacagaacttatgaatatatgatccagttcaaggaattacagaatgtcatatacacaactgcattgtgttacaataaatttattacttctacacagaaagaacttagtgacttctaattctattttatacaattttacataaatttagtaagtttatgcacaatattcacatctgcaacaataacaaattgatcattaaaattcaggctaagggcaattaagacacaataatgtgtggcacgttataattacagaataccattcatcaagctcatgtctangaatactataatggtggcacatttaaatcttatggatcaaat

SEQ ID NO: 132647 - DNA, 577 bp, Homo Sapiens
  misc_feature (524)..(524): n is a, c, g, or t
ttttgcaattgtttgccaattttattgaaatgcaatttcattgaaatcaaattcttaaacatttaaatctgtcacataatagatgtgcttctttattaacatattaaagattacaagacctagggggtggatctaattattaccataatttcagagtggtgctgtacataaatattttaagatatctgtaacgtggatatctgtgattcctagtgatgacagagacacaggtactaatactgctgtggtttgttgcctattttcctgatggaaataaataaaaacttcttttttccatcgaagttttcagatttcctgatttctatcctctggcccctttagattcacagattccaatttaagaactcccagtctataataatgcaagttttcgtaagttgtacataggtggaatcagagaaatggaagtaaggtgaagagcctcactgactggctggctgctcaggcagggcctcacgggatggttacaccctgtggatcctgagcctgctcctcattttcanatgttcagaaactcagtttgtctcagttcttctgggggcaccctggcttttga

SEQ ID NO: 132648 - DNA, 923 bp, Homo Sapiens
gaactgggaaaggagggagtttatttctgtaactggatacagggagaaggcctagaaattatccccagaccaactcaaaatcacagtgttccagagcttatataccttctaagctatatgtctgtgtgtaagtgtgcattcatctacagacataagtggtcgactttttctgatctctaactaagatctgagtcctgaagaccttcccctggagcctcagtaaatttatttaatctaaatgggtccaggtgctggggtgattacccttatcttgtttcctgctaaatcatggtttggggagttccttcagaccccaataaacttgcctgtggaggcctggggagtttcttcagacccccaataaaacctgtataatcccaaacgggtcctgtggaaaattcctcattatcttgtcatgcttcaaggcccaggaaaggccagggcagaactcttggtgggcttttgttacattccagcatttgtatagggcactggctctatcagcttttaatatttaacttcgccactcagtcagtactgaaacagttgtcatggaggcctgcattagtgagacctggcctgccacatgaagactcacagaggagaagccatctattgacaaacattttaaaggagggaaagaggaatccaatgtgatgtcagtgactgtgggactctggaatgatgcgagcatagaggaagctcatccctgacacttggcctgggttccctaagacccacgcatgccaagccaatctcagaggactgccatagacaggccccaactctgtggtctctgacatgagtcatacaccagtgtgtgtaaaacaatccaatggaatgtatgcagaaaacactaggatttccacgtgtagtcactttgcttaaaaatatgtttatatgggctgggtgtggtgcctcat

SEQ ID NO: 132649 - DNA, 712 bp, Homo Sapiens
  misc_feature (625)..(625): n is a, c, g, or t
  misc_feature (698)..(698): n is a, c, g, or t
ttttacttccatatttgttatattcataggttttcattacataatactattcctggggttcaagatttcattaaacacgtccctccaagactctcaagacataaaagtatgatacatgagttaatttggtgagttgccatcatttcttactttcaagagtttttcttttctataaattctcccatattttacgaaaaatgttttccatatccattgcctctacagttgtctatgtttctttggcacacgaggcacaatttagcgctaaaagcaccatcacaatctttcataaatattcctgtaagaattcttttgataccaattgagatatcatctccaggtaaagacttcctcataacagctgcatttctacccaacatgatttcaatggtgtttaacaggtttgacttctcacagaaatgtcctccacaaccactgcctccacagtgtttcagccctaaatgagctctctgggatataatggctggaggattcctactaaagattttcccacctttctggtatcagaagatttattctgatacaatatctgtaagatacaagatataatttattactgatggggccacattcacttcatttgtgaggcttattctctgttcanattcctgattaactacaaaggcttgatttcttggaaaaggttgttccacaatcactacatttctgcccactangcgctcactcttgt

SEQ ID NO: 132650 - DNA, 917 bp, Homo Sapiens
  misc_feature (268)..(317): n is a, c, g, or t
  misc_feature (393)..(406): n is a, c, g, or t
  misc_feature (416)..(524): n is a, c, g, or t
  misc_feature (531)..(531): n is a, c, g, or t
  misc_feature (550)..(569): n is a, c, g, or t
cccccgcttttttccccccgggggcaaaatttttattccacagggggcccaagggtgtgaattcccccggggggatttaaggttcatccaaccccgtttggaaggggttccacggtggcgggaattggtttttgatttccccccctttttccaataaatgccagggcgggggttaattttatttggagtcccctgggacccccgtggtaaaaccccgaaaagcccccaaaacccctttgggatttgttaaaaaccttgggttcccccnnnnnnnnnnnnnnnnnnnnnnnnnnnnnnnnnnnnnnnnnnnnnnnnnncttgggaaacagttttgcccagtttcctttccctttggggccccgggcccaaagaaaggttttaaaaaattttttnnnnnnnnnnnnnnccgcaaaggnnnnnnnnnnnnnnnnnnnnnnnnnnnnnnnnnnnnnnnnnnnnnnnnnnnnnnnnnnnnnnnnnnnnnnnnnnnnnnnnnnnnnnnnnnnnnnnnnnnnnnnnnnnnncctgttngtctgatttttattatttnnnnnnnnnnnnnnnnnnnngtgcatttttcattcaataaatgttccatccttatttagttttgttgccgaaagtgaagtccatgactttagaatggtagcaatttatcaaccaaagaatccgtcttcacaccgtttcaataactgcagcaatttccttgaactgtctgtagaaattctggaatgcagatatttattcaattttactgcagttacactcaacttttagtttcaacgctggtcatatttacataaagtatcttcattttaatactgctggttggtgacatcggacttagcatccagcggcggctcgctggacgcctccatgggcagcgtctgggacttgcggcccggactcgagagccc

SEQ ID NO: 132651 - DNA, 1016 bp, Homo Sapiens
  misc_feature (176)..(269): n is a, c, g, or t
gaaaacacaggggggcgggggaggcgtatatacgcggcgggcggggtggcacccttaggcggagaaatattatagggggtggggcacaacaaagagaacctatgggggcggtggggggaaataaggaggggtaaagaaggcggtggaaagagggttttccaaagtacggacaagannnnnnnnnnnnnnnnnnnnnnnnnnnnnnnnnnnnnnnnnnnnnnnnnnnnnnnnnnnnnnnnnnnnnnnnnnnnnnnnnnnnnnnnnnnnnntccgtttgggagaggatgccgggtaaaggacctttaagagaattcccgttttgggtgttggttcaaagaaaaatgcgggttggcgggcgaaacggtgtttttattggggggggagtccaaacgggtaggtcagggaccgggggttttccctaaaagacccaggtatggcgcaggttcaattggcgggaaggggccccgggggggcaaacggagtggttttgaaagatttttggggggccgagggcggccaacagggtgagtagggatccgggagaatggtagcccgttggtaggatgtggagtatttaaaaaaatggaagggcaaaagtgcatttttcattcaataaatgttccatccttatttagttttgttgccgaaagtgaagtccatgactttagaatgatagcaatttatcaaccaaagaatccgtcttcacaccgtttcaataactgcagcaatttccttgaactgtctgtagaaattctgaaactgtggaatcgtcatttcaaagcacttggtctttacttggcctgaatgatctgccacttttagcatcactgcaacgtaaggatacttaagagatctgcaagtgtctgagctcacagccatacccagtttccactgaaaatctacaagctggttggtgacatcggacttagcatccagcggcggctcgctggacgcctccatgggcagcgtctgggacttgcggcccggactcgagagaacgcccccagaccagcccc

SEQ ID NO: 132652 - DNA, 604 bp, Homo Sapiens
gacttttagagttttattctttcttacagaaaatcatttctgagataataaactcttcatctgaaccttcgggacaattttcttcctgccggtgctgtgagatcttctcacagattccatattgattgtttttgttcactctctcttgatcaggcggaaataaagccaggctaaggactgccccctgatcctttcaaccttatgcagtaaagctcaataattgtggaagtctcagttccaccattggacagccagtgtagacacagaaaaagaagctgaccggggtcgattaggggaattttcatcatcatatcatggcacttgaacagcactctgtgtatgtaaattcatgtattatgtgtgtgcatttgtgtatatatatacactaaatacatatgtgctaaatttatgcacacacattaatttagttctcacaacatttctgtaaacagtactgtaaacagtacaacattcctgtaaatagtacttttactgtttccattttacagatgaccaaggtgagacacagagaggttatataacttgtccaagctcacacagctaaaatctggtggaaccataactacccctcgtgccgaattct

SEQ ID NO: 132653 - DNA, 449 bp, Homo Sapiens
  misc_feature (80)..(115): n is a, c, g, or t
gtggtcttacagatgtttagaaagtggcacaggttactgaattgtctacctgccagcattctgatatagcacaaaaagcnnnnnnnnnnnnnnnnnnnnnnnnnnnnnnnnnnnnctggcattgagctctagggtggatgagggtttatggtcctctgatcataagctccattctaaaaactggtcactgttagctgaaattgctttggttccccaaatgccttggaactccagacgcacccgcagggcctgaggtaggcttcatagagttctaggacttccgtgtgcgttgccaccagatcctgcccagcaatggcctttcccttctaaggtcattagattcagccaaaagcgacctcttctctagtccggtgttacgaacagaagttctgagttgtgctacaaaagtagttccatctttttggtgtaattttcatgtttttaatttg

SEQ ID NO: 132654 - DNA, 1011 bp, Homo Sapiens
  misc_feature (182)..(582): n is a, c, g, or t
  misc_feature (611)..(649): n is a, c, g, or t
  misc_feature (701)..(714): n is a, c, g, or t
gaagcgccagtaccgtaacgcaggtcgaacagagaccacgaagaatctcaggggaaccctggatcttatagtctgtccgtatccccctctgacatgagctcgatttttgatgtcgtcagggggcgggcctatgaaaaccccagcaaccggctttttacggtcctgcccttatgctgacctannnnnnnnnnnnnnnnnnnnnnnnnnnnnnnnnnnnnnnnnnnnnnnnnnnnnnnnnnnnnnnnnnnnnnnnnnnnnnnnnnnnnnnnnnnnnnnnnnnnnnnnnnnnnnnnnnnnnnnnnnnnnnnnnnnnnnnnnnnnnnnnnnnnnnnnnnnnnnnnnnnnnnnnnnnnnnnnnnnnnnnnnnnnnnnnnnnnnnnnnnnnnnnnnnnnnnnnnnnnnnnnnnnnnnnnnnnnnnnnnnnnnnnnnnnnnnnnnnnnnnnnnnnnnnnnnnnnnnnnnnnnnnnnnnnnnnnnnnnnnnnnnnnnnnnnnnnnnnnnnnnnnnnnnnnnnnnnnnnnnnnnnnnnnnnnnnnnnnnnnnnnnnnnnnnnnnnnnnnnnnnnnnnnnnnnnnnnnnnnnaagaattcggcacgaggcggctgtaggcnnnnnnnnnnnnnnnnnnnnnnnnnnnnnnnnnnnnnnnggtcaggtggagggtttgggaattggtcgggaaccaggaagctggcattgannnnnnnnnnnnnnccaaggccatgaactttgtggggatgaaggggtctttgcccaggaagtcactgagcagtatggcttctagaagatgcctcccctgccccgagctgccttaaccccgtttgacgttcaaagacgcagtggggcccaggactctgagcatcataagacttatacacacttcctcagcagaattcctgggactactgtgaggataactgttggatcaagcagttgacttatgtgttggggattcttcaagactacactacctattggcagcccatgctgttattaaatgcctggatggtt

SEQ ID NO: 132655 - DNA, 1007 bp, Homo Sapiens
  misc_feature (73)..(82): n is a, c, g, or t
  misc_feature (745)..(755): n is a, c, g, or t
  misc_feature (810)..(810): n is a, c, g, or t
tactaaaatatttctttatttgaataaggtcaatgccatttcttgaattccagctagcatcaaataatcaggnnnnnnnnnncttgacaaaatgttatccaattgaaattgacagtggatagaaaacccttttaaactttaagtaatgtcataaaagaaatatattaaacaagcaacagacagatctaaaaagttccaagtgtggatttcacattagatcttataaattaaaaaaatcctcaatataatcatttgttcactatcttctttcaataagcacatggacagggaaagataatcacaccttaatattcacaactgctatttgtgttctttacagaaattgtatctctgcaatgcagtgaggcaggcaatcccttgttcaagtcatttctgttttccctaagttatcaaaaagtacaactgtctgatataaattgttaccataatcacaatcaggaaggcaaagaagctttagcaggcaggcttgaagatgggagttttcatggcttgaccatgaatgatctcaagatgatttcataagattaaaagccatcacgaaaatactgaaagcaacaggtaataatctggattcagtctgtagttgctcatgaaccacgcgttttaataaaaggaacattaagtaaattgtaggtataaaagaatcagtgcatatctgttaatgtcattgacaataaaaatatattatcttctcagctcagctctaaattaacagaacacctannnnnnnnnnncgcactcctcaatttaggtggtcctcgtggcggaatcctgggctccagggccaanattcctatagtgagtcgtataaattcgaagcattcatagctgttctggtgtgaattgttacccgcacattccaacaaatacgagcggaagataaatgtaaaccggggtgccatgatgacgatccaatattgcttgggccacggcgcttccatcggaactgcgggattggataagatcgcacggcgggaaggcgtggg

SEQ ID NO: 132656 - DNA, 1902 bp, Homo Sapiens
  misc_feature (75)..(83): n is a, c, g, or t
  misc_feature (1534)..(1614): n is a, c, g, or t
ctcccccttagagacgcttttaaagattctcttcggtagagggtaaagtttgtcgccccaaattttttggtccannnnnnnnnaagaagaggtaaagggtctcttttcccccaaaaggattccccacacatgaccgtttttccccagttccggaaggttttaaaaacgcaccgccccagggcccaaagcttattaatcaggccctcccttatagggggcctccttgggcaaaaaagtcgggcatcgccaaagaatttggccccttgaggggatactttaagacggcagccaaccctggtcccttccgcagtcccccaaggaaggtcacatcatcccccccagaagtgaggtcagcttcaagggtaactaactccaaaattctttatttagtaaaattgtcacatttgatgtcaatggaatacacaaactcaagtgtgctacaaacaagatgtacagagcatcacagctctgggcagtgcagctcagtgcacctgcctctcatctccccgctgaagtggcaagttcaagcttttgtttagcccagggctgcctggaacactagtgcccagcaccatttctgccacctctgcccccagagcccgcacagggctggtgaagcctgggtgggtgaacctgggagagcgctggcagctctacaaaattcttcctcctgcccgtagctccctccctccacccactccagagctgcagggtccctaaaagtttcttaagaaacggggctggggcctgactgggctggttaccaggggctgccctgcaagccatccatcagaggagggagggaagacctgggagacttccagggccctaccccaccacatctgaacccctgggaggagggaggagatccagggagggccgggcccacccccgcaggactctggctggcattggtcaccaaggcctccagacactccgggcaatttgggctgtggtcaggctgcccagggctgcgggcaccaagtcgggcccctcagcaggagcctgactcagttcagcctcaggggcctcctccaggtcggagcacaggtcgtccccaggacccggggggctgggtattggggatcccggagcgccccccgcaggccagccactccgtccaggggctctaggtggccccgccagggcgtcccccagcagatcctggaagctgctgccctcacgcagcggcatggactcgagcagatggttcaggagctcggcagcgacggtagcgtcgatggcctggcacgtggacacgaacgtgtgcacctcgtgcatgcactggatgtagccggcagcgaagcgctcgctcgcttccgcctgcagctgctcgcgctctgggcccgagggtgggagggagagagccgcgtcccgcgcggtgagcggcgactgcgtggcccagcccacccggcccgcggggacgcggctcacccaggagacgcgggggcgcaccctgctccggtgggagccctcgccgccgacaggacaggggcgccgggagggaagtcctccgtctggcaggggttacagnnnnnnnnnnnnnnnnnnnnnnnnnnnnnnnnnnnnnnnnnnnnnnnnnnnnnnnnnnnnnnnnnnnnnnnnnnnnnnnnnccgtcagctccagcacttcggcgttctccagcttggcctgcacctcggcgcccgccagcagcagccgcagctcctgcaggctctcgttgatccgcgcgcgccgcttcttctccaccaggggcttccgggccttgcggtcccctcgcgtctcccagccgtcctcatcctcacggcccacacggtcccggccaggcgccgcgggtggcgccatgcccgctccgccggggacgcggcaggggctaggagcagcggggacggggagcggcagggaccggagtgccggcgccc

SEQ ID NO: 132657 - DNA, 1040 bp, Homo Sapiens
gacgtgcccgcgcgccccgcacaccccatgcaggccaaaagtcctaaaacggcccggccatacggccgatacagggggcccgaagccaccatccaggaggacggaaacccggaacttacaggcccaatccccaacaaatggaaccctggagaaggacgagatccaggaggcccggccaaccccgcaggactctgctgcaatggtcacaaagccctcaaacactccggcaatttggctgtggtcaggctgcccagggctgcgggcaccaagtcgggcccctcagcaggagcctgaactcagttcagcctcagggcctcctccaggtcggagcacaggtcgtccccaggacccggggggctgggtattggggatcccggagcgccccccgcaggccagccactccgtccaggggctctaggtggccccgccagggcgtcccccagcagatcctggaagctgctgccctcacgcagcggcatggactcgagcagatggttcaggagctcggcagcgacggtagcgtcgatggcctggcacgtggacacgaacgtgtgcacctcgtgcatgcactggatgtagccggcagcgaagcgctcgctcgcttccgcctgcagctgctcgcgctcgcgcgcccggccccgcagcacaccctggacccgccgcaccgtcagctccagcacttcggcgttctccagcttggcctgcacctcggcgcccgccagcagcagccgcagctcctgcaggctctcgttgatccgcgcgcgccgcttcttctccaccaggggcttccgggccttgcggtcccctcgcgtctcccagccgtcctcatcctcacggcccacacggtcccggccaggcgccgcgggtggcgccatgcccgctccgccggggacgcggcaggggctaggagcagcggggacggggagcggcggggaccggagtgccggcgccctccgctgccccgcggccgcccagcagcagcccagccgtccgcgctcccctcgtgccgattcaaaccaggcctcgtactagcctaattt

SEQ ID NO: 132658 - DNA, 1061 bp, Homo Sapiens
  misc_feature (702)..(910): n is a, c, g, or t
  misc_feature (930)..(930): n is a, c, g, or t
  misc_feature (945)..(945): n is a, c, g, or t
  misc_feature (966)..(966): n is a, c, g, or t
  misc_feature (983)..(984): n is a, c, g, or t
gtctgtttatgtatttatttatttatttattatacctattaataaaaaaggtgctcagcctccaaaccattttctctttgtggttcccccaccctcccaccctcccacccacctctctcccttccaaaaggatggctgggataggatgaaaagggaagggaacttgatgtccagtggcctaagccaagagctgcttctggaaggtgctgaggcccagagcatcatgggtgagatggccaaatgtgtggccaaactggaacttataccctggcacgtagcccccatagttaggtaaaagacccaggttctgagggtatgttctgggaagtggggggagatgtttggggtcctgggcactgcctggtgagtgcttctgcccaaattcctgcagtgcctggttggtgagcacaggaaagctggagccgaagaggaagcgggcgcagggcacatagccagtgaagcctgacatgaagaacttccgagggtccctgtcatccatggagtagggagaagcttgttccaccacctccagtgtcggctcctccagctgcccctccggctctggcacctggtccttctctgtgtcctttcttcccttggcctcctttggtagctcttcactcccttgcttttcatgcaagtgagtaaagtcactcagagcctcggcccagacctggctgcagtcctcgtgccgaattcttnnnnnnnnnnnnnnnnnnnnnnnnnnnnnnnnnnnnnnnnnnnnnnnnnnnnnnnnnnnnnnnnnnnnnnnnnnnnnnnnnnnnnnnnnnnnnnnnnnnnnnnnnnnnnnnnnnnnnnnnnnnnnnnnnnnnnnnnnnnnnnnnnnnnnnnnnnnnnnnnnnnnnnnnnnnnnnnnnnnnnnnnnnnnnnnnnnnnnnnnnnnnnnnnnagctgcatatgaacggccanccccgggaagggggnttgcgtatgggcgtcttcggntctcgtaaatgatcctnntctggcgttcggtgcgggaagggttcatcatcacagggggaacggggtctccatcagggaattccgggatcatgggg

SEQ ID NO: 132659 - DNA, 418 bp, Homo Sapiens
tttggttataaaatcatatgtttattacataatcattgacaaatagtttctgtataataactggcagagtagctctaaaacatatgcaaggaaataaataaagaaaaaacttacaataaagagagtaactcatattttaacagttttgtgaaaaaaatagaaaatattttatgtagcttatagtacatatatttttttacaacagaagaatcgcattctgattttccatatggatcatttccctatgttgctagaccagtacactggcaacctggtcatacaggtgagtaatgttttcagaacatattaaatggtgttttttcttttaattaatataatgactttatgtttttcttctcttaaattagcttttcttgtcaagttgaggaaggtcaaaccacaacttaactgagtactc

SEQ ID NO: 132660 - DNA, 487 bp, Homo Sapiens
tttggaaggtgagattacaagtaaatttattttcttcttgaaacccttttgaataaaataaacatttcaaaaaaatgattcaggctcttaaaatactgaggcttatggtgcattagttttcaacttaacataggtcacattaaaaatctgtttaggtgggtcaccacaaaacaaatatggacacaagacaaaaagtaactgaaaggggagaaagtttcaagattaatttaactcatattgttggagtatataaattattatgtatccccgccagaaaggactgactagagctcagtaaacaacatgcataaatctaattctggcatattactaaatcataccttcagaaccagtataagcttgagaaggatcacctattatgtccattgacagtgagttgtatgagtcctgagaatgtttttctgtcacccctgctgtatgactggataaagatgatgatgaagacaatcccagtctaacatatctt

SEQ ID NO: 132661 - DNA, 921 bp, Homo Sapiens
  misc_feature (167)..(167): n is a, c, g, or t
  misc_feature (172)..(172): n is a, c, g, or t
  misc_feature (174)..(174): n is a, c, g, or t
  misc_feature (176)..(176): n is a, c, g, or t
  misc_feature (182)..(182): n is a, c, g, or t
ccccgacggttttaaaaagggacgggccaagggccctaggtttataataccggcttcatttatagggggacacctttgtaccaaagaaaagttggggtacgcgtaagccttgggccccctcggaggggtacttttggaggcgggccgccctttttgttgtggtggtntggtngngnaatccnaaaaatgcatattttatttcagtagtcaatgaccatcaatcaaataaaggaaagaaaactaatttcttgaagaaagacaaatctatggagtggtttacaggaagtgaagaatgagatggcccaactaaaccaatttggaatcattaactacaaaatgtcaaactaactgcaagacaagtgtcaaaatgggatgtttaagcagttttgctatgttatacatcttttagttgttattttcaaaattatatgtataagttatataagtcatagtaatagctaaaaatgccaatctatggaagcagtgattttcaatataaagttctattttgatatttttccatcttcaagtcagttactgtcatctggagtactcagttaagttgtggtttgaccttcctcaacttgacaagaaaagctgtatgaccaggttgccagtgtactggtctagcaacatagggaaatgatccatatggaaaatcagaatgcgattcttcatggtcatcctcttgaaacagctcacctttaactccaattttctcttgagaatctagttgtacatctgtgttgattttagattctactttttgagctaaaattccatttttctgttttgcaaggcaaaccaaccaatctctgacaatgacctcgcttatcttttcacatgaaagagcaagttcacaggtgcgaattccattttactacatatacagcacatacaccaccatgcttaagatgtggg

SEQ ID NO: 132662 - DNA, 1078 bp, Homo Sapiens
ggcctcaagtacggtgtgatctttattccatgacaatcttcaactcaacacaaatttcatctttacataggatggtaattgtacaaagaaataaaatgttttttaaaaatccgattaaaacactgattccacccaccccccagccccactccagtgaaggaggtaatggagggtaaggtcagggcagaggagaggagtccccatctgcactgagcggccgcctcccgcccctcctcaggacccacagccagctggtgcgtcgaggcccggctggcacttcctgcacaggaggctgccaacaagaagtgagtgggcactgtcctctctggctgttcctggggcaccaagcacaggtgacagcttaagtctaatgagctttcaagttcaacaagccctgaacgttctctgccagatggaagccccacgggcaagaaggacagggtccctggacagcgaggttgaaaggaccctggaggagagctggcttgtggctatggcccatgtgcacacgtgtgtgcgcgtgcgtgcgtgtgtcgggggcagcatgcaggcccgacactggtaatcaggctgccatttggtccaagaaagcagaatcttcccagaaagacaatgccagcagctccccaattgtcctgtgggaatctgggcatgaaggctctcctgcctgctcctgtctcaggcaggcgggactgcaacaggaacacatcaggcgcaggccaaagggcagctgagaatagtttgtttggcaaacagagcttaactggaagctggatgcccagaaaggatctagagcagcccaggaattccgattcatctaatgcaggtccccagggaggccctggtgaggccagggctagcccctgcttccacagcaaatctggggcagttgcagctgctcaagcccaaggagctgaggagagctgccagagttcccaggcaggtggggagcctgcacccaagggcttgcccatggtgatagcccacttccagttccagaagaaggcaggcctctaggaagcacccacaatccctcgtgccgaattcaacacccaggcctcgtacctagccgtgagtt

SEQ ID NO: 132663 - DNA, 1035 bp, Homo Sapiens
aggtgaggccggggttttcggacgaggcacatctgtaatctttagcctcccaaagtgctgggattataggccatggtttaactacagcacagttgtgctgaaggaccttttgttttaactggaagaataagtattttgtaaaaattcacttgataccacattttcatttctggaacaggatagcaatcattcatttctatcttgtgtctgtgtccaccacaaccaagaccagatgcatctgatgaacattctggaattctgaactgcagctagcctgctgtgcaatagtacaagtgggaggacgtcttcccagggctgggctggttctcaactagtgcccagatgcaaaaggactgaggcatcactttcagactgcatatatttttattcatataaagttctttataatactttattttgtggtgttaagttccaccagttatttacaaatgatgtaaaaagctttaagtgttgttaatttctaaagtgttcttgcgttttcagaagtgtaagtggatctcagttgatctgtcaccccaaacctcaaatgatccatccaccctgctggcatctaattcacctgctctccccagtgactattttgtacctttcctctccatagatgactttgcaatctacagggaaaatacttatgcaggacatcttatatctcccccttacacgtacagttctctcacagctgccagcagcctaaacttatgtctctccacctgtgcttggatgctcttctcccaggcttttcaggatcttggctggcccctatattaatgtatcaattattctctagtagatcctgctattggtttaacattacactagataacgacactatcttcaaccaaaaccctccgcaagcataaattatttcattcagcagttcttgaagcgattttgacatggccaattacttaccggtttacatctacggatgcccaccaataaccgggtacccggcaaaggcatcggctaaaactggccgcacctgcatgaccgaatgggaaagaggcacaaatg

SEQ ID NO: 132664 - DNA, 1081 bp, Homo Sapiens
tttttttgaaaatgaagaacactgtattaatgtttatttctaattacaagaaacagaacatcagtcccttatttgtacaaaaatacctgaaagtttacaattaggttcacgagccaaagagctatgtacagaatgaagcaaagcacatggaataaaggttttgtctcttcattaataccttctgcattccctgaaaacgtttatacacgccaggccaatttacagtcactgcagtttgcactgtgacatcacaaatctaccgccagcttgcccgcccccagaaaggcgcagagatcggtcatactgtcaggtattaagtgcagaaaagagaagacaaaacatctaggctgaggcacatgtttcttcaaggtttagcaaacaaaagaacattctggaactctaacacctagtgtaacagagcttacctattaaactctaataaccaaagcatttggcgttttccttctcaacttcgtcctggttgctacatggagtttcatttagaaaagaaaatcacaggcagagatacaaagtcaacaggctccaaaacaaccctgagctgtcccctttacattcatgtcaattaaatacaaaaataaaagtcaaatgtccttccgtccccggtttgcgggacttgttctcaggtggaattcccagccgcccagcgcgaggccagcgagctggggccttaggaagtctgccgccacgtggaggcggtttacattctccaacaattcacttcggcagggaaaatacaaaagactacgtcaaaccagctacatacaaaactgtgaatcagagtcaagcttttgttctccttttaaataaacgcatatttataaatatgaaatactgcaaatacaagctgtctattggagagaggcgtgtgagagagagattatacactgatgggactggtctacgtacacagaaaaaagaaatcctagagttgtttttccttgaaaagggtttacctcgagccagtgaagaggaaggaatcgtggtgtaactgcaatgtccgtccctacagtgaagcctgccaccaggtgtgaacgtgagaattatcttactgtcaatagcc

SEQ ID NO: 132665 - DNA, 732 bp, Homo Sapiens
gttaccatcttgtgaaaataaatgttacaaaaactcacacagccattacctcaagtaatcctgattcattagtttgcttttttgctccatcagttaaaaatacgttagtgtctttattatactgtaggcttacttcacaaactaataggtataatggtttcagttgtttatcacataaagcatctatttagaacagccccaaagtagtaatgaaacatgagacatgaccataactctaaaggaaaaggaaaaatgatttagttaggtgttacacttgaacctatgtacaaatacaatgccgctgctcatgccctgagtgcatctgtcagcatatggcagtttttgagcaaaagcaggaaaaaaaccaaacaggaaaacaaatttggaaagcccaggccataaaattatgtatatcaaaataaaaccaagaagctttgggattattcacaatcttccttctaaacctggccctcttttcctgcctcattcactcattgggtggtttgacttcactgctagtttcctctaccccatgaactgctctgccatgcatcatagggtaaggaaaagcagcagtgccacagccataaccaagatcggcaagacgggatagagctttaatgctaccttgaggtctgcctgggctgactttgtatctcgcagctttagttgtcccccaaggtctgcctggacttgtcttaaatccagcttgctttggtggttccaagggtc

SEQ ID NO: 132666 - DNA, 1075 bp, Homo Sapiens
gcattgctataaagagatacctgaggctgggtaatataaagaaataagtttaattggctcacggttctgcaggctgtacaagcatggcatcgccagctgctcggcttccgggggtcctcagggagcttccactcaggcagaaggggaagcaggagcaggcacattacccggcgagaagaggaacaggaaagagtgcggggcggtgccacacgcctctaaacaatcagatcttggagaactcactatggcaggacagcaccaagccacgagggatctgtccccaggacccagacacctccagccaggcccacttccagcaccggtagccacagttcaacaggagatttggaggggatgaacatccaacctatagcaagctggaagtctgaatgtgacgagaagtctcctgattttgtttgtcggctactcctacaactgccccataacactgtgccccggattcttcccgaggtgggaggaccgagggcagaggctcctggcccagtcacccaaccccacttccgggcttcagctcttgggccaggtgggcacactctgtcttctttttcttgtgcaagtgacatcccaggtgccatttctcgaggttgccaggcttcccagcctctggctcctgcttgtgtctttgtaggggaggtggctatgatggtgacagcacattcgaagcagcagtggttacagtttccttctaaaaatacattgaagacagagtcaaatgtaagggggtgacttctggttcagcacagcgtgcagagcacacgcttctccctggatcttggaccacagaggggacactgctgaccttgctcctctggggcatcccctccctagactcacgggaggaccacagaggacacggctgaccctgcttatctgtgggcatctcctctctggctcagctggaagacagacagctgggcagtaccaactgggcagaccagggagaggcagagcccaggcacacagggtggggaatccccaggaccccagagggactccatccagaaggccaggcagctctgaaggtggagcatggggtggactgggagctcagacc

SEQ ID NO: 132667 - DNA, 985 bp, Homo Sapiens
cattgttaaaatgtttctccatggtgcttttaatgaagtatatgcaactagtttaacagcatgacaattgttattccaagacatcttcagtaacttttgaaatagcaaatttaaattttaacatgttcttatatttaacatgtttgatattttcttctagaatatcatagcaaataaatattcaacatacaccaaaagtacttaaaagaagctcctttcctttggacatcaacttttaaaaacacgaacaactttttgaaagacagaatttacaaatacagaactgtactgacttaaatttggaatttactaattactggggatactttagtgagtctgcatatgtgtattattaatacatgttaaaccatactgcagataacaaaaaatatacttacatttctcttccagagagtaatgactgtattcaaagtctgagggaatgacaaaacgggatgcacatctaacactgatacacggttcttcagaaaagactagtttcagctgtttccaggtttacataagatgatggaagcagtctctaatatgttaatcaagaaaatatatgcaattgccagctactacatatacagaaaataaagatggtgagtcaaacaaaacatacaaacttggtaacttctcaccctccagatattttgaacatatttaaaaaatttgaagataggatatcactgtgatcttaaaaagagaactttaaaaataacacattatggaatagtaaaactgagctgctaaaaccaaagtagtaaacagttttcctgatgtcctcacactcttaactaaaacccaaattaaaactaccacctaaatttaatctaagtgttgactttttaaatgtcaatactttcaaacctcctttaataatattttaaaatatacataaacttaatacattacttaagagttaatctcatttctttgaatgtgggctttggcctaacttgcagaatgttggggaaacatt

SEQ ID NO: 132668 - DNA, 704 bp, Homo Sapiens
tttaaaattgtttaatgcatgtactttattagaatgatattttgaacactgagataatgtgatttcattctgctcacagttactctagtacacagatttaaaacaatggtcaaagcagcaattacattaactcactgcaggagtcattatacactcaggtagtactttggtaaattacaaaacaaatgtacacaagggcacttcagtagaaattaaatcagtttggggacacatcaggctgctaaattctgtactagaatccaacagcaaatgagtcattcttggaagtggaagaactccatgatttcacagcctagaacactaagtatgaccaccaacgcaccatttcaactatctaacaaccaatgggagagtcaattgttctcatcccaactgccaaaagcaaaaggcaggccatcacaagttggcttgttcaccttctaaagacatgactttatttctgcctaagtcatctatataagcgaatctaataaatacaataaaatgtaacccaacaaaattctcatgtcactttttacagacatgggtatatgagaaccatggaggtgctaaagaaaaatagaagcattttcttattatcatattaccatgaaattaaatttatgtctgttctaaggaaagaaactaaatgtcctgtttgatattgatgagtaggcctactcattctctaccaaaatcctaaa

SEQ ID NO: 132669 - DNA, 1204 bp, Homo Sapiens
  misc_feature (41)..(85): n is a, c, g, or t
  misc_feature (89)..(123): n is a, c, g, or t
  misc_feature (181)..(192): n is a, c, g, or t
aaagtgtatagacttcactatagggcgctacgccggttatnnnnnnnnnnnnnnnnnnnnnnnnnnnnnnnnnnnnnnnnnnnnnccgnnnnnnnnnnnnnnnnnnnnnnnnnnnnnnnnnnncagtcgacggtaccggacatatgcccgggaattcggccattacggccgggccgtctcnnnnnnnnnnnngcataataatttattacatcccaaatatttaaaaatttgagtgcctttgcagttgggatggttcctaaaattgcgtatagaattaagggcacagaattggtgtgtaagggtcctgaatctggctaaaatacagtggatgtatgtattgggaattatgaggcataagtagccagtatctatagttagaatctacaaggcctcctttttgcacctgtagactagaatataactgttattgggtgcctttgagtgttatctctcagtggctagaggtgctgtttcaagcacaatttagactagggttgaaccactcattgttcaaatcatgggtgggctccaatgtaaaatatcactacattcagtccacaagcaacattaaggacaatctaacggacactggacatttgactttttagagtataactgatgttctagggcataatgaggaaaatttttaaaaaatagattataatgatacatattggtatcattaagacaagcagatttgagcaaatacaattaaggtgtcttatttttgcatcaagtaattattgctgtggtctttctactccacaaaataattttttctttttgcagttgaaaattaactgcattattaactaattaataaaataaatcaagtggtataagggattagtttaccctcaagccgatgactccatggctactgatattagttagtttaggatttttaaaaagcatatcagacccccagtttcaggaattgagtataaatattgcttcttgtcaccctgggacagtaatgccttatagtggcactagtcaccttaagtagattacacatggttgaggtgaataaagctgcatgggaatttgctttcgtgatatatttcatttgcaaacttctacataatcaagttttatgtttaaaaccatcggttctatatatctagctttaggaagttgcccttacaggtgggaccttttgtgttaatctgttttctccccagtcatcttatttggctatgtt

SEQ ID NO: 132670 - DNA, 609 bp, Homo Sapiens
  misc_feature (126)..(156): n is a, c, g, or t
  misc_feature (492)..(507): n is a, c, g, or t
  misc_feature (567)..(567): n is a, c, g, or t
taaaattccctcactcattttcaagtcttgttttacataatggcttttaaagcaacttttgttaatgctactgatccttaatgcaactattaatgtccatttggtgacatctgggtttcatacagnnnnnnnnnnnnnnnnnnnnnnnnnnnnnnntatatatacacattttatatataaacttaaaaaccttgtacaaatgagttgttatatataagatgcttatgctaagggggaaaaaaactttatacagtttcaagaaaaaggaaaacatatttaaaaagggacgacatacaggtacgacaagcaatctctaaagcaataaatactactggcccaacagcgttgtgattctattaagtgttgagtagcgtcccctccccccaaaagaacaacaccatggaacaaggtatattaacacatttttaccctttgtttctgtacatttaaacaataacaagtaacatcacaataagagttgtttcacacagnnnnnnnnnnnnnnnngtaacggcactgcattcatggtgccttacggtttaaaaaccagatgtaaaatgattggtncgcaagctcgtatttaatacaaataatacagaacgaactcct

SEQ ID NO: 132671 - DNA, 983 bp, Homo Sapiens
  misc_feature (324)..(337): n is a, c, g, or t
  misc_feature (852)..(882): n is a, c, g, or t
ttttttttatctgcacatactaagttgcttttattaatccagaacggcatgctacagatactgtacagcatgaacatttattcattacaaaaatggcttccaaaccattaaaaatgaacttggaataagagcataaaacggaacagtaacatcacaactgttaggaaacattcaaagtattcacaaaaaatgttatagttagcattttaataaaccagagaaaaatcggagacagttttacaatcgcttcatgtcaactacaatggcactgaatgaacaggtttcagctttatacagcattttgcaacatcaacatgcctaggnnnnnnnnnnnnnnaaagtctgctgcctactcgtatgtaatatgtgtacataaaagcggcagctggtttttcgtttaagagtaatctaatatacagaattttggcccttaagggtttatacctcttcatttaaaatgctttctggacaatctgctaccaaacacattttgttataggtgacattaaaactacatacaaatctacctatgtaacatcacagcaaaacatgatgaacaaaaattacagcatcaaaaagagggagaaagctaaattcactgagaattttggcacgtaaagttttgtacacggtcagtccgggtcctaagggcgcagggtagggcatcccactgggagttcaaaggggaaacgaagatggttcccactgctgctcagacagtgtcgctaaaattccctcactcattttcaagtcttgttttacataatggcttttaaagcaacttttgttaatgctactgatccttaatgcaactattaatgtccatttggtgacatctgggtttcatacagnnnnnnnnnnnnnnnnnnnnnnnnnnnnnnntatatatacacattttatatataaacttaaaaaccttgtacaaatgagttgttatatataagatgcttatgctaagggggaaaaaaactttatacagtttc

SEQ ID NO: 132672 - DNA, 342 bp, Homo Sapiens
aagcatttccacttactaaagtttattaagtacaaagaaatgaatctgcggaaggagacatcaataaatataaaatacacgtgaaacattggaggagtcacagactgcagtgtcagtgagaatatgtgacaatggcggggactgtgtgactcagatgtctctaagtctgagtttacagtcaaggggttaaacctttacagcgcccaagggactcagtgcaccagcatgagctcgaagggttgtgaattcagtgataggtctcaaggggagatgggatgccacattcctgagatttctccctaactgccatttttggtttctgctccttcctcccctctgtcc

SEQ ID NO: 132673 - DNA, 1048 bp, Homo Sapiens
tcagaccagaaaatagcctttaattttacatgtacaaatgctgctgtaaattcgtaacagcgaagaaaaatatatacgaaccggtttaaaaggaaaagtaaaaaacaatccacagttgagcagttgatgtgcaaatcatcccaggaatccaactttctgtctcttgggccccaggctttcttccttgtgcagaacactctgcaaggaggcatgcagtaccttgcccacacgcttgccagtctccatcatctcgaagatgctctctgggtccaggctgcccttccccactttcctcatgcacgtcacaactcccttgctggtcaccgacaccagcaagctggccagcgagcaggcctcctcctgaagagtagcatccaccacatgccgatagccaatcttgcacagagtgacaatgcaggggacattctccacacttagtcgtatgcagtcataagggtcatctgacaattcaatgtccttcgacccctcttcatcctccaaaactcgaacccttggtatccttgtattgaagagagcagcctttacagcaatggaaatggcatcaaacaaatttccaccacattccagaagcagcacatccacatagagaacccagcagtgctcccgaggactaatgcagagggtctttaagtcgacactgcttttattgttaaatatccgatagagggtgttagcgatctcggtgccaaggtcatcacctcctctaccttcaaattcaggggtagcactggctgaacagtcaacaaagaactccaagtagccttcatttggtttctccagcttcggcgtccccatttctgctttcactcccaccaagatgtctgtgtgacccagcttgaccctggcggacccactagtgttggacaccacatcagtttccacttcgacacatcggtagtcctcacagccacggccatccacacggaggtcttcctggacgccatgcacgatgtacaccttctccgcctcgctcagcgtcacggacgccatgctgccgagctgccccacgagccgcacgtcatctccc

SEQ ID NO: 132674 - DNA, 899 bp, Homo Sapiens
  misc_feature (270)..(270): n is a, c, g, or t
agccaagattccctttggcccccaccggcgtttgccccaggtttcccatccattctggaaaggatggtttttgtgggtgccagggtggacccttcccccctctttccttcagggccaggtccacaaacttcctctggtgggtccaccacccccagcaaagctggccaagggagccgggccttcctcctggaagagtaagcatcccacccacatggcggatagcccatttttgcaccagagtgaccattgcagggggacattttcccacancttaagttcgtatgcagtcataagggtccatctgacaatttcaatgtcctttcgaccccttcttcatcttccaaaactggaacccccttggtatccttgtattgaagagagcagcctttacagcaatggaaatggcatcaaacaaatttccaccacattccagaagcagcacatccacatagagaacccagcagtgctcccgaggactaatgcagagggtctttaagtcgacactgcttttattgttaaatatccgatagagggtgttagcgatctcggtgccaaggtcatcacctcctctaccttcaaattcaggggtagcactggctgaacagtcaacaaagaactccaagtagccttcatttggtttctccagcttcggcgtccccatttctgctttcactcccaccaagatgtctgtgtgacccagcttgaccctggcggacccactagtgttggacaccacatcagtttccacttcgacacatcggtagtcctcacagccacggccatccacacggaggtcttcctggacgccatgcacgatgtacaccttctccgcctcgctcagcgtcacggacgccatgctgccgagctgccccacgagccgcacgtcatctgcgcgcccc

SEQ ID NO: 132675 - DNA, 1350 bp, Homo Sapiens
  misc_feature (162)..(174): n is a, c, g, or t
  misc_feature (911)..(911): n is a, c, g, or t
ttttttttcatgctctcagaactttattaggtggggattgggcaagagaaaacccctgaaacagttgcccacgtggttcaagacaactagaatggagatgtgttgcttggagataccttagatttttaaaggggagctgactggctgaataactcagattannnnnnnnnnnnncatggtcagccagtctctagtaagtctctagggacatgaccagaccagaagcccctgttctatatgaagacaaacaggtggccatacttgggtggagggataccgctgctattcccagatgaagatttggtggaaggagaccatgacagatgacaaacggaacagtttctcaaaaacagaggtatgaagtaattacacaggaaagaaaacaatttccaaaggagtgagacaagtcgtgattcttcattggtacctgacccctatacccaaacagccttgaaccagcccttccagagactgcccctagtggcccactgggcagtgcaggctgtgaagaagacctgaaggcagatggggtgggggtgcttattttgctacagtggagaaggggcttgaatggggagggcagacctggctaacatctgccgccatcccccaactcccccccagacttctatcacatttacaaatacatacataaatacattacatacagtagccagtctgggaggcagactctccacagaggcatggctgacacatgtcgggaattctaggaaagggcactgggctcccaaatacgtgctcgtgtgttctctcctgcccaggaataagccttgccccagccccacccctctcttctgggtttagtttgtccaagtatggagagttgccgtaggcaggtttggaggcttgagacttgggctgcagggagctgggctggctgcgctgacccngagccactctgtgcatcctgcggaaggtggtggtgcagcagctgtgagtggggctgctggtgggctggcaagatgtgtaggaatggtggggggtgcatagccaggggtcgctcccgtggccaggggtccagtggagcccaagaccgagggcaggctgaagggtggaggcgtccctgcatgaaatccctgcttgtcaaaagtctgtgtcttattgtagacagaaccagtcatatcaggtagaccagtggtgcttgaagacactgatactcctttgccaggcccagaacctgcagacttgtttggtgcctgcgatgatccagcatagccacctttggagtagtctcctgctgctgtcccctgggtcaggtcgtcataacctgtactgtagccgtgctggccataaccactggcctgctggaagggaggtgtgggagtgctg

SEQ ID NO: 132676 - DNA, 649 bp, Homo Sapiens
tttttaacttgacctgaggcatcaattcaggcacagtataactctgaccagtaagcggaagctaacccaaatgctttccagggctgaggggacatcatgagagttgtggtcatgtacagaagcacagtcccaggggcacaggtggtacccctgtaaacaaagaatttgcaatattagggcacctcaagcaggacatccattaggctgtacaggtgaacagacctcctaccaggggaactcctgcccaagtgtttccagtcccatctgaaaagttcccagagtccttggcttccaagggactgcctgaaggcagtgagtcccaaacagttttgcttgttcaggatacaagttgatccatctcatgagcatggatgacatttgtgggagatcttcatggaaagcatagaagctagacccactctgttgtcagtctgaactcaaagcactcacagcacatggaaaggcagcactgggaattttccttcagcaagaggaggcttccagggatcaagcctccccaggtgccaggctttaattattttctccaatattacaaaaacagtcgtgccctgttcagcaatcataacattgcattttttcaaccatctcttactctcagctaggctttcctctgcctcgtgccgattct

SEQ ID NO: 132677 - DNA, 419 bp, Homo Sapiens
ttgccttgagctgttttagcctcaacacgagctatgctgaactgaaagcaggcacaggctcaatgaccaggactcagacgttggggccgttggagattaaggaccccctccgtggagcgctaaactatgaaaacgtcctggaacctggctgaaaagggcttattctctaatgggaccatctaagatcaagctgctgataggctctttgtctctaatacagaggctaattgcattcctaacttctaatattgcaaattctttgtttacaggggtaccacctgtgcccctgggactgtgcttctgtacatgaccacaactctcatgatgtcccctcagccctggaaagcatttgggttagcttccgcttactggtcagagttatactgtgcctgaattgatgcctcaggtcaggtagaaaa

SEQ ID NO: 132678 - DNA, 728 bp, Homo Sapiens
  misc_feature (111)..(147): n is a, c, g, or t
  misc_feature (675)..(675): n is a, c, g, or t
  misc_feature (677)..(678): n is a, c, g, or t
ctattaatcaacactttttaatgtagtacatatatatcttacagttatttaagtcaaatatgtaaaggtttacaactgatttacagatgaagcaatcacagattgcagtannnnnnnnnnnnnnnnnnnnnnnnnnnnnnnnnnnnncacacacgccaatcaaggggaaaactgcatcctggcaattttacagtctgaagttttgttggtatatctaccatttcacatccttttcatcttgcttttctgtacaaaagatattttttgccttcttcattcctgatgagatttttctgcgataactttacattcgtacattgccagttgtcggaccaatgtttcccattgttatgcctccagcaaaaaatatacatggtaaccaagaacggaacatagaggaaatctggagatgtatattggtaaacaccattatatactatcagttgagtgaccacagttgccaagaaggcaattcctactccaaggccaaaaccacttctagatctatcaaaagtctaccacagtccaatggatagtgcagccagtgtgagagacaactgtatgttgttatcgaaatccactttagcactggcatgatttataccaacatagactgctacacaccgcattacactgggccactctctttttaaatttatgtggttctcctagaananntgtcaatgcaggggtataataacccaatcacagcagaaatcccccgcccc

SEQ ID NO: 132679 - DNA, 1173 bp, Homo Sapiens
ttcataggcgtgaacccaggttaaagctaacaggggtttgcttcccaggaccccattgaagacaggaccccacagatttaggaaacctcattggtgatcttgtttggagttttccctatatgctccatgggcacaaagcaaattgagattctgtatttgcagatggaccagctaaatatcactttgcacttttgtgacactgcaagaggtcactgtatttccaaaacatgtatttattctaattaaatcctctaatgttccttacttttaattatatatactgttcccaatttaagaacccgaaacaatttaaatgctgataacctcttctggctcatcacatatacttccagtaaaacctgtcaaaacagaaaattactctttgggctgtctccagtaacgcaggtttgaaaccagaagttcattttcaccctgtatcaaaacactccaaactctatgaaacaacattaaattagaaactaaccacaaattagggcactcataactcatactgctgtgattagaaaaataaaaaggcacaacagtaagctaaagagaaaataccagctccccatatgctttttgtttgtttgtttttggctttcctcttattttatttcactaagtctacaaattgttcaaagcattcttatactctgcatgacaggaacaatatcttggcacattaacattgtgatacaatgtatggcatgttttaaaaaattaatttaaaaatttcatctattaatcaacactttttaatgtagtacatatatatcttacagttatttaagtcaaatatgtaaaggtttacaactgatttacagatgaagcaatcacagattgcagtaatatgtgtgtgtgtatatatatatttattccatatatacacacacgccaatcaaggggaaaactgcatcctggcaattttacagtctgaagttttgttggtatatctaccatttcacatccttttcatcttgcttttctgtacaaaagatattttttgccttcttcattcctgatgagatttttctgcgataactttacattcgtatggtaaacaccatttatactagcagttgagtgaccacagttgccaagaaggcaattcctactccaaggccaaaaccacttctagatctatcaaaagtccactacagccgcggccgc

SEQ ID NO: 132680 - DNA, 1104 bp, Homo Sapiens
  misc_feature (71)..(71): n is a, c, g, or t
  misc_feature (820)..(820): n is a, c, g, or t
  misc_feature (883)..(883): n is a, c, g, or t
  misc_feature (984)..(984): n is a, c, g, or t
  misc_feature (991)..(991): n is a, c, g, or t
  misc_feature (1019)..(1019): n is a, c, g, or t
  misc_feature (1051)..(1051): n is a, c, g, or t
  misc_feature (1056)..(1056): n is a, c, g, or t
gccaatgtccaggatgaatttatttcttgggagaaaaaaatatatatgattttcctagacaccacacagtngactggcacttttcatttctcttttatcacagcatacaaaaaagaaatcaacagaaacacaccaaaacttttcccaatatcccttaaattagcagatttaaaattaaatcttgaagcagtattttgtgatactttgattcaaactctatttacaaattaaattgcacttataaagatagcaacatttctattttgatagtaggttattttgctttattgtggttgtatatctggatataaaacttttaaagctttcttgaataaaaatcattattttgcagtccataatttacttgcccactgaatgtctgaaccagtgttctctttttgtgtttttctgctctattttattttacaaatggcacataccatcagagtaggcacagtctgacactgcactcattatgagagacttattcagaaaaaaagtgtaaggaataaaatattagcagtcaaatcctttggttcatcttttcaaaaaaaatcaaccgatataattacaaatcattgataattcatctttttggttaaaaacaaatccaccaggtagattactgattaaaatgcaacactgctttaaaacaccacattcctattctcatcacactgttcaaagatgccattgtttacaactgattggacatgacacaggatacagtaaggcacaagtggatggtacaaataaaaacaaatactttaggacttgtttttctgcacaaatactaaaatatgtaccgttttcaagatanaaataacaaaaaagaaatacatattttttgttatgaaatacctatacaaaatttttaaatttnacaccatctgagctgccaaaaaaggtttaaaaagtatccatttttccccatacataaaactatctctcatcagtaggtccaagggaacttgggggattcanaatatcncagcactttacggaagggaggaggatanaattccctttctgctttctttacccgacatangacanaacaaggtctatgttacagtatgtatctacttatacaacactgaatta

SEQ ID NO: 132681 - DNA, 537 bp, Homo Sapiens
ttttttcagagagaaagtgctttatcagccgggctcagccctgcacacggactcgccaggagtaggtggtcagcacgcgctgctggcggcgcaccacgcaggtgtaggtgccctcattgacggcgttggcgatgatgctcaggtgcgcctcgcccagggccaggtagccggggtaggagaactccaggggctcctggtccttgtaccagtacactttccctttcttgtggaggatcttctggccgcagcggaaggtcacgttcctgccctcgggcgccagcctgtgtttttgtcctggggggcggtggggtggtggccaccgtggggaaggggaattctgctccgggtgggggaaagagccccgtcagtgccccctcagccccgaccatggccaaggcccagctcccacgcagccctgtcccggccccgtgggcatcaccgtagcagaagtcgcagctgctggggcagagcctcttcatgagccgccggcgagcgtcgcagaagcccctccgcgcccaggacgcgcacacgaacagc

SEQ ID NO: 132682 - DNA, 748 bp, Homo Sapiens
tttaaggaatcaaaaacttttattcagaataagcgttagcaaaatgaaggtaggtgcctcataaatgcagggccccagagtactcagaaagggattagaaaataattacaaaaatattttgccacatattaacatgaaactacaatcactggctgtaaaatatagtcaaatgcaatcaagctgaaaagaaaaggtggaaatctccaggttatctgcccaggtggcaggaaatcgacagccccgagaacgcaagtgctgctgtgccgccaggcccagggctatgatccaaagtgacgggcagactaccggcctgcaccaccccactcaggctgcacacaagacagccagcttaggatctccgtgggctgctacctatgtcacagagggctgattaagggcttgcagtgttcccaaatagggcctccaatgagaggagtggaagctgcattacaagaaattcactggggctgcacttgactcttcaacttggcgagtctcatgaggcactcgtccctccactgcctcctggcagctaagtgctccgggtcatcagggaccttcatgcacatgtcctggttaaccttctcagcagtggccctggaaaactctggaatgggtccaaaagtctgtaggacatgttttatgccttcgctgtatctgttgcagtagcttaacataccttctgcattgagatgcatggtttccaggggtccaatgaatgataccgcatgcccacccttctgacatg

SEQ ID NO: 132683 - DNA, 273 bp, Homo Sapiens
ccttctgcatgttctggggctttcttacaggtttctaatttcctcacaggaaatttcaatctcctatgatataagcataattccctgcagttataattaacccgtcataactcatcgtagatgaggtcacaaagtggggagcgcccagcatttctcactgtgtatcctgtttttgaaaacagaaaatcaaagcccatgttgggaaaggaaattaaaattgatcatcctctttctacagaaaccgttttaaccagaggacctgtctttaacatt

SEQ ID NO: 132684 - DNA, 711 bp, Homo Sapiens
tgtattagagacattttattgaaaatgcgaaaataggaaatgtattatagcctaaaataaattacataacatatacagcatatatttatatctttaaaatatttttttgtttaggttctttcagtctaggaattctgactaaatcaatttagtgaaccgtgtctataatttttttaaaggaaaaaacctgctttccaaaacttagaaaaatatactgcactgcatggatttcgaatgcgttatttcagggaggaccacatagtgactctggtatcgttataaaatgtcttgctttatcgtatggtgtgggagggaagtaccgtagtacattctcaattacctgtaccgcagagttatgactaaggatagcagaaccaggtaatatatctacttcaaaagttaccctacagcaacctggcattagaatgctggatgagacttaaagcttcagttcactgtaaaaactaaaatgcaaagttaggatgctccatgtgactcgctctaatgcgaccttcaggaaaggcgagggaaaagcaagccttcaggaaaagtcatgcggcagggtctggaatctggagatgcgcttttgtgacaatttaaaaaagttagctcatgtatatacacggtgggggtgagaactgacagcttgctcagatctaggagaacgcagagtgaaatgctatcattcaaccatgtcagtttgctgccccg

SEQ ID NO: 132685 - DNA, 720 bp, Homo Sapiens
tttgacagcagaagtctttttattcaaatctcccaccttacagatgtccagaataatcaacatatttcaaagggtatatttcaaaaacgtactagcaactcagccagccactgtcacatggaataagaagacatgccctggccattagaaccatgctgtcctcgctcttgtgtccctccacgggacagacatcaccttgcaagacaactcgtgccactgtccccaacagttttccacagagttcttgtttcccttcatctgaatcttctctgtgcaatttgatgtcctgaactatttctgacggttgcacacaagatctcagggactggaccttttagttatgagaccagccctcttagacagcagacagtaggtacagtgcttgctctcccttctttgcatccttccagagttgccttcatcctcatttcctgcatctggtaaagtctctctgaaaatgtgaaaccgacgacagaacatggcaagctggatggagaagccgacaacccctcccccactctcacccaacgccgggccggtcctgtttcggatcctgcacactgtggaagcttcttgcttccttgttttggtgggtgaaatctttgctgttcaaaaggtgtttttgcacagaattttaggacgtgtttattctagtacgtagtgttttcttttttcgctatatttacatgtggagaactccagggaggccccacatgtaaa

SEQ ID NO: 132686 - DNA, 1050 bp, Homo Sapiens
  misc_feature (687)..(687): n is a, c, g, or t
  misc_feature (799)..(799): n is a, c, g, or t
  misc_feature (844)..(844): n is a, c, g, or t
  misc_feature (913)..(913): n is a, c, g, or t
  misc_feature (916)..(916): n is a, c, g, or t
  misc_feature (942)..(942): n is a, c, g, or t
  misc_feature (965)..(965): n is a, c, g, or t
  misc_feature (968)..(969): n is a, c, g, or t
  misc_feature (973)..(973): n is a, c, g, or t
  misc_feature (986)..(986): n is a, c, g, or t
  misc_feature (1017)..(1017): n is a, c, g, or t
  misc_feature (1040)..(1040): n is a, c, g, or t
cattcaggaaacacaaactttattttgatatctcagaaactggcaaggaaattaccacagtgacaacaatacactttcatgttttaaatcatcttcagatgcatggtctctctgggacctcatgaccaccctgaaagggaggcagggcgggtaactacagatccactctactggggacttgtgggaggcaacccagcttccatgtggaactttatacattccttgcagatacctcctgcttcaagtccaggttcttcaatacccaggaggtacagggcttcaccagtcacaacagatacctgaactccctcagatgtaaaactgattggggattgggccaccccatctctaaacaaagcaccccatcagaaggatagttctggcatggacagaaagaggggtttttccttgctatcctgttggggaacaggtggaggcagcagacagcacctccctgccttcctctctctgccgcacctcttgctaatcagcctttctgactcttccccagaaagaaggtagggctgcgcctccttcctctctgcaggggccagactcagatctaggcccgggctgccactcatactgggaagcctcctttcatgagccttcctcaaccctcagagcaggagggccctgcgcaggggctaccgcctctatctgccagcggcacacagggcacttggncgtatcgctgaagacccgccaggcacagtatctgcagaagtatgttgtggccgcagggcacaaggcgggtgttggcagcgtgatagacgcagatggacactccctctcctgngtgtggctttgggctcaagcacaagcttgttgctgaggtccatgngatgggtgttgggagcggctggtgtgggatcaacactcgatggcttagtggtccgtaacgtcatcacgncanagcgggcgcgacggcacgctcagcancagagcggcatcgggtgacttgngannagancgcgcgtcaccanacgacaatcccatgacgccacctcagcacangcgccagtcggttgtctcagtcngaaggaggcg

SEQ ID NO: 132687 - DNA, 1254 bp, Homo Sapiens
  misc_feature (69)..(77): n is a, c, g, or t
  misc_feature (172)..(186): n is a, c, g, or t
  misc_feature (1134)..(1168): n is a, c, g, or t
ctctgagatcttttttttgcatgtaatgcttttatacttgcggagagaaccataaatggtatttttttnnnnnnnnncgggcgaccacagaagatagaaaaatctagttatgctttttcattcttcccatttttagactactaacaatcaagatacttaaatctatgtgtgnnnnnnnnnnnnnnntgtctggggagattctttagtaataaaaatatttatcaaatctaaaagggtagaaatactgctttattggataaacttacttccaaattactttcatgttttttaagaagtcctaatgagcattcaggaagaaaacatatactgcttccacaggaataaggacaaataaaatggggttgacgcctgccacaaatgatatttcctaaaagaaaaaaatgtaatatttaacctttcttctgttgaggcaaggtaagttaactgtatatatcataaataagattttcttactttacaagaaaggagaactgagatcctgttttttgaatgcaagttaaatacaaaatacaaaatccactctctgaccaagatgaggggaaaaaaaatcatccttcaacacttcaattctcatgcaatgaaatccaaaggtctgttgaatccaccttttcgattcatgtactgcctgtacttcctcttctgagagacatttatggcataggcatttacagagccatccaccttcttaccttttgtggagtcaaaggaggcaaatcccattaacttcatcatttctatttcttcctctgttttgccctctaagtcttcctcagtaatctgccgttctttgctctttgtttcttttgtttcttctttttcctcatctcttctttctttcagtcgagaaggggaaggagatgtggatctatgtcgtcttggagatcgggagcgtcttcggtgcggggatcgcgagcggctccttctccgatctctctcccgagacctggacctttctcggcgcctgcgttctctctcccgggatgtggaccgggaacgcctacgttccctccgtggagagcggctgcgactgcgacccatttggagtcccgcttcccggaaacccccggccgtaatggccgaattcccgggcatatgtccggtaccgtcgactgnnnnnnnnnnnnnnnnnnnnnnnnnnnnnnnnnnncggccgcttcctcgctctactgactcgctgcgctcggtcgattcgaaaatacccgcgctagcgccctatagtgagtcgtatacagt

SEQ ID NO: 132688 - DNA, 420 bp, Homo Sapiens
tttaaaaggtagatttatatatactgtcaagaaaagatccctaaggcacagtgttgagtaaatagattgtaaaataacccttacagcattttctttttaaaggcccaaactatgtattttcccaatttcctactctgctatatacatacaggcatggacaaaagatacaaagcaaaggattagcagaaagaatgggcaatatcattctgagtactgttcgaaaggagtttagctttgtcacaatgttttaagactgttacaagaaagacgcttgccacaaatgatatttcctaaaagaaaaaaatgtaatatttaacttttcttctgttgaggcaagataagtcaactgcatatatcataaataagattttcttactttacaagaaggaagaactgagatcctgttttttgaatgcaagt

SEQ ID NO: 132689 - DNA, 1116 bp, Homo Sapiens
  misc_feature (80)..(136): n is a, c, g, or t
  misc_feature (733)..(843): n is a, c, g, or t
ggattagaaattgttttttacattttaaaaagtgttttctctctctccccacccttttataagacacaaggtctcattcnnnnnnnnnnnnnnnnnnnnnnnnnnnnnnnnnnnnnnnnnnnnnnnnnnnnnnnnntgtgcccaagcgagcctctctctgcatcagcctccaaggtagttgggaccacaggtgagagccaccatgcctgccaggaattttttataactccattttatctgctttttaagttattagttataactgttgcattaaaccagggattgccaggctttattagtatacaactttaacttatcacagtctaccttcaaatgatattataacaattcatataaagtttaagaatccaacaatatacttccacttctctcctcttggcctttgtgctattgtcacaggttttatttccatagatgttataaaccttatacattatatttttgcagatccatgatcaatgaaccctaagcataagaaatatgaagagtataggctgggcacagtagctcatgcctgtagtcccagcactttgtttataattttctataacttcatttactcctatagcttcaatcatatgacaataacaattattaatattattgagtactcattatatgctaggagcttcacatggattattatacttaattctaaaacgagcaaacaaaccccaaaagaacagaaaaccaatttttgcaagggaaactnnnnnnnnnnnnnnnnnnnnnnnnnnnnnnnnnnnnnnnnnnnnnnnnnnnnnnnnnnnnnnnnnnnnnnnnnnnnnnnnnnnnnnnnnnnnnnnnnnnnnnnnnnnnnnntacactcctgtgccatgctctaaacacagcactacacgactcttacctatggaggaaactgagactctaaaattctgtatctctaaatctgaccatttccaagttccagaccaaattcctatatagctccttactatgttcaaaggatgtcttgagacaccataaactcaacatgtttaatgtcaaactcatcttctttatctcctaaatctgctattaatgtttttttatcttgctgaaagtatcattattctgtcagttattcatggaaat

SEQ ID NO: 132690 - DNA, 1327 bp, Homo Sapiens
gcgagtgcggcgagcgctgacttttgggggctccctcccccgtctcactgggtccctctgcggctcccccgcccgctgtcccggttcagacgtggctgcaccccggaggggggcgccggccgagacctgagacgtggcgctccctctctgccggcctcggcttcagtgcttgaatttcagccacatccctaagctgccatctcagaccagaggaacagggaggggggctttctggaaagaacatcacctggaagaaatcaggacatgactgtgggccatgagtgaccttcaaaggaaagccgggtatctgtggtctttaagatgtgatccatgacatttaaaaactgaagaaatggaaagatcatctgatcaggcccatcagtctttttcctaatgctaaacattggtacaaagacgtgaagtttgatgtctcactaagattgcctagggctgctttattgctcacctacttcaaagtattgggaaaacatgattatgggtacaggtgatgctgtgttgcccccagacaggtttcttttgtcaggttcttttgatggattaggaacctacaagtggggagattttagggaaatagcccctccacttggatttcaccaaaacgtctttagggttctcttaccccaagaaacacgcattcctctttagtgtggcagcccactctattggcaaaagttaagcagcaccagtttttactaaaaaggagccacccaagaaacttagacagaaaatacttgaggcacagatgagaatgagcacaaatgtgcatagccaagtgcagtttcctggcccttaaactgaagggccaggtcagtctgctcctccaggcacagcctgggaccccatcatgtgccccactctgcagtctgagcttccactcaagtccagggcctgcctcacatatatatacaagacccaatgtcagagtctgcctctgcccatgtctggtcagagggttgcactttgccactgctacatgttcccagaggttggcacagcatgacctggacctcacctaacccaggcaaactctgctcatcttcgagctctctggaacccatttctcaagggagaaccacattcccccacctcacagccaagttcaaggaagcagcctggctaaagcaatgactcaaggataccagaagcagagcacgcatttaagaagatgcgctgactcgcaggagcagctgactcttcttaagaagagtttactgattcttctttcagtacgggccttttaataagatattgtattttacttcagctatgggtgcagacaattaaaggattctagaaatctgaaaaa

SEQ ID NO: 132691 - DNA, 513 bp, Homo Sapiens
  misc_feature (226)..(243): n is a, c, g, or t
tttccaaggggagaatgaagccattttatttaggggaatgttaaaacaaagccatatacaatctgtaacaaatacaatacaattgtttgttccctagtcctgaataattacagtatatacaaaatctgtaaggcactggttcccccaaaagaacaaatgagtcttcttgtgaaacagacaacgaaacccctatattgccaacttttctccaaaaaatatggcattnnnnnnnnnnnnnnnnnnacaagaggaatcacaattgctaaattaagtcacttctgatgccatttctttcatttccactgctatgtgtctgggttttctaaggcaatgtaactactgaacatgttcaagtttaaaaaactatacttctctcagtgccgttccacccacaaacaaagaagaatcagatcagaccaacaacataaaacttctaatgaatatgtatgactgtaggaacatgaaattcagtcattattaagtacttgctatacttgactacacaccaattga

SEQ ID NO: 132692 - DNA, 1143 bp, Homo Sapiens
  misc_feature (28)..(28): n is a, c, g, or t
  misc_feature (96)..(500): n is a, c, g, or t
  misc_feature (1111)..(1111): n is a, c, g, or t
tgcggttccccactcgactagctcgatntgtgtgctgtcaggggcggacctatgaaaaacccagcacgccgcctttacgtttcctgccctgtgttnnnnnnnnnnnnnnnnnnnnnnnnnnnnnnnnnnnnnnnnnnnnnnnnnnnnnnnnnnnnnnnnnnnnnnnnnnnnnnnnnnnnnnnnnnnnnnnnnnnnnnnnnnnnnnnnnnnnnnnnnnnnnnnnnnnnnnnnnnnnnnnnnnnnnnnnnnnnnnnnnnnnnnnnnnnnnnnnnnnnnnnnnnnnnnnnnnnnnnnnnnnnnnnnnnnnnnnnnnnnnnnnnnnnnnnnnnnnnnnnnnnnnnnnnnnnnnnnnnnnnnnnnnnnnnnnnnnnnnnnnnnnnnnnnnnnnnnnnnnnnnnnnnnnnnnnnnnnnnnnnnnnnnnnnnnnnnnnnnnnnnnnnnnnnnnnnnnnnnnnnnnnnnnnnnnnnnnnnnnnnnnnnnnnnnnnnnnnnnnnnnnnnaagaattcggcacgaggtttttttatacggaaacgagggagctttattggttacatattgtactgcagagccaacagagagcattcgcgccagaggatacatgcagacaggcagctccaatgatacacatgcacccaaggagccctgagccactgctttgccctggtttccagcgacaggttctggcctccttggtcccatgcttggagctgctgcacctagactctaaggggcaggggtgagagagaccagagcacctgcctgagcaagtaggtgtggaccaacaggctgcccccaacaaaggggcctataatgcaataacagtttatttgagggctactttcttagccctctcaatctttaaaatacaaaaaaatagactttattctcttaaaaatacattccattcagtatatgttctgagctgggaagcagcaggaaaatagggcccctttcctatgatcctatggttgtgaggctttgaggagaaccctgctccccactcggggtattcaaaaaataatccctaaaagcagctctttccaaagcaatcttgtcagagaaataacaaaacctcataacaaggtagccagggacccagcctctgggtncccattcctttattgggaagtggtagcacttg

SEQ ID NO: 132693 - DNA, 2116 bp, Homo Sapiens
ttcattttcaaagtattttatttaaataaatttttcttttgtgtgtgttcgaattttacagaaaaaaatactgacaaatactatacagcttggaccctttatatttttcttggaaaggtggctgccatttttctacctttctccctccctgctccccccaagaaaaagaaacatggaatccattgagcaatggggaaaggagcaatggggaaaggcctcctctggctgccgtccggagcctggctaaagctgctcagaagtccaggcctaggggatgtctttctcgagcctgtgctggtctaggaagcctcttctttaggaatcatttttttgtcccccgtgaacttaccctccccagatgagtcaagcagtctctggtcctgaggtcccatgggttgccagtggcagttcagggacagaggctggaaggagtgaaaatggagaggaataaagggctggggctggtctggtgcaggcagaagagggaatcagagaagcataaaacatggagaaaaagatgagaaggaagtggaaagaagagagtggatatcaacaatggccttaggctcctttcatgcacctgtttatttaacaaaacgtttagggcctatcctgcactgggactcctctagttacgccaggaaaggttgtcaggggagtctgtgatggggaaaagagaggccccattctgggtttggctcttctgagtcatcggctgtggaagtgactgagaagtgagtttctgggtgtttcatccctggggtgagagcaagtccattggattaggagacagcagggacattgtgcctggagatagaggccttgtcatggcaatgacaactgactgctgtcttaattcaaaacggagcaagcagttgccatggaaaccatgttacttgtatggtcccggattccggtgatccgccctcctagatcatatctgacattacgtctcagctgtcagcctccacctctccccagccatccattctagggggactgagaggtggagacaggaagggcagcttgtcctggtgagcagtggcagttgtggggagatgtcttccacatccctgggtttggtgcaggcagatggcaagtcattctgttatgtgaagggcacagccagaggccccatgacaaactctctatgtgacaaggggatggagaaccagagtgcttctttctctggtcaaaggggttgatgagtgggaggcctgagtgcttaggcagtttatggccatatagggtgagagggcaaatgtgactggctataaaatatatgcaggtttaaattatgattcacagggtcatctgttagaaaaccctggtgcaaggggtcaccactaaatgcccaccctccacaggcctaaagtacacctggagggcaggtgagtaccaagcagcccaagtgagcaaatagaatatatctttcctttaatgcaatcttatagaatttagttttttgctactataaatatcatagtttagctacattattaattagatagcaattttgccactgtgtagaatagcttccttgggaaaatatttcaagagagctgcccagcatatttgtaaataaacttctagagcataacttgctcccaaggagtgaattgtccatctttgtaatacagtcacaatacaataaaaataccaagcagttcatcctataagtggattaactctgcttcccaacctcactctggcggggaaagccctcctcagctcactgtggatctaatttacatgtcctcacatacctcaaggcacatgtgtcacctacatgtgctctccagcattaaacacccaatttcatccattgcagcaattagtgggctcacttagaagagaagatcactcggggagaactggtgaggtattacaagcttacccttaacaacatcacatatccaacagtaaccacagttagttataagtacctactgtgtgcaaggcacttgcctgagcttcaatataaatataaataaacctctttatagcttcatcctactttcatttaaactctgttacctctgaatcccacctgtgcccggacgcgtgggcggacgcgtgggtcgacgatatcccgggaattccggaccggtccagc

SEQ ID NO: 132694 - DNA, 902 bp, Homo Sapiens
  misc_feature (72)..(80): n is a, c, g, or t
tttactattccaagtctgagtttatttgcagctggggcacctcccaatattcttgttgtgcttgggttgctnnnnnnnnnttctagaattcagatattcaaggagtacaaggaaattgaagacaatttaggaaatggaagaaaatgaaaatcaattgggttctgtcattcaggattaactactgtcaacattttggaatacttcctcagttttacagttgcacttacatagtaaatgtgtaactgtaatatacaccacataatatttgcaagtttagtgttaaatttttttcctgatttttaaatctaacatgagcttttttcctctaacgatcagtgaagaaagtgctggggcaattgactagtgtctggggcaaggagttggctccctggaaaatacagtgtctccagccttagggctcttttatagattctatcagattttctgagagtgaaaaggaagaggtacaactgcttttattctcagaaaacaaggaaatggtttgatccttttgagtcttgctttgaagatgtgctgtgtgggaccagagcagctcttaactgtaggcttgtttccctctatggaggcaacaaacaccattctgggcaccctggccagtgctgcctaggtgaacatgagcttctctatcctggtgggtggggacagctgctagtccctgtcctgcttgcacactggagttaccgttcatcctctcctgctggggtgatggccttccctggtcttgggtagcttcctcacacgcctgtgctcaccagtagtcgtagtccgctgcacactggaacgggagcctctgtggatatccagggttctttccctgtgcagctctcttctctctggttctccgccctgcaaactccagctgctgggacgctctgaatcag

SEQ ID NO: 132695 - DNA, 301 bp, Homo Sapiens
agcacttgtctatgcatacaacatgaaggtccatgataggcaagtcacagacactacagatgaaatccacactgtgagtactagaaaacatgatagctggattatagcatagttatacaatgtctaatgtaaattatactggggcagttttagatattttctttggaaaaacaaaagtacagggaatggaaattattacagaacattaaacagtaaactaacttacattacaaaaaaaccctacacaatttacaaaatcctcaaaggttcaccacctagaagcatccttcagcctcgtgcc

SEQ ID NO: 132696 - DNA, 718 bp, Homo Sapiens
ggaacacaaacaccagtatattttatgtgcacaaatgtgaaaaggaagagacagagggaccaacggagacacagagcaggcaatgggcgcacaaaccggtcgtgtgtccttctcaagagctgcccaactgggagacagtcccacccacctcaaaggccctttagcagagctggggcctgcatctcctccaggtctgggtggcctcagggtggaaggcactctccctgccatggctcccctaagggctgggcctctaacctgtctgcatcccagggtgatgcctacacagcccagggcttcataaatgcaggttctcatgaactgacccactcagcagctgcctccccaggagacccacgcagagtgagggaccaggacaaaagggcttcatggggactccctaggtattattgctgtgaataagcataggccattgtgactcactggcattgaagaggggacagggcacatgggatgcctagcagatgtccgaagcagttcaaccatgcagggcaacacattgcaatctgtaactcagagatgctgccatgtctagtggagagaggcccaggacaccagaggttcatgaacagccagcaaacactctccaccagcacccttaatgcttggcagggctgggattattccaaactttgagtccctggccactaagggattggggccctgataccaaaaaagcaagaatgaagtctgggct

SEQ ID NO: 132697 - DNA, 1372 bp, Homo Sapiens
  misc_feature (502)..(502): n is a, c, g, or t
aacctatttcagtgccctgttttctcctctatgccctgctcagctacaactctgtgaatcaggataaagatagttcaatttccagaagtgttgccaacagcccccattcctcaaccaaatactcacatctgagaaatgtaatgtgcaattcacatgctatttgcatgcccttatcctaaacaggagaatgacccattgtcgttggactctgcctttccaagtcgtaagctctgaggtctcctttctctcaaatctggccatgcccttgaaatcccagcatgcttctgtcctcagagcataggggctttttgttgtgaccttgaaccaacagtgcacaaaatctgagaattttgaagaatacagaacacaactttatgccaagaagaagctatagttgtgctcataaattcttcctccaaggcttaaaggtcattccctaccatttttcttgcagacttttggtttcaatataaggtgggcctgctcaaaggcaagaattttncctgggcatttttttctcaagcattgcagctgtacttaggtgaggagccataacaatgggatgtggaatagagccaatcagctgaagaaattgatactgaataaggaaatatttcttaccagtgagagactctcaacaatgaaatcagtgccctagcaatgcacagcattgcaagagattgagtcacaccatgttagggtccatgccaatatgaaacacccaattacccatcctttcaggtatgagagttaagaaagacatgctaggagggtctcagtgattcttcctctgcttttggttgattttagttttcagggagcgatttggttgacctgtgaattcttagctttaaataaatgctggggaccatagagatgagagctgttcttcatctgtggacctcctaagagaaaggaatagaattaacattaattgagaatgaatagacaggccaagcaggattctaagggttctataaacattattgcattgaatcatcgcaaatatcatgcccatttaaagatgtggaaatggaggcaaaggaaatgaagtgtgtttatcaggaccactaacctgtagggctaatacttaaacctgggtcactctgactttggtggccttggaggcccgcccacatcaacacaccacctaggtgaggattcagataaactgacttcagtctgggtttaatgactcttgaggtctcaaaatggcagtcgttaggtttgtttctattctgtaggctgtgccgttcctcccagagctgggtctgcttccctgccctcctgactgcctgcaaggaggtccagccacattgcagaggaaggacttgcttatggaaagaaatggagagacccagcctccctcacc

SEQ ID NO: 132698 - DNA, 1471 bp, Homo Sapiens
  misc_feature (32)..(32): n is a, c, g, or t
  misc_feature (84)..(681): n is a, c, g, or t
  misc_feature (711)..(728): n is a, c, g, or t
tgagcgagcgctcacaccggactggatccccnaccgctgggctatgggaaggcccaccgttccccgaaggggaaagccgaccannnnnnnnnnnnnnnnnnnnnnnnnnnnnnnnnnnnnnnnnnnnnnnnnnnnnnnnnnnnnnnnnnnnnnnnnnnnnnnnnnnnnnnnnnnnnnnnnnnnnnnnnnnnnnnnnnnnnnnnnnnnnnnnnnnnnnnnnnnnnnnnnnnnnnnnnnnnnnnnnnnnnnnnnnnnnnnnnnnnnnnnnnnnnnnnnnnnnnnnnnnnnnnnnnnnnnnnnnnnnnnnnnnnnnnnnnnnnnnnnnnnnnnnnnnnnnnnnnnnnnnnnnnnnnnnnnnnnnnnnnnnnnnnnnnnnnnnnnnnnnnnnnnnnnnnnnnnnnnnnnnnnnnnnnnnnnnnnnnnnnnnnnnnnnnnnnnnnnnnnnnnnnnnnnnnnnnnnnnnnnnnnnnnnnnnnnnnnnnnnnnnnnnnnnnnnnnnnnnnnnnnnnnnnnnnnnnnnnnnnnnnnnnnnnnnnnnnnnnnnnnnnnnnnnnnnnnnnnnnnnnnnnnnnnnnnnnnnnnnnnnnnnnnnnnnnnnnnnnnnnnnnnnnnnnnnnnnnnnnnnnnnnnnnnnnnnnnnnnnnnnnnnnnnnnnnnnnnnnnnnnnnnnnnnnnnnnnnnaagaattcggaacgagggcggctgtaggcnnnnnnnnnnnnnnnnnncaatttttataagtttagttaaagatgtgaccatcttacttcattacatctccattaagacagtttggtatttcagttacaggtgtatgactgggagttcaattcttttctgtgataagtacgaatgactcaagctaccattcaatattcactttacagatatatgaagcttgtctactcacgttcaaaggttttccttaattcgtcttttatctaaatcagtcaagtctcttctcataaatgagaaatattaaatgagtggcagctctcaagaaataaaaaagtgactagcagaaataatctgcaacttctgtgaataagatttttctcagtgtctaaaataacaaacaccatttatggaccaaagactaggtgccatgagttttagaaattggtccccactccactgttatgtgtaccattatcccagtggcagagatacacagaaagccaaggctcagaggcagtaagtcatgggtccgaggcctcttgctgatgacaaaactggaatctgaacccacgtcaggcttacatttacacatacatgtatacaaatgtacacatatacagcttagattccataaaatacagtaatctagtggtggaaaaattatttctaataaatgttataaaatataaacgcctctctgaatcctttagaaaattaattttgccatgaagtacacaaaggaaagagatacaacttaagtatgaacacagttataggatactacacacagttg

SEQ ID NO: 132699 - DNA, 688 bp, Homo Sapiens
  misc_feature (14)..(14): n is a, c, g, or t
cgctcttcagatcntgatgagtcatgcttgttgctttttttcctcttttcttttctgctttcatgctttgatttcgtgtgctcacttgcctgtacttcatttaaaaggtctccacaaagggaagactcaaacaattccctgccattctggatagttttggttatttttagtttaatttcaggtgagccagtcttctttggaatcacagtttgtggtaccgaaggaggaggtggtggctgtggaggggaaggtttttccagaatttcatgtggtcttgtgtttggaatttctgaatgataatagtcagtggggctaaagtttctaactgcaccaaagccattggctgacccattaggatactgattatatgactggtatttggtttgagtttcatacacactgattgatgatggatacccatttgtgagtggaggaagatcttctgttgtagctgggtactgaaagccttgctgcaaagtagcttcatatggtgtctggccaccatcttcagcaatgtcactgttgttatcaaaggcatcctcctgacggatgttggcggagtcaatgagttgaggtggttgctgaattgtgtttcccatgatcccttgcatgaaagagaaagagaatccattgttctgctccagcatccttaactttccctttctctcaatcggctcgtgccgaattc

SEQ ID NO: 132700 - DNA, 624 bp, Homo Sapiens
  misc_feature (556)..(599): n is a, c, g, or t
gttctcgagtcattttcaatgctttctctgcatgggcaatgccaatatcccactgagcacgttctctctgaggtcggggtttccgaatcttttgtttctcagagtgattgctggcttgtttggttgcctcagccagtaattcttcatactgtttatgacctttatactctcgtacccgtttttcatgaacccacgccctctctggctggttgctaaaaaactggacatgatattctcgggcacctcttgtgttaattttagtatgaacctcaagctgggggatcacttgaaaccatacaaggccaccaaggatttggttcccaccttggaccacacaaagatcgccaacctgaaacttaacaccagtggacacttccgttgttggaacagaagatagtattggctgaactggggcttcctcttttagtactggttcttcccttggtttttctgatacagtgtcaaccctctcatttggtctattttgttcctctggttctaatttggggattttgtgtgacttgcgctcttcagatcttgatgagtcatgcttgtnnnnnnnnnnnnnnnnnnnnnnnnnnnnnnnnnnnnnnnnnnnngtgtgctcacttgcctgtacttcat

SEQ ID NO: 132701 - DNA, 1086 bp, Homo Sapiens
  misc_feature (1007)..(1025): n is a, c, g, or t
atcgagaaccacaacagcaagtaggtagacaagtgaacgagagcgaagtctagaaagccgcggatactgtgacacataaaacacatgaagataaacagtcgtcgcaccgaatacaaacgagcgagacatgacgagaaacgagaagcgcatacagaacacccttacacaagtgttgcggatagtatcgaactgccaacaatatcaagactgaaaacgtcagtggaagcaagcaaataagtgagtagctcgatcatagaaaacccaaggtttcccattatgctaccgactggatactatgtgaattgtgagcggttaacatttccacacatgagacagttatgacatgattccgagtttgtacgactcactataggaaattggccgtggaggccaggagtccgcccgaggtactttgtcagtatgtaactggaagatgtcaatgagtgtgaaatcacaccggaaggaagacggattcctaaattcgatcaggttttgctaaatggaaataatataacaatgctgattcctggaggagaaggacctgaagtgtgaatgagtttccttgacttacactagattttgttttggcttataatgacaagaaaatggaattttttttcccactttctaatgtttaaatcccataaagctaagtttcccgttaaagggaagtgctttgaagatgtgtacccatttttgtaagttaatcatgattatcctggaaaaagaagaaaagagcttcttctttgcagatgaaaataaaggtgtttttggttaactgtcattttgtttattctactgcagtagccagtggaacaaagtttgtagttattttgccacttacttttctgtcattatatgcttatttgttttgtcatttacgtgaccatttgattctcaaacaaaagttgttccaaacaaaatgatgaactttgatttgaacaggtgcatttaaacaaccggaaatgatcacttagaaaattcaattaaaatgctgttgttttgtnnnnnnnnnnnnnnnnnnngcctacagccgcggccgcaagcttattcccttgtagtgagggttaatttcgagaatggcac

SEQ ID NO: 132702 - DNA, 482 bp, Homo Sapiens
ttcgaaattttgaatgatttttattaaacaccattagtctacactgtacagttaatgaaacagcaaagctccactctcttagaagaatgatgactgatcatggctctaaatagcacgttcagatgtcccctaacccaatgtgagcactatgaataattctttaacatctcatgtcagacgcaaaaaggggcaagaactgcaatctggctttgtggggttactcttcacacttcaggtccttctcctccaggaaccagcattgttatattatttccatttagcaaaatctgatctaatttagtaatccttcttccttctggtgtgacttcaaactcagtgacatcttccagtaccatattgacaaagtcatcaaatcctagaagagtaccaacaatttccttatcactcttcatcacgatgtgaattcttgatcctatacatttgtccacaagctctaacggcagcagctgcgacgggttgga

SEQ ID NO: 132703 - DNA, 637 bp, Homo Sapiens
taatgacagaaaagtaagtggcaaaataactacgaactttgttccactggctactgcagtagaataaacgaaatgacagttaaccaaaaacacctttattttcatctgcaaagaagaagctcttttcttctttttccaggataatcatgattaacttacaaaaatgggtacacatcttcaaagcacttccctttaacgggaaacttagctttatgggatttaaacattagaaagtgggaaaaaaaattccattttcttgtcattataagccaaaacaaaatctagtgtaagtcaaggaaactcattcacacttcaggtccttctcctccaggaaccagcattgttatattatttccatttagcaaaatctgatctaatttagtaatccttcttccttctggtgtgatttcaaactcagtgacatcttccagtaccatattgacaaagtcatcaaatcctagaagagtaccaacaatttccttatcactcttcatcacgatgtgaattcttgatcctatacatttgtccacaagctctaacggcagcagctgcgacgggttggtagtagcgttagccgccatggctacgccggaagtggcctgccttcattgatggtgggacgactttgaaaagcccc

SEQ ID NO: 132704 - DNA, 674 bp, Homo Sapiens
ttttttttatacttccaagcaaaatttattagatgtctattcaagaaaaacacaatgacctttgcttgtaagaattcaaagtcaattacctggaagccaggtatgaatagttttttcttttaaaatcagatacagagagtagaaacagtaatttttcttaaatatgacaggcaacagatattgaagtcttttctcataaatggcatcaaagagaattattcatttatcagcaaagctgcatgcagttgacttaatttcaaacctgaagcctttaaaatatgaagctggttatgaacttgacagaaatcaaggtaggctactcaacgatgtttctttaccttcttcctaatgaaattcccttgtcatcagtcagtagatatgtacatttcatttggcttctacgatcttttaacttcatagatttttgcataaatgctatctgacagaatcacactatctaggggtgcttgtgatctgtgagataaggagaggctagtctgctgaaagtgttgtcgcaggataaagaccaaattaggaaacgcccctgttttctcaacaactaaatagtctgtacaaaaaaagagcaaacatatgtacaaaattctagaggctacatacattgtgaaaagatcaatcactgtccatgaaagagatgcataaaaagttttatctgt

SEQ ID NO: 132705 - DNA, 494 bp, Homo Sapiens
gtagaaacagtaatttttcttaaatatgacaggcaacagatattgaagtcttttctcataaatggcatcaaagagaattattcatttatcagcaaagccgcatgcagttgacttaatttcaaacctgaagcctttaaaatatgaagctggttatgaacttgacagaaatcaaggtaggctactcaacgatgtttctttaccttcttcctaatgaaattcccttgtcatcagtcagtagatatgtacatttcatttggcttctacgatcttttaacttcatagatttttgcataaatgctatctgacagaatcacactatctaggggtgcctgggacaggacacaggggtttctggggtccagaaataggccctccttgacctgaggataattttgtgacaactttttaagcccaaatacactttatgtatgtttccattcttcaataatataaaaagtttaagactaacaatatatagtgagctactctgacta

SEQ ID NO: 132706 - DNA, 732 bp, Homo Sapiens
  misc_feature (669)..(669): n is a, c, g, or t
  misc_feature (672)..(672): n is a, c, g, or t
  misc_feature (718)..(718): n is a, c, g, or t
cttctttgtactcctctatctcccataagtatgagagcagaaaatgaatggagatgaagcagttagactgaattttctagcctgaaaacaaaaaccaaacccaaacaagccacttggtctaaataggaagaagtggtttcctactttttcacacgaatcttgcaatcatatagcatgatgtttactggcatccttatggtcaccaaggccctggcccaaaattccaggccacaaacatttgcttttgtcaggcttgaacatccttcgctgatagaatctcaccctacctccccaactcctcgctagaattcaagatacgttaacacaagtctcagtcttctaagctacccaaggttaccccatctttcctcaaggccctaatcaaaattcccgtttcttaaggactattgatctctgtgagttgctgacctagttatccacttagagcagtttacaccctgggcgagctaaagtctgaaccaaactgcttcagaggtcacttacggtcagttacactttaaaggaggagtccttcgaaaattctgggctgctcagaagtgactttcagttgcaaggcatcgctctgctctcaaatcactgcccgttgctctcaagatacggcatatacgtccttgcttagtaaaccaagatatgccccgcctcaccttntanacatggctgcttgacatttgactgaacaaagatggaaagtttatcnggtgagcatggatt

SEQ ID NO: 132707 - DNA, 708 bp, Homo Sapiens
tttgagcttttgatcattttattcacaaaatataagcgagacttacatccctttctggtgaaagttttcaaataattttatgggtagggccttgagatgtatcaattataaaacatgttaaaatgaaaacattttttaaatttacaaatacaaaccaatactttatacaagaattctctataaagttcgtcaaagtaaaaaataatttgtttcaactgaatataaggcatgtccagtttatgtcattttgtagaattatttttgttttgctggagacttttctcttcgccggtcctgatttttctttgattctctggattgttcagagtatctgctagatttttcccatcgtctctcggcaccattttgatatctatcttcatcacttcttgagcctgagtgctttctattcatttcctttgactttgatctatcttttcttctgaaattttcactgtctttaattcggtgtgtatgcttctcattttcagaaaaagaatttcttctctctcctctcttctttttgggatcaccatgcttattttccaaatctatatgcatttcttggtctctgtcatttgcaactctactgtagttatttcgttcagaaggaacatctttgtctgatgtgtactttgttataggatctctccactttggacctcttgaattttgatctctgtgtttttctgaccttctttctctctc

SEQ ID NO: 132708 - DNA, 882 bp, Homo Sapiens
ctgggaccattgtttccgtaacctcgttttctgtgtccagctgacacaccttcaaagtggcatcaggtcctaaactgtagcttgcaatgtgcctgtttccagaaaccaaggtgaaagtgcttttagacagtgttcccatgcaagagtcccttcccagcttttttctggaaatgcatgtttctctgaactctgagtcccaagaaaaatcacttgagacaccaagaaaatgggggaagtgctaaaattgtgtgggaattcaagcttaacaataaacatcaagacatttttgataaaaatgaatccactgacatcggggaggagcaagagaacagcacgctgacactgggtcagaggctaagaccgacatttctgggaaccactcccggaagggcacagaggagacgctttcagcctctcatcagccagcctggcctgtagctgctgcacgttatgagtgtgttcctggcatgactgcttctaacaaagaaatgctgaggcagtgtcacgctggtgtctgtcctccttacagaatgcctgaacagttccattgactcaaagtgaagatcaaaagaaccaaatgacagcaatagccaagtgtaatcatcagtaaccctgtgttctatccacaggtaaaaaacaatcatcctcttcattatgggtttcaattttaaatgtaatacatttttagaaatgcctatttccttttataatctctttatataatctaggttattctggctcttaggtcttcatttagctactgaaaagatttgatctcaaatcaatgatctaaccacccatgaccatctcccacctctctccccgtacaccccccagcatgaattctgggaactcaggtaaaatgctttctggaaacctgcc

SEQ ID NO: 132709 - DNA, 464 bp, Homo Sapiens
ttttttactctccaatatttactttttgattatataaattccttttaaaaagtagtattaaaaacaaaaccattcaggttaatttgtatggaaagagatttaagtggctgatttcaaatgaaaaatcagtgtcagtccccctcctgcctcttgagaggccccaagaaatgacagcagacccgatcactcttcctgacaaccccaggctccgaattcattaagcagttttcttcacccaaaggttaatcagaattcagggtgaggcatactccttgcagcacccagtgagaaatgtgcctcgtggtaaagagatcagcttcaaaaaccaagccgactcccatggcgttccttctcatggaggtggtgtagacgggggtccggaaagtattctgcagcttgaggcgatgggcttcaatgggggatgatcttcaggatcggcaggtccacctcgtgccgaattcttg

SEQ ID NO: 132710 - DNA, 848 bp, Homo Sapiens
cccattacatacaaaatgttttaattgagaaaaaaattcaaaacagtcacacatatccattatcatcatggttctctgaaatattttcttatacaaatgaaatatttaaatggaaaaattacatttttcaaatctaattaactaattatttttgtcctgcctttccccacaaggatttcaagacacttattggaatacataaagcatgacagacaatagtataaaataaaaatgggaataaatgttaaaaacaaatattgagaggaacaacacaaaattaattttaaaatgcatagaacaatgatcaaataactaatgagtatgatttgcaaatatttttaatgtaaattacagttaataaaaatgagatagttaaatcaattgctgttaattctccaactagattggaactgcttcagagaatactgttaaagatactctgggaagtaataaacagcaatctcgaaacgttaattcatgtagtaggaatcataatctcattttcacatcattctttgttctttaaatttgaaacacttatttcaaggtctttagaaattcacaacttaatttcttttttttcaaagaactaatttctgggtgagttgatattcttttcaggttgatattcttttcaggtactgcaagggtaccataaaggtactaatgttattaatgtgactgacaagtaattagaaaactggaaattaattttacaaacatttttaaaatcgctacaattaaaaaaattcaagatggttacattatgaatatgaatgaaatgtcattagcgacttccccggccgtaatggccgaattcccgggcatatgtccggtaccgtcgactg

SEQ ID NO: 132711 - DNA, 749 bp, Homo Sapiens
aaggagaaaggagcaggagcaaatgcagaggaagtccaaaaagacagaaaagatgacgtcaactacagccgagggtgctggtgagcagtaacacataccctcttacagatgatggagatgctccaagagaagtccccacctcttcctgccctgctctcctccagaggatgaaaaagaaactaaatgataagggtaatgcggctctaggccggctgaggaactgtgtgttgaataactgcattttctgcaatagaatgcactcttaattttaactactaaaataatcccaagccacctttggttcattaacaaaccagagatttcatttaagtagctgtgttttgctcttctctaacttaccaacatcttgtgttgtgttgggtgtgttttgtcacttggagaactagtgtgaccccacccaagagcatgacacaccctggtgttgttaatggagcgccgtgaattttcagtgtgggatcctgaaatggcaattgcacatgtctgcatggcagagagcaccctgccatgagatctgagaccagtacttaacttctaggactgcaacacctactccaatgtgtgggaaagatttgctcttaattctcagtctggacagtgagaccaccccgctgtggaaacatgggtgctctgctctgtagttacctactaagggaaaaggcaagcaagtcattctgcttgctaggcatcaaaaagaaagaaaataaattatagctatttgttaaccactg

SEQ ID NO: 132712 - DNA, 679 bp, Homo Sapiens
  misc_feature (667)..(667): n is a, c, g, or t
tttcatggtttaaatgtcttttatttgcaccagtttatagacattaggcagattaggtactatgtctttcaatggcatgtatataacatctagtcaaatacaggtgctccatcattacatcacttaagtttgaagttttttgttttctaattggcagattactttttgcttttgaatatttgaaacagaaatgctataaattgatcactgatccaacttgggcctataaaagatcactattgttgtcattagtacaatttactttaaaacaggagcaaaaaacgtgtctgtcactccctgtttttgcaaagtctctccccttagttttatggtagtttagtgacattctgctgtatttcactattgtgagatgacgtggagccaaatgaagggccactttgatccattctttgatttcaaccccaaactttctgcaaatatgttttatttcctagccaaagttattttagatgccacatggcactatataaagaattttaatgttctagagtcttatgtactggatagtaaagagttgctttgggggtaagaatcctgtgaaatgttgtttgacgtgaactgaatcacttaagctgcttcagccacatttgggttcttgacagtaggtgtgaaagtgaaggatttaacaacgcttaagctaacaganaaacagtatggg

SEQ ID NO: 132713 - DNA, 1100 bp, Homo Sapiens
  misc_feature (98)..(119): n is a, c, g, or t
ttgctactttcatatttaaaggtacaagtttcttatttcaaatctctactgatagtgccctatggggagatgctggaacacattttgcaaatgtgacnnnnnnnnnnnnnnnnnnnnnngcttgaagcctgtgtcatgttagttgctgctgccttctttccttttgtgaggttcccaatgtttcgtccagaaaagtactttatttatgcaagtcaggtgactcttaggccacaaaaccatttgatgataaacagattatcattaggtgcatatcttattgatattttgtgaaatgttatgcctatgttgcaaaagttgaatagttttgtctttatatattgctgtcttcagtgtacagcatggttttacttaattgaatgttaatgtttaatattttcttcttatagaagagatcatgcccttttgtatgacatgttttaataaatgttatctgtcaactttggaaaaaaacacataaaaaagggcggcacgcgccatattatctcttaatgagacctaaccttctcgctacaggtttaaggtgcaagcagggtggtaccccatagccggggacgtatcataaagaacgggacctgccactttcttattaaaagccggacaaacacttgaaaagaattatttccttgcgcaaaccattagttcaacaccctttgataactttttgctaggaagggcgccactaaggccgacctcccgtctgcaacacacaatcgaggggggaggccccctactccgggggatactgtactggatcttaccccccgccaacacacaatccccccggcaaagaacccgcttattagggagattcgcttcgccccaaaagcattcttccccccatctgcgccctaaccaccccttaaaaagaaaaatttgttatttcccccgccgccccgacaaatacttccgatccccccctaaaccgcactatttggccgaaactttccccccccactcacaaccccaaaaaatatctttaatgagcgcccccctggttctcgcctccggtaccacgaaacgttacacagcgcgccgcatatttttcccatccgccttcacatttccccccttctcgcaaa

SEQ ID NO: 132714 - DNA, 847 bp, Homo Sapiens
  misc_feature (289)..(339): n is a, c, g, or t
gaaatgttgaggtttgtcatatgctttttctgcatctattatgatgttcttgtgttgtttgctgttgatcctatactattatggtgtattgcatgaatggattttcagaggtgagagcagcattgctttcctgaattgaatgccacttcatcacgggtatgatattgttataggattctcttttccaatatattggtgaggtgttttcttttgaaatttaaaggagatattcatgtacagtattttaatagaatctagcattatctagtacaggatatagtgtgtgtgnnnnnnnnnnnnnnnnnnnnnnnnnnnnnnnnnnnnnnnnnnnnnnnnnnnggtttagttatggtaggtaattggtaaatattacatgtaacgtgtatatgatatataagtgccacatataaacggtattagcctatatggcattatactgttatagtgtaaatttatatacttttatcctccatagtatagtgagtttcatttccttattagcctgcagaatacaccagtctcattctcctctgggaacaaaggagaacctcaccctcttgttgctacagaatgtgccacccaaaaatattcatgatcttaggtttaggaagaagaggctataatatgacaagagaaacactaggaacagagaaaaagtatgtaattttgactacattaaaatttaagcttttctgttttgaaagacacaatgaagaaatacaggagtatggtcaaggttagtggttcacatctggaatcccagaacttggaaggctgaggtaaggggatctcttgagcctaggagtttaagaccaacctgggaagcatagtgagaccatgtctctac

SEQ ID NO: 132715 - DNA, 1661 bp, Homo Sapiens
  misc_feature (172)..(180): n is a, c, g, or t
  misc_feature (333)..(341): n is a, c, g, or t
  misc_feature (416)..(430): n is a, c, g, or t
  misc_feature (481)..(625): n is a, c, g, or t
  misc_feature (1552)..(1552): n is a, c, g, or t
  misc_feature (1588)..(1588): n is a, c, g, or t
  misc_feature (1610)..(1610): n is a, c, g, or t
  misc_feature (1615)..(1615): n is a, c, g, or t
tgtgcctacctcttgtgagttgtaaggtgaggggcgataaagagggaaagtttttttagggcgggtgtttttgcgccgggggggaagatattgtggtggggggtgggagtgggtgtggagcccgggtgggatggaaaggtttacagtccactgggggggagaggttgacttnnnnnnnnnaatgggagtgatttaccgcccccctctcgaaagggacagggggggcggggtaattttgtaaaaatgttggttgggggtgcggtgtgatgaaaccaaaagagcccgtgcgataccctgtatgttgtttgaagaacgtgggggtccgcggggtgnnnnnnnnngggggggagaagaacccggggtttacagtcgggggtttcgttgggggaaaatttttgcaggtgttcttttctttnnnnnnnnnnnnnnnccaaaaggagtgttttagaaattttttcgggggaggggggcgcgcccgcgnnnnnnnnnnnnnnnnnnnnnnnnnnnnnnnnnnnnnnnnnnnnnnnnnnnnnnnnnnnnnnnnnnnnnnnnnnnnnnnnnnnnnnnnnnnnnnnnnnnnnnnnnnnnnnnnnnnnnnnnnnnnnnnnnnnnnnnnnnnnnnnnnctgagagggaaatctttattgttttctgtataaaaatgtccatcagatgaaggtcaaaggggttgggggcagatgcttatgcgggaatagcgaggtggcagccccagcagcctttcagccctctctcgtgcaggccttgctcggagtcccaggagatccacaggtccggcatgaacagtgagaggtcagaggtggaaggctcagcaggagaggagaggaggatcagcagaggtcatgagaaggccagaatccagggtcaggcctggtcgaagttgagtttcttagctggaggagtttctcctagcccttcaatatccaccacgtcactgttggcatcggagtcgttcagagcactgagtgtcacatcagccttctgtttctttatggggggacccccggcctcagggacactggagctgctgggaggaggggcagctggaggaggtgacaagacaccagatgccaccttcttgggccctttcttgggtgactcagctggaagggggatgccagaatcttcatataccttgcgtttcacagtggcctttatctgggccactgtccgttccttgatgacacagctgatgtgattaagatcgtccccaaatcgcttcacagcagccctcagcatctctatttccgtctccgtccacttcgcgcccgcaggagaagagtcggccacgggatgcagctgcatcgtcagctccccgagcttcgtgaaggcggcgccggccgccggagaagatctctccgacctttgtggacgctgacgtcatggccccgcgcgcctcctcacggagacgccgccgccgccgctacacgcgagccgggaccacggagagcagggagactgagcggctcgggccctcgtgcgattcttggctcgagggcaatccctaagtgagtcgataattcgtatcattcaanctgttcctgtgtgaattgtatcgtcacatccaacanatacgagcggagcataatgaangctgnggtgctatgatgagcatcacatattcgttggccatgccgcttcatc

SEQ ID NO: 132716 - DNA, 716 bp, Homo Sapiens
acaggtgcaaactttggcaaagagttttaatggcaaagttggctgcagcgacaatgccactcggggtggggccggaagccatggtggggaaggaagggtcagcgggcggcagggcagggccgggtccctgaagaagcagcgagcgaggctcagcgggcagtggcgggcaggcaggcgctactacatgatggagcaggcggacagtgggttccgcacgtggcaggtgcacgcggccccacagtactgccggaaggtctggtagcagctgccctcgggctcagccccccactgacccccggatggggccgtcagcgcctcaggcggcaggcggctcaggatggacgtgttgacagccagcgcggccaggccgtagtcggtgaagagcacagtctcacggcggcaggtggggcaggagatgaacttgtacttggggcaggactcgtagagaatctgcaggcactgctcacacacagagtgcaggcaggacagcacgcggggcctccgctgggtgacattgtaggagtgcccacaggtggggcactccaggggctcgcctgccgccgccgaagaagccgccgaggccgaggggccaggccgaatcacgtactgattcacaatgacctcatcctctggggccacgcggggaaagcccagctccgagcttcccttacgggccgccgtggcagtggcggggtatgggtgccccttccaggcag

SEQ ID NO: 132717 - DNA, 741 bp, Homo Sapiens
tcatgttcatagacacatatgaacagataccttctatgagtaattagtaagataagcaatttttaaaaattccacagaatcctagtctgtgattagactttatgcttagggcctttcattactgagctggattggacctcagaggttaactgtttcctgagtgtgttgggattagatcatttcaattaattcatgtgtcttgcccctgtaaaagcctaagactttttcagaataggtggtggctaactaagggtggagtcaggattgctagtgagattttcttagctccaaaatacttatcttctctgattataaatgaaaccctgaaaagtagggataatttttcatagagataattgaatgctgatatgaaattaactgtttgcagatagatttgaagtggattttgacaagggtgaggttgaagaatagatgatgatattgtttaggctggaatggtttttctttgtaattaatttcagttttattttcagggtgatcgtggacttcctggttttcctgggcttcatggcatgccatgatcaaagggtgaaatgggtgccaaaggagacaaaggatcacctggattttatggcaaaaagggaagtatagatcacacaacaaagtattcatattgaacttttaatgtaatggaaacagaaaactagaattgcagttctaacccagcattagaacagttagctctgttcacccttcttaggggattaattcagaacaatg

SEQ ID NO: 132718 - DNA, 632 bp, Homo Sapiens
gaaaggctctaggcaaaatggtctgggtttatttttttctatagtaatttcagattatccatcattcactgtaataagataccatttcagtggtggagttgcatagtcttttatttttctaaagatgaccattccatgtttaatgtcttcagagaagatctaaaaatcaaagttaacaacccatttgtcccaactctaactcttcctgggaacaattcctcattctgttacttgatttcttcctttaccacccacataaaatatgtcttactgctcacaagatcaaaagaaaacagaacaaaacattgaaacatcagaattgtttaaaacactagatttcattcaatggtccaattggacacttgctcattggaacttatttctgcttcagctctagttctttgagaaacacaagaattcctttcaccaaaatattagcctgacacaagaatgttgaaaggttagctgccttagctttattgctgcctataatctccaaagatatctgaacacctagaagattaaatgtagcaagaagtggaagagaaacacagtttataagtcatttaataactataattgcatagaatttactcacttttcagatacttattctcctcgtgccgaattct

SEQ ID NO: 132719 - DNA, 720 bp, Homo Sapiens
  misc_feature (189)..(218): n is a, c, g, or t
  misc_feature (585)..(594): n is a, c, g, or t
  misc_feature (682)..(682): n is a, c, g, or t
gggggggacattcgtaaccatagcattttattaacaaaatgtttccacctttcttacaacaaaacagtgatttagcatgttatactctataaaagtgtattatagaatattcaagctaaaacaatattatttaaaagtatggcaaatcaactttcatttgcaaactatctactatgagcataggcatgnnnnnnnnnnnnnnnnnnnnnnnnnnnnnnggtctagttttcttttgtcagcatctataaacaatacagacatcatatggtttacatacacttaggtccagcccaaggttaagactgcaaaaataaagtcttcaaacatccacagaagcttggcaaaccaccactgcagcattccatgacaggtaaccaggccatgtgtcatgcagtaagtccaaggccataaatttgggctgtttataatagtgctacaaagcggccaaaactgtaagcaactgaattttactttcgtaatagatgctattataaaaaggcacaaatatcttattcctttcatcaggtcttgagaaggcatgacattcttaggagaaagagagattgctggtaggacggcttagcnnnnnnnnnngaaaaatgtctaggctcattgccatagctgtttttcttcaagacttttaatttggacttttacacgcttaacaaatgctttattacanattcagcgaagttctgaccacttatgttaactatcttt

SEQ ID NO: 132720 - DNA, 829 bp, Homo Sapiens
  misc_feature (53)..(80): n is a, c, g, or t
  misc_feature (415)..(415): n is a, c, g, or t
  misc_feature (754)..(781): n is a, c, g, or t
tttttaaaataaattcttttattgagatgagagacggacacacactgggaggnnnnnnnnnnnnnnnnnnnnnnnnnnnntgactgagtcccagtactcatggagtacctgggtctggctggtgacacactttatctggcggttcacctgcttgattcctacctgagcgctggccgcgtgcgtctacatcgcctgcagctgctgggcgtggcttgcctgtttgtggcgtgcaaaatggaagagtgcgtgcttcccgagcccgccttcctctgcctcctgagcgcggactccttctcacgggcggagctgctgcgcgccgagcgtcgcatcctgagccgcctggatttccggctgcaccaccccggcccgctgctgtgcctcgggctgctggccgcgctggcagggagcagccccncaggtgatgttacttgccacctacttcctggagctgtctttgctggaggccgaggcggcgggatgggagccgggtcgtcgtgcggctgcggctctgagcctggcgcaccgcttgctcgacggggcgggctccaggctccagccagaactttacagccccgaggaactgggcaccctcgagccgtgcatggcccgcgctgcgctccgaggtcccgcgccgggtcgcgccgcagtcttcctcaagtatgcgcggccccagcgccaggggaccagccttgccgccgcctgcctgctccgccgcctccagtctgagcctccctgagtactgggactcagtcannnnnnnnnnnnnnnnnnnnnnnnnnnncctccccagtgtgtgtccgtctctcatctcaataaaagaatttatttt

SEQ ID NO: 132721 - DNA, 883 bp, Homo Sapiens
  misc_feature (374)..(382): n is a, c, g, or t
agcaattcttaagcctttattcaaacctataaatgcagaagatcgatggactattagaaataggagaaaactttataaaacataaaaaataaaagctacataatcctgaggcctatgaggaagtaaatgcggaggtgatatcagtaagacttttaactttcttcttttatcagattacttttttctgagtttgagaagaagaagggattgttcaacactctcaaatgaaaacacaaataagttttggtttaataaataaaataagatcacttaataaacaatgttttgaaaagagcatttcattataatctgttctgattcacctcctagcacacaaagcaaaccaatttcccctggcttttatttctaacagnnnnnnnnnttgccctttttattccagactgggatccaaattgttatgtactgtattccaggatcatttcttgggtttagagaggtttttatcatctttggactgttgctcctcttcaaatctcattttgttttcctttgttactcttagaatagtttcaatatcagcaatggtggtcttaaaattggtctcgccttgcatattaggtgctgatatttcttgatggatgatgaagagatggcgagcaaaggtcatgaggaccccctggagatcctcgccgattgttcaacctcccatccaagaaaaggcaattaagacagcaagtgaagagtcctgaccagggatggacaccagggtctcaagatcatagccaatgccatgggccctacagatctggagaaaaacatagtggaaaaccagtgagagattgctgtgtcttagctgggtggtcatcactgcatagcgactggttgccagcatctgttgttccaaggtgcttggatctatacc

SEQ ID NO: 132722 - DNA, 602 bp, Homo Sapiens
  misc_feature (57)..(281): n is a, c, g, or t
  misc_feature (476)..(546): n is a, c, g, or t
atgtgactacattaaaactttattcaacaaaataccataaagtaaaaagaaaagtcnnnnnnnnnnnnnnnnnnnnnnnnnnnnnnnnnnnnnnnnnnnnnnnnnnnnnnnnnnnnnnnnnnnnnnnnnnnnnnnnnnnnnnnnnnnnnnnnnnnnnnnnnnnnnnnnnnnnnnnnnnnnnnnnnnnnnnnnnnnnnnnnnnnnnnnnnnnnnnnnnnnnnnnnnnnnnnnnnnnnnnnnnnnnnnnnnnnnnnnnnnnnnnnnnnnnnnnnnnnnnnnnngtaattcacaaaaactcacatttactttgaagagcaatttggcaatgtctataaggctaaatgtgtttattctgtgatacgtcttaggtaacacgcagtgagcccaatgcagaagaatgttccactacagtgttataatacagaaactggcaacaaccctcgtgccgaattctttttctctgaataatttttagnnnnnnnnnnnnnnnnnnnnnnnnnnnnnnnnnnnnnnnnnnnnnnnnnnnnnnnnnnnnnnnnnnnnnnngacttttctttttactttatggtattttgttgaataaagttttaatgtagtcacat

SEQ ID NO: 132723 - DNA, 1094 bp, Homo Sapiens
  misc_feature (1057)..(1058): n is a, c, g, or t
  misc_feature (1073)..(1073): n is a, c, g, or t
ttggctacattaaacctttattcaacaaaatcccataaagtaaaaagaaaagtcacaagatagactagaagatatttgcaacatataaaactgacaaatgattgatgtctagaataaaagaactcttaaaatttattcagagaaaaataattcaatacaaagttgcgcacaggatatgaacaggttcttcacaataaaatgtccattagaatgaaggatttaacgagaattgaggaaaatgcaaactaaagtcataataaaacaccattccatactcatgtaattcacaaaaactcacatttactttgaagagcaatttggcaatgtctataaggctaaatgtgtttattctgtgatacgtcttaggtaacacgcagtgagcccaatgcagaagaatgttccactacagtgttataatacagaaactggcaacaacttcatgccttcaactggagaacagataaattatggtagttcccgtaattgaattctgctacacaggactaaaattaatgaacgagagcttcagatataattatacaataatgagtgaaaaaagctgtagaatgagcaagtatgaggcttaaaaatatataaaacagtacttaaagagtagatggtttaggttatacacagtgaaagtacaacaacacaggaatgataaacatcaaattgtggataattgttacctctggaggggaggaatggcaatgtgatctcgaagtggcaaaatgttaaggtttgacaaaagtaggtgctgagaacttggatattcagtatgtagttcgctatactagaaatagtacagtcacaaccaacacatacatacacctatttaagcccagaatgctgtttcaataatacattttagtgcccctgaaggcagatgccatcctaggaatttggggtacaggtatgaacaaggcacagtacctcccttcaagataatatcacagaagcagacttgggtcctgattaactttgtcactgatggctaggatctgttctttaatcaacggggactgagacccttaaaagttcaacgttatgtttctgnngtctcagacacccancactgccctgcttcccctgtg

SEQ ID NO: 132724 - DNA, 732 bp, Homo Sapiens
  misc_feature (562)..(562): n is a, c, g, or t
  misc_feature (571)..(571): n is a, c, g, or t
  misc_feature (615)..(691): n is a, c, g, or t
  misc_feature (716)..(716): n is a, c, g, or t
ttttgcagttatttcaattcaggttttattaaagttgtttctgaatattttttctcagtgatccttgttctgatgaatattacatttcatccttagttttgctcatttgattttgctttagtgtttaaagaacttttatttatcaaatcctttgccatgaatgagagcaccaaataacatatcaatacccaactgcctgattcctttacagcagtaagaaaagtcagtaaaacatttgtacagtccaagtactacaacaccaagatcccctcttcaagtgagagtgagccaaagcttccttagtatcatctcaagtcaatgtcttttcactataccattaagatgaaaataactaagagcactgacacaattttcttgctctttccatctaaaaatgtgggtttcctgtggtgtggctaattttaaaaaccagaaaatggaaggaaaataagtcagtgaatgattagcttacaagttttttctactcatcattaaccagtcttcccttttccctagactttagacagccataaaaaggcaggaaaaacaatgtgcataatanaaaaataanaataaatatctgagcacctactgtagtaggcatttaacacattnnnnnnnnnnnnnnnnnnnnnnnnnnnnnnnnnnnnnnnnnnnnnnnnnnnnnnnnnnnnnnnnnnnnnnnnnnnnnatcactggtgcctaaagtcctgcanggtgactgaagctgag

SEQ ID NO: 132725 - DNA, 773 bp, Homo Sapiens
aacgcaaacaccttttattcacatttgctgagtagcaattacagtgttttcttcattagttttccaacactggtaatgtaattatgatgcaattactaacaatataagtaccaatactttgaccaacaatagtcacaatggtttataacaactgaactcaaaggccacgttgatttttccacccacaacttgattctgatttttctagagtcattcataagaacaagaagtagtggatcctttcttcctccttagtatctgaaaattctgaactctgaagagaaattccatttggtttgtcattttcacctctgtgcatttcggcagctcttaacttttcttcaattctttactctattagagtgacttttctgcctgcttgcttgttcttcctcatccgtgtatccattatgtgtccttggtcctcatggctctgttcttttctcatttcagaatgtgtcatagattctgagcctagtctgaagtcctgggacttgttcttattgattgattgctgtggaagaagaggaaaaacaagtagtaagtaaaaaatgagaaaagacaacacagtcaatattcacatgctgaaaacccaccaacttcctgaatggggagagaatatgcctgttctgaacaggaatatctatgcctgtcctgaacatatattgtctatcaggacaatatatttgctcccatgaaaaaccaaggaagtagttctccagagagttcaaacactcatttataagtaaagtcagctttcaggtatgtgacca

SEQ ID NO: 132726 - DNA, 602 bp, Homo Sapiens
  misc_feature (175)..(229): n is a, c, g, or t
  misc_feature (383)..(383): n is a, c, g, or t
gaaagatgaatgtaaggttttattgagtggtggagctggctcttggtgagatggatggggagctggaagggggatggagtgggaaaatgatctttctctgcagtgtggccgtctagcagctaatctcctctctgaccatccccaaccaaagtcttgtcaatgttcagtcactccnnnnnnnnnnnnnnnnnnnnnnnnnnnnnnnnnnnnnnnnnnnnnnnnnnnnnnncccttatttgcaggaggtcacagggaagtagagagggggatgaagaaatacatttccatcctgaggtggtctgccatctcacttgaagaggtgctttttctcgttgtaattcaagggcaatattccgggttaggaattccatctctatgagcanggtgttgacattgtttctttgactggcaacttggcaactgtattcggctttccttgaaaactcagatttccctcttaaaaacagatgaggagtcctggaatgctgtataaccaggagagatgttctcctgaccttctatatccgcatttcccagggcgctctctgccaaggtctgaaagaaatgcagattccttgcctcctagtgttgcccctcgtgcc

SEQ ID NO: 132727 - DNA, 441 bp, Homo Sapiens
  misc_feature (247)..(297): n is a, c, g, or t
ggggaaaatgtggagtgtcagtcaagaggcaacactaggaggcaaggaatctgcatttctttcagaccttggcagagagcgccctgggaaatgcggatatagaaggtcaggagaacatctctcctggttatacagcattccagcacctcttcaagtgagatggcagacccaccctcaggatggaaatgtatttcttcatccctctctctacttccctgtgacctcctgcaaataagggagagacaannnnnnnnnnnnnnnnnnnnnnnnnnnnnnnnnnnnnnnnnnnnnnnnnnntgactgaacattgacaagactttggttggggatggtcagagaggagattagctgctagacggccacactgcagagaaagatcattttcccactccatcccccttccagctccccatccatctcaccaagagccagctccaccac

SEQ ID NO: 132728 - DNA, 201 bp, Homo Sapiens
ggagctcggcaccagattaagagacgagatgaacagaagaatggagtggctaaagagaagagaaggagtgactgaacattgacaagactttggttggggatggtcagagaggagattagctgctagacgtccacactgcggcagaaagatcattttcccactccatcccccttccagctccccatccatctcgtctcttct

SEQ ID NO: 132729 - DNA, 783 bp, Homo Sapiens
  misc_feature (563)..(572): n is a, c, g, or t
cttttgaaaacatttatttgaaggaaaacaaaaccattctggaaaactaacaattctaccaaaatacaagaattcccatgctttttcccagagtaaattacaaaatcgaaatggtcaaagtaatagaaggatataatactagatactacagaggcataatcgttgacctaaaatgttgttttgctgacaagattgcaaaccaagctctctagctccggcctgaccatcccatttccaaagtttcaatctacctttacatacctagatttaaagacaaagaaatgtctttatttatgttttcctttcattctgatcacctttggtctttactgagtttttttcagcaagttttttaaggtaagagcaacgagaacaattacagtctcaatcataaaaaacggagacaaaactggccaatctttcctcaatagcatcttaaatagtcaattcttaaattacactggcttcaacgcttctcttcataggctaatgaatggttttcttgtattgctaaggcctcacaaacaactgctgttcaaatcaaaatcttttttgtagagacnnnnnnnnnntgtctagctcattgctagagattagtctgaaatcagaattccacttgcattgtagatcaagagggaagattcccccagtgatggagtctgtgtgataaaagtcagcctggaaccatcagggacatacacacatacctttccttgaggaactctttgagaatattttaaatttccttactttgcaatattctaagcaaactctagaatttca

SEQ ID NO: 132730 - DNA, 744 bp, Homo Sapiens
ttttgatggggggtgggctttatacaaagttgagtggggtgacaatggtacagaggaaatgggactttgcaattatatttttctaagtggtctgaacttggtctcactacccacatcacctggaatggttaccaggcctcaaaggactgccccacgggctaaacagctgatccgctctctgaagccagacagtcttatctgggaggtcctttacagatgccactgttgagggccggaagctgaagagagtgagctccatcctcaagtagtcctttatgctccttttgaactagccttgctgttctgggccgtcatttgtgatttggcctggagtgtaggttcttcagaagaagtgatgggtcctttaggtaatgaaataggtgttgatggtgttatgggtgatgatgtaactggtggcggctgtataaagtcttcatccttagttcccttcagttgaggtgcaagatccaccatgttctctttagattcagtgaaagtaggtaattccacaagaatatcagtctttggagcctccccactgagtggtatctcaatcggcttgggcttcacatctatcaggtagaaggtgcgggacaggagcaaaagggaaggagggacgttctccttcaggtggaggtcctgccactccgtgagctgttgtcgcagttgttcctccgtgagaccagtgatctcatccctcgggccctacaggcagcctgtagttctgatacactcaatgctgtc

SEQ ID NO: 132731 - DNA, 1004 bp, Homo Sapiens
attttcttcattctcagagagggaaaggaggatgataaatattgaatgaagctaattttagaaaataaacaaatcctgtcaacccatgccataaaggcccagggagcacactgaatgaatcttacattctggcatttgcaaaagtgtcctcaatttcctttttcattttataagcacagcaataggcaacacctattttatatctaggatgggaagccctcttagatttgaggctttctagctgatgcaatcaaaaacccatcaaggactgcttatagcaacttgtgttgaaatataaaactactatttatttgaaagagaccatagttaataacatgttccaaatgaagcagtgacacccatttcttgatcctatcacttttcttgtcacttatgacatctctgggcttagaaagacagtgatataaagataatccataggggaatgtccctagtcagcatattaagctgcacaattgagtagtgagctcaagttcacttatgaaagtggtgtccacctaccaactacacagggctaagtggatatttaaaatggctgtggacaaggttgtgctcaacttcctactttgttaattgaagacctaaggctgtgttagaagtagctcttagaagtcaggtcacaagctcaaacaaatattaactatatacattttataatctcagaattttgtgaagaatgagtatgttagtaaacatggccacatactgcatacatctcactatggaagagaaaatataaagtggtactcagtttacactaaaccaacaaaaaagcacatggggtgtatgtgtatttatatatctcacacactgagatatactgttgatattagtgtcttaaaatgacatttttcatggatatgatacccgttgcctaaatctacttaggcctagtccttgtagaaacagattttcataagagaataagggcccaacagtctcctcacccccatcaattggtaggattgccctaccaatcctca

SEQ ID NO: 132732 - DNA, 635 bp, Homo Sapiens
ttttatttttaaaactttttattttgaaaaaagttagactttcaaagggtggcaaaaataatagtttccatgtacccttcacccagctcttactaatgttaacatcttacataaccacagtacaattatcaaaaccaaataattgacattgatgaaatcttatttctggtcctttttctaatccaacatctaaatcggtatctcacaatgcagttagttatcatatttctttactctcttccagtccatgactgttcctcagtctttccttattgttcacggccttggcactttcaaaacgtactggccagttattttgtagagtgtctctcagtttgggcttgtctgatcttttctcctgattgcactgagattgcacatttctgacaacaccacagaagtgacaattgtgcccttctcagtgcatcatattggaaggtacatggtatcagtatgtcttattagtggtgatgttaacttgatcactgggttaaggtggtttctgtcaggcttattcactataatgactgtttttccctttgtaattagtatcttgtgaagggatcttaaaaccatgcaaaatcgtgtttcccatcatacttctgttcactaattcgcctcgtgccgaattcttg

SEQ ID NO: 132733 - DNA, 689 bp, Homo Sapiens
ggcgttttcatttctctgaggaagccgagaaactttaattaggtgacggggttccgagcacttaagcagatggggtgcggtgaaggcccagggaggaggagggcagggaggtgcacgtcctctgtgccccacacactttcaaccactgcaacaaacaagcacccaagagaggctgtgcggcagagccctgcacccacaggcctttgacagcacagtgaggggcctccgcacgtggcctcgggacgctcactcgacgcacacccggtgcatcacactggcacctaaagacaggccgtgcagctaaaaggagcacgtgtggccaaggagagcaatcagctgtcccgcgtttctaaaggcagggaccgaggctgtggaggggcgagcagggcaggccggcggaggctacttgagcagcttggccacgttcaggctgggcaccacaatgtccttgaagaggggcacgtagctggggctggcctgtgctgggccctgctccagggtctccatgatggtctgcttcatgtcacggcttgcgtccccacgcacagccagcagcgcaccgatgtggtcatccctgatgtctggatacttgctgaccagagtggagacctccaggtagagcagagaagggtctgtcagcttgatcacttcggccacagccacgatggtgtcgcagtatccgtccacgt

SEQ ID NO: 132734 - DNA, 1173 bp, Homo Sapiens
  misc_feature (53)..(93): n is a, c, g, or t
  misc_feature (97)..(131): n is a, c, g, or t
aaaaaacaaaacacagaaagaaacgtaatagcatcatatggcatccttacagnnnnnnnnnnnnnnnnnnnnnnnnnnnnnnnnnnnnnnnnnccgnnnnnnnnnnnnnnnnnnnnnnnnnnnnnnnnnnncagtcgacggtaccggacatatgcccgggaattcggccattacggccgggtgacaataagatggcaatctcggatctacaaggtgctgtcgggaatcaaataaaatatgttatcagagatatcatcacatctatagtgtttaacagagctttatgccaactactaagacaaagctttaacaaagtttatagaatactgaaactcgtaacaattacctctctacgtgatgctgtaaggaatcttgctaatttggtaggaagaggaagcatttaggaaagggtttagtatctaccaaaagtacttgacctcaagtaaccaatagtaatgcaaacttgctttaaaggaaccaaaggcattgccaagtatttgccaaaaggaggcactttttatttaaaatttgagactaatgagatctcaaaaatcagccccaaaaaggtattatccatttaaggttataattttcactaagatgtagatatttctcttcattgttttcatgtaaaatagtatagagttgttttgttggtttaagagtaacattcagtagtaatacaaagttttttttctatgtagaaattagttttcttttcttgcttgcaatagaaatgcaatgtgataggtgtttctcttcttattttcattgtcacattatgtcttagcatctcactttatgaaaaaaaggagaaagataccaatctacagagccctgcttgttgaagcactagtttaatcaacaaaaaattatggcaatcgggggtccattcatctattgcctttatgttgttttttaaaagaaaaaccatgatgcctttgtatttgctgtttgcacccctgaaatcaattccatatcatgtttgaatgccatacattttgcacatgtactgtacataagtaatgcatactgtatttttatatgtgtgcacatttatcatcagatcttttgtacatagtggcagtattgtagctgatcgggaaatgtttgatatctcagcaattttgcatttttgtgtctcaaataaaagacattttgatgtacaaaaaa

SEQ ID NO: 132735 - DNA, 1054 bp, Homo Sapiens
  misc_feature (43)..(60): n is a, c, g, or t
  misc_feature (812)..(812): n is a, c, g, or t
  misc_feature (814)..(815): n is a, c, g, or t
  misc_feature (841)..(841): n is a, c, g, or t
  misc_feature (918)..(934): n is a, c, g, or t
  misc_feature (966)..(966): n is a, c, g, or t
  misc_feature (970)..(970): n is a, c, g, or t
ccctcacctaaagggaataagcttgcggccgcggctgtaggcnnnnnnnnnnnnnnnnnnatgaaacaaaacctcagcgaacgtttatttctcatcatatggaactggtagcaaagccaaagatttctgcacttgaacactggataccactccctacccacccagtgaacatttacagtcatcacatgccctctagaacccagatccccatgccggggcctcttctctcctgcacaccttcttgcagggagggctttcaggccggaagggggtgccggttgcttctccgcgcctgcacgggtatttaatgtggcacactggccaggctcctctcctgccccgcccagcagcagcacggcccttgcctttcttcagtgccctccaaactggtcagagaggaggcacagactgctagaagaagggcaagagaagtcgtaattcacagtcatttgctacagaaagtgcctggaatcggtccttggctgcttctgcctggaagcaacccacttaagccccaggagaggggacagatgagatactgggatgggggtgggagtcctcagaaggcacccaggagacactggctgcagaaatggggtccctgatcttgcaagaaaatccgcttgctgttggcaggttggcctgagaatcccaggggcagcttcagacattgtggggactcagacccaccctctcagtctgcagctgtggcagtcagaggtttggcactgtagccatggtcacctggccatggcccaggggcagggtcccaccagaccctggtgcctcccgcccctcctgctgagcatggngnncactagcatctagaaaggtcaacttntgggagaatctgcggcaggccactggaggccgagagtgggtgctggctctgcgaggaggtgcactctggagacagannnnnnnnnnnnnnnnnaacactgggtcaggtggactcagcaaaggcanatangggatatactatctcctctctcagaggatggacagcaagtcactctctcggcgatctggctcaggcattctatggagcgatatc

SEQ ID NO: 132736 - DNA, 638 bp, Homo Sapiens
  misc_feature (488)..(496): n is a, c, g, or t
ttttttaccaggtatttcttaaatttattgaagaactcttagctgggagaagaaagatcacaggcttaaacaattgtaagataaaagaacaattaattgcaaataattacaaaagtaatttctgaaattttttgagccactgctgaaacaaaactttagtgcatctcaaagttcgtattttgttaagtgaacatattaaattactgaaaagcaaaaaagagttactgttacacagtacaagatcttaatatagtaactgagcacagccaaataaacagctataattattccaagctgcttttgctatgtatctggtatattaaacaagaaagtggattacttttaacactgcacaagtaaccaaaggtagcaaatccagcaatattaaaaccggatattaaatagtattcaaacattacaacaaaaacaaaataagaacttctagaactagaactctaccctatgaaaggaatgtacacagatggttnnnnnnnnnccaataaataaataaagtgacaagagtgactaattctgtatccacatcttcagagcaggaatacagtaaatgagtaaatggttagaggagtcttgctgaaaatgagaaaaaatgcatctctctgtagtatactttttgtccc

SEQ ID NO: 132737 - DNA, 1048 bp, Homo Sapiens
ttttttgggagtttgaaggctttattggtgcggaatctgagggcacagccaagcccccgccaactttgatcccggatcccagcgtcactcagctctggacggttcttcccccattgcttctgtcggctgcatagacgtgaggggcagataggtgctctcctccctaacatggtaactgccgctccgttggtgctccctgaagacgtacattaaggccagtacgatagtcaccacgcccagggtcagtaacaccgccacgaagacggggacaaagtgggagctcccagcctcaatgtccatcaccacgaccagggtgtatttgcctcgtgagctggacgcttggcactgataagtaccattatgtgttacgttgacgaagaacgggatccccaccggcacctcccggctggagccttccttcaaacaccgcagctcggggtacgggttgcccctggcttggcactgcaggacgtgtctcgttttatctttccatttcaagtgctgggggcatgtggctcggtcaattttgggaccatacaggactcgcagctggacgctactgttcctgtgcaagaactcgccgtccacctcgagagtggcactgcagaagaagctgcgtccgtcgtcactctcggtagcatttagctgaagttgagctggctgccccggggccgcggccggaactccgtccagcgtgacctggactcgagccccagccatgcaactcacggtcactgtggacccctcatgggcggtgggctcgctgaggttcacaatgggtcctaggaagctaaagaccgtcaagttctcccgggcctcccgtctctcgccccctagggtcacgttgcagacgatctcccgggcaccctcctgatccgcgcgcgccgtggctgtggctgtggccgttagcgtgtccccgtggttcatgactgtcacattcagcatctggtcccccagcgccaggtagacctgggcctctgaggctggaaaaagcccgtctagggtgcagtccaccggccacgacgtttccacctccaagaaccggggg

SEQ ID NO: 132738 - DNA, 502 bp, Homo Sapiens
tttgcaatatatatattttaattcaaagtgaatcgacagtaatacaccataaattcttattttgacactcaccaaaatagtcacctggaaaacccgctttttgtgacaaagtacagaaggcttggtcacatttaaatcactgagaactagagagaaatactatcgcaaaccgtaatagacattacatccataaaattttcccagtccttattgtaatattgcacagtgcaattgctacatggcaaactagtgtagcataggagtaaaagcaaaaacaaataaaccaaagaaagaaagccacaagtctaaaattgttaaacaattaacagttcaaacttagtaatcaaatctgtatcactggattcattaaaacaaatcttcctacaccttgcagtgtatgatttaacttttacttaacacagtccaagtttaaaattagcagattttaaaaatgaaaatgttttgctaatacagtaacatatttaattaaacacgctggagg

SEQ ID NO: 132739 - DNA, 655 bp, Homo Sapiens
tagttgttgtacttacatggtttattaaagtgaaaggatacaaagctgactcaacaaaggcaaaaggaggatggggcaaagtccagaagaaaccaggcagaagcttgcaagaattcttctatcagtgaagatacacaggatgcagttaattcctccagcaatgagttgtaacaacatgtgtgaaatgttgccaatccagaaagcttagtagagactcagtgcccaagggggctggtcaccaaagtaccctctctgcctagcacatatcaaaattccaagctcccgaaaaaagcaaatgttcagcataaaaattgtattgtttacatagtttaagcacaatgattcactattatcatttaaggaatggtaggaaccctcctgaaatctaagttcccagttgccagccagaggccaaccatgtaaacaggcctttcaaagaataggaatctcaggccagcgatgttaactcttttctgaacaaggattgaatgagggcaaggagagagtcaactaaaaataaagtatcttaattctagttggtaaagcttattaaagtctaaatccataagtgttaaaaattattcctgggctggctatgtttgacactgggatgggggtaatagtggtgattgccaaatccctcgtgccgaattct

SEQ ID NO: 132740 - DNA, 604 bp, Homo Sapiens
  misc_feature (68)..(132): n is a, c, g, or t
  misc_feature (470)..(470): n is a, c, g, or t
  misc_feature (494)..(494): n is a, c, g, or t
  misc_feature (518)..(518): n is a, c, g, or t
  misc_feature (550)..(550): n is a, c, g, or t
  misc_feature (574)..(574): n is a, c, g, or t
  misc_feature (580)..(580): n is a, c, g, or t
gcatttttgcaccaaccttaatgctatgtaaatagttgttatactgttgcttaacaacagtatgacannnnnnnnnnnnnnnnnnnnnnnnnnnnnnnnnnnnnnnnnnnnnnnnnnnnnnnnnnnnnnnnnctcagtgttttcaattcctccttggttgaatccatggatgcaaaacccacagatatgaagggctggctatatatgcattgatgattgtcctattatattagttataaagtgtcatttaatatgtagtgaaagttatggtacagtggaaagagtagttgaaaacataaacatttggacctttcaagaaaggtagcttggtgaagtttttcaccttcaaactatgtcccagtcagggctctgctactaattagctataatctttgcacaaattacatcacctttgagtctcaggttgcctcacctgtaaaatgaaaggaactgggatactctctaagggncacttccagccctggtccattctntaactctggttatggctgagggangaaattcacattgtggttaactgtatggggcnaaactggaaaatggtttttaaagngggggnaaaaggccaattgcttctcttagg

SEQ ID NO: 132741 - DNA, 1148 bp, Homo Sapiens
tttttaacctatgaaaattctttattgttaatttctttctccaacagatatatttttagttgaaatatggagccacagcaacactttgacttttcctcttcagaagatgagacaggccggggtcatcattgttacaaaagcaaggcctgtgatcgtgacaaggacaggctggggcagagaccacacgctcaaccaggtatccaccaggtgtgggccctttataggagctacaaagagggggcagccagcaatgtggcctcgacacctgactccaggcactccgacctggaggagggagatgaaagaactcacctttccccaggggctcagccagacctccaggcccctgagcggggagagtgcgtgtgtgtgcacatgtgtatgagtgtgcacacgggtgtgctcactcacacagcacatgcacacatgcgctgcccctcctgagatgctctcaggtccctgccagggtagggttgtagctgtgttccccacagctgactgtcagctaaccagggctaggggtgagtgcatggtggaggacacagggtcttagcctgatgctcgaatcctccttctggaacaggctgatggtgccagagcacagcacgaaccacctacccaccatggggctctccagggctcggtcatttggctcctgtgcacttcatgacactcaggagcccctacggcccgagccccaagccccgagaaaggggaaagatttggttctgagagggtcccactggcctgggcacctaggggcctcagcatctaccagcataggggagggtggcggcccccttcctgaggactgcatctttctccagccgctctccccagatcccacacctgccagtgagccagggagataggaggaccacctccctcccagggaagggggtggcaggtggaaggacttaggtttggtgcaggaacactagacctgcccctcaccccctgcctccaggactgccattctgaactgcaattctgggcctgagtttggcttaagggccagtctgaagggacttgcttggtgaaggcccagccagctgtcccagtggcatttcataaacaacgatactgtcccttccaggccccggccgtaatggccgaattcccgggcatatgtccggtaccgtcgactg

SEQ ID NO: 132742 - DNA, 693 bp, Homo Sapiens
ttttaaaattttaacacaataacaatttttatttcaaaaattaagttcacacattatcttaagagaattttaaaatttactgcattttattgcacttattacataaatatacagttggcaaaacaatttactactaaaattcagattctctctcagtataacgcaaagtattactctgaacacctacttcaggcatcactcagtaagtcaaccactaaaagcctctctgctcagattttcctggtgcatcttttatttctcttctctttcatgtagaagtctatgaataatgcccacctaatgcaaaggaatttctcatatctctgacgcagcaacaatttatcacatgctttcacataaatgagaatgttgaaatagtataattttagagttgaattatttgcttttgaaaaaaatttttacttttttcaagtgaaaaaatatatttcgaatatatctcttcaaaaacctacttttcaacttatatacaaggaaattttctaacaggttcaacttttgttatacttaatactctgatttattttaaagtctgaagtgttagttccttagttctttctactgtaaatcctctgatgtttacatagtcttaattttagcctaaatatttcttcacatttactgcacctacaaattatattctagtaaaaattctctggtgtttctcctcgtgcc

SEQ ID NO: 132743 - DNA, 665 bp, Homo Sapiens
tttttggaaaagacaccactctatttattattgaaatacatccaatactaggtgattctgtttctttattatggctagagatggtggcatcacttcttcaaagccatttgacaggtgcttttcaaggtttcttgtccatgtttctgataggtttcatagcagagtaataagaatgttgtccagcttgcttcacatgtatttctctatgtgaactgccaccactacctatatttggtaaaacagggacaactcttcctcttttaacttttaaattatatctgcgcccagaggcttgggcaggaaggtgattgagagtaacttctcccactgttggtttcacatcaaaccattctggattcaattttctgcctaattttctttgcaacatatgtaaaaggatgaggaactccgctttaagttcattggtcagcatgttgggattgcttagtaattctgataacctaatgttatctttaatagacttcgaaactgtagacctggaaaccaggggtaaacgcatctggtagctgtagtccgtgaaattcacaaagtcatcctggatacttttaatttctcgatgtgttaataaagtgtaaacctcttctatcaatatttcaggcactccagctttacaatgaattgttccatggattagttctttaggt

SEQ ID NO: 132744 - DNA, 1276 bp, Homo Sapiens
  misc_feature (1155)..(1189): n is a, c, g, or t
ttgatataaagaaatgagatttattgccttgtggggggaagggatgtggttgtgataggcaggccactctgggatccctgggatgcaagcccagggacagcagagtccccaggtgggaaatctacacacacaccccagggatgtcccagagacttcttctaccctaagaggagatcctgggcaggatgtgagaaatctgagcatcctctgtttggatggccgaagctgctggcatcaaactctggtctggaagaatcagtcacctgagcaaggcttccggaagtagatgatgagaacaatgcccacgatgatgcccagcacacccaggccaaaggccacgccacacagcacattctccagcagatctgagggcagtgcgttccggggtacccaataggcaattgctgtgtagcggtcaatttcgtgagtcacaatgcaggagaaaatgtcagaaggttctggtgtgaagtttaagtaagaaaaggcctggaagctgagtccatcgacagctgagacaaaagtaggcccaaatccttccacagggacggaatgatgctgccagttcactgtcagcatgggtgggaagagattactgacaaaacagaccaaagtgttgggcttgccaaactccaggggcttcagcgtgaacacttcagcgataggaaaccctctggacaccgggattttcccatcaagttttggccctatttgctggatcatccactcgcagaactctttgtcaaataaaatggcaggagcatctccctgttcctgagcccagtcagcaaattcgggcaggcgaggcacccgagtgttctgggaaaagtcgaagaagaaaagctggtcctcgtcgtaggcctcagagagtcccacactgggactcccatcctggcagtacactgtgtgcaggaatgtgtggttttgcaggtcatctggccacattggagtaggagcttcagggacggcccaggagtggggtagcagccacagaagtggtaacatctgtagcagcgcagctccttggttctgttcatgacccataccttcttgccacacagtaggtaggagctaccaacccagccaacccagcttccccaactcccccccggccgtaatggccgaattcccgggcatatgtccggtaccgtcgactgnnnnnnnnnnnnnnnnnnnnnnnnnnnnnnnnnnncggccgcttcctcgctcactactcgctgcgctcgtcgttcggctgacgaacgagctagccgccctataggtgatcgcttatacattt

SEQ ID NO: 132745 - DNA, 892 bp, Homo Sapiens
  misc_feature (56)..(98): n is a, c, g, or t
  misc_feature (102)..(136): n is a, c, g, or t
cgtacatactagcaccacacatactccgagcggcacaagacgggccggtttaagannnnnnnnnnnnnnnnnnnnnnnnnnnnnnnnnnnnnnnnnnnccgnnnnnnnnnnnnnnnnnnnnnnnnnnnnnnnnnnncagtcgacggtaccggacatatgcccgggaattcggccattacggccggggacctactgtgtggcaagaaggtatgggtcatgaacagaaccaaggagctgcgctgctacagatgttaccacttctgtggctgctaccccactcctgggccgtccctgaagctcctactccaatgtggccagatgacctgcaaaaccacacattcctgcacacagtgtactgccaggatgggagtcccagtgtgggactctctgaggcctacgacgaggaccagcttttcttcttcgacttttcccagaacactcgggtgcctcgcctgcccgaatttgctgactgggctcaggaacagggcagatgctcctgccattttatttgacaaagagttctgcgagctggatgatccagcaaatagggccaaaacttgatgggaaaatcccggtgtccagatgggtttcctatcgctgaagtgttcacgctgaagcccctggagtttggcaatgcccaacaacatttggtctgttttgtcagtaatctcttcccacccatgctgacagtgaactggcagcatcattccatccctgtggaaggatttgggctacttttgtctcagctgtcgatggactcagtttccaggccttttcttacttaaacttcacaccagaaccttctgacattttctcctgcattgtgactcacgaaattgaccgctacaacagcaaatgcctattgggtaccccggaacgcactgcctcagat

SEQ ID NO: 132746 - DNA, 1525 bp, Homo Sapiens
tgaattgggatggcttaggtaggatggctagacaggtaccttgaggaagagcttcctgcctgattatccgtttgccctcaaaggaccagaattgcgggagtagcctcccgccataggcattggtgggtagcggtcaattcgggagtcacaatgcaggagaaatgtcagaaggttctggtgtgaagtttaagtatagaagaggcctggaagctgagtccatcgacagctgagacaaaagtaggcccaatccttccacagggacggaattgatgctgccaggttcactgtcagcaatgggtgggaagagattactgacaagacaggaccaatgtgttgggcttgccaactccaggggcttcagcgtgaacacttcagcgataggaaacctggtggggggattgaagtgtagggggaaaaagagactagtttagatggtatctctgtgtttggaggggccatggcatatggaggggagggcagagaagaacacagtgggtcaggctttgggagacagagatgagcgaggagctgggctctgaagggaggtcttcttccaggcaaggactgcagctagacgtagaagcagagccagatccaggctactctggacccctccaccatgacttccttcagcacttcctgtctagagctcacattgatgtctaaccatgcactgtcttctcactaagacatagtcacgtcatcagatatttccactcttcccatccatcttgctgggcatagtagcacaagtgttaatattcagtaggtatcagttggtacctgttgaattcatcacattcgatacatagttctgaatgcctactacatgctaggtacttcggcccaccgaaagaacacagggtgcagaccaaggctggtggaaaaattaaggtgatgaagagaaccagaaagtatttgagatggggagctggtatcaaggggaattattcagtgtacagatcaatgaggttaatgcagccctcctcccttcactccccagaaaactcctgacctctggacaccgggattttcccatcaagttttggccctatttgctggatcatccactcgcagaactctttgtcaaataaaatggcaggagcatctccctgttcctgagcccagtcagcaaattcgggcaggcgaggcacccgagtgttctgggaaaagtcgaagaagaaaagctggtcctcgtcgtaggcctcagagagtcccacactgggactcccatcctggcagtacactgtgtgcaggaatgtgtggttttgcaggtcatctggccacattggagtaggagcttcagggacggcccaggagtggggtagcagccacagaagtggtaacatctgtagcagcgcagctccttggttctgttcatgacccataccttcttgccacacagtaggtaggagctaccaacccagccaacccagcttccccaactccctccccgagagggtggccttagatcccccggccgtaatggccgaattcccgggcatatgtccggtaccgtcgactg

SEQ ID NO: 132747 - DNA, 841 bp, Homo Sapiens
  misc_feature (713)..(747): n is a, c, g, or t
ccgggttacccataggcattgctgtgtagcggtcaatttcgtgagtcacaatgcaggagaaaatgtcagaaggttctggtgtgaagtttaagtaagaaaaggcctggaagctgagtccatcgacagctgagacaaaagtaggcccaaatccttccacagggatggaatgatgctgccagttcactgtcagcatgggtgggaagagattactgacaaacagaccaaagtgttgggcttgccaaactccaggggcttcagcgtgaacacttcagcgataggaaaccctctggacaccgggattttcccatcaagttttggccctatttgctggatcatccactcgcagaactctttgtcaaataaaatggcaggagcatctccctgttcctgagcccagtcagcaagttcgggcaggcgaggcacccgagtgttctgggaaaagtcgaagaagaaaagctggtcctcgtcgtaggcctcagagagtcccacactgggactcccatcctggcagtacactgtgtgcaggaatgtgtggttttgcaggtcatctggccacattggagtaggagcttcagggacggcccaggagtggggtagcagccacagaagtggtaacgtctgtagcagcgcagctccttggttcggttcatgacccatacctccccggccgtaatggccgaattcccgggcatatgtccggtaccgtcgactgnnnnnnnnnnnnnnnnnnnnnnnnnnnnnnnnnnncggccgcttcctcgctcactgctcgctgcgctcgtcgttcgctgcgacgcgatgagcccttaacttaaaggtttgaaagttccttattacaaga

SEQ ID NO: 132748 - DNA, 1067 bp, Homo Sapiens
  misc_feature (963)..(997): n is a, c, g, or t
gtgcccgcgctggtcccgtgcctgtgttttctcctgcggctcgtgtttcccaggtctgtgcgttggtattccctctttgtagtccaactctggctcaacttgtttggaaatttgtccctggccaggtttccggagtgttgtggcatcatgcccggttggatgccaccacaccagccaatgcacgcaacccggcacatttccgcaagatctggaggcagtggcgttccggggtaccccaataaggcaattgcctgtgttagcggtcaattgtcgtggagtccccaatgcaaggagaaaaatgttcagaagggtttctggtgtgaagtttaagtaagaaaaggcctggaagctgagtccatcgacagcctgagacaaaagtaggcccaaatccttccacagggacggaatgatgctgccagttcactgtcagcatgggtgggaagagattactgactatcagaccaaagtgttgggcttgccaactccaggggcttcagcgtgaacacttcagcgataggaaaccctctggacaccgggattttcccatcaagttttggccctatttgctggatcatccactcgcagaactctttgtcaaataaaatggccaggagcatctccctgttcctgagcccagtcagcaaattcgggcaggcgaggcacccgagtgttctgggaaaagtcgaagaagaaaagctggtcctcgtcgtaggcctcagagagtcccacactgggactcccatcctggcagtacactgtgtgcaggaatgtgtggttttgcaggtcatctggccacattggagtaggagcttcagggacggcccaggagtggggtagcagccacagaagtggtaacatctgtcagcagcgcagctccttggttctgttcatgacccataccttcttgccacccccggccgtaatggccgaattcccgggcatatgtccggtaccgtcgactgnnnnnnnnnnnnnnnnnnnnnnnnnnnnnnnnnnncggccgcttcctcgctcacatgactcgctgcgctcgtcgttcggctactaagacgtaggcgcccttatag

SEQ ID NO: 132749 - DNA, 1029 bp, Homo Sapiens
  misc_feature (892)..(926): n is a, c, g, or t
  misc_feature (929)..(970): n is a, c, g, or t
ctgacaagcttccgaaattaattatgtgtactattcccacatatgatgcgattcaacacccagtccatagcccaagtccacacagcacattctccaccatttcttagctcattgcgttcccgggttcccctataggccaattgctgtgtaccggtcaattttcgtgagtcaccatgcagtataaatttcataagcttctgctttgaagtctaaataagtataagtccttgtaacctgactccatcgacatctgagactaaagtaggcccaatccttccacagggacggaatgatgctgtccagttcactgtcagcatggctgggaagagattacttgactatacagaccaaatcttgggcttgccaactccaggggcttcagcgtgaacacttcagcgataggtaaccctctggacaccgggattttcccatcaagttttggccctatttgctggatcatccactcgcagaactctttgtcaaataaaatggcaggagcatctccctgttcctgagcccagtcagcaaattcgggcaggcgaggcacccgagtgttctgggaaaagtcgaagaagaaaagctggtcctcgtcgtaggcctcagagagtcccacactgggactcccatcctggcagtacactgtgtgcaggaatgtgtggttttgcaggtcatctggccacattggagtaggagcttcagggacggcccaggagtggggtagcagccacagaagtggtaacatctgtagcagcgcagctccttggttctgttcatgacccataccttcttgccacacagtaggtaggagctaccaacccagccaacccagcttccccacacccccggccgtaatggccgaattcccgggcatatgtccggtaccgtcgactgnnnnnnnnnnnnnnnnnnnnnnnnnnnnnnnnnnncgnnnnnnnnnnnnnnnnnnnnnnnnnnnnnnnnnnnnnnnnnnaatacgcctttagccgccccccttattaaggtggaggtccggaattaccaagtctttct

SEQ ID NO: 132750 - DNA, 751 bp, Homo Sapiens
aagatgagaggtagtgacattttattctctcaatgctgagctaaaaattccacacatctggcacatgggttacaagggggaaaagcacagaagcaccattgcccactcctcaggttttggtatttcaagtcacccataacttcatttgctattggcagctgacaatcactgctgtgttaacactgaagcagtgggtattagtgctattcatcatatagtagtggtgggtctccatcatctttcaaaaatgaagcagctttccttccattcttctgaacgtgatcttcattcattttctccaaagcttctatctcagctaaaaaatcagcttcattatctgctgtgatgtttaagcctgaaacagcattgaagagttctcgttcactaagggcttccttgactcctcctttctggaaaaactgcgagacattcctgcagtcccggaacaagaactccaggccgtgagggtgggtaggttctactgactgactgacatcgatcaaccagacctatttcaatacagaacatgaactgatgtatttacattttaaattttacttacagtaattaaatctgaatgttaacaaaatgtgctcctcacctttccagcatgccacagcatgttatactcactgaggtcagcatggacaagcgtacattcatgatataactgccgcatcaaatgaagagtttgatagtagcccggccgtaatggccgaattcccgggcatatgtccggtaccgtcgactg

SEQ ID NO: 132751 - DNA, 2436 bp, Homo Sapiens
tttttttggctttctgggtcttttatttgtacccatgtgtctgtcacaccatgaatgtacctggggaaatcaactgacctccctgaacatttcacgcagtcagggaacaggtgaggaaagaaataaataagtgattctaatgctgcctaggtcaccctcaacccccatttactggcacaattgggtggagagaagggaaggggtatgattgtcctgatggctcagggttgcaggaggttcagaggggaaggaggaaaggccaggctggaggctgggctgttagcacttccctcccacagttcagacggctcactctgggctcaggtttgccatggcttcctttggtccaaacataggccctgtccttagtcctgtgccctgtttgacttttggccaggaggcctttttgtgctgctgctgttgcagggctagctgcatggcccatatgctcagtggccgcatgtaggccagtgagcggaacactcgctgctggcagtatgcctctggggtctggaaggccagacccaggcgctcccacacggtacggtagcagccttcagctgtctggaagccctcccaagtcaggccctcttggatcatggtagctgccagcccgtagaccacacccacccagacttcatcagactgcacactggatttatcagggacaccatggggctgcatcccattcacagcccccatggcccctcctgcaaaggcctggacgttcagctcaaagatagtttggagagcacggaccacatgttgggtaggaaacacctcagtgtctccttctcctaggccacaggccttcaggaaccactgtccagcacactggtcagacataacactacgagactgaggccgagagctgctgtcatagttgtaatagcggccattccacagcagtctctcataggcttcttggccccggctgaggatagaagaaaacttatcctggatgtcccctgtgccccacacagagcagccatctggaccatcacagccacagctgccagccacagccctccacagtaagcactggggcctagtggtcacccatccatcataggtctggtctgcatagcctccatttctcaactgagtccatcatggtccttgtcaaacttcatttcagattccatcacagctagacacacaggccacatgtccttcaggaagttttgatcacccgtgaggtaatagtcccgataaacctgcagcacaaacttcaggttcaggtccttccaatcagcagtatcatggattaaatatgcattgacgcggagccatggttcatcatctgggtccccaatatcatgggggatgacgttcctccttttcacaggtgccatcaccccactcatcaggtaccgtcgccgtgtcaggtcctccctgagagtggccagagccatgtcatactgtaggctgagctcaagtttgggccagagcatgatgagggcaaaggaagcataaaagtggacatcatatgtgttgtacatgcggtactcctggccctcaaggtagccaaatcgaccgtagtcccgtagggtggggcggaggtgacacatgtttctgcccagctcctctggtagggagtcctcaagaacttccagccacactgtgcctccatcagccaggaagtatagttcattgaacagcgcagatttgtaccaggcaggcagtgatctgtcatccaataccgggctctgccaagctgagatcctctcttcccactctgcgtatcggcacagtgcatagtggctgagggcaggtgctgcatctccatcttggcccaaaggaaccttgtaatacccgcctgtagtggacttggcctttagctccaaacatgatcctgggcatgtcccaagccagtgaaaactccaggcggcactggcctcgaggtcgcaacttgctggaaacacacacagctccagcaatgcctactcctttctgcgtaggggtgctttggccagtgggagagtccagctgtccatcctgaagtagatcctgccacacctgctgccccgtgctgtcagggtcaaaggctgtgatgtgggttaccgtggtagctgccgtgactcgtgcagccacagccatcgtgtaggggtttggaaagggttggatgatgcaggagcagcccccggacagtttccccgctacgctccagacagaagggctcattccacaaaccccctggggcatcgtctccaccacccagtccattccgcatggagaacatgatggacacatctagagcttcgtccccttcattttccacatcccacacaaagactcctaaggcaggctgctgtcctggtagtcatggggcaagatgggtgtgatctgacggcaggtgagggtgacattctggccaggaagctgatagacagtccaggctcggggatagagggcatggtagaaagcaaagtaccc

SEQ ID NO: 132752 - DNA, 710 bp, Homo Sapiens
  misc_feature (667)..(667): n is a, c, g, or t
agaatgcagcaggaagtggttttattgctgtgaacacagggcaataaagcttggcaaaagttgcagggttagaaatctgaatctttctttgctgtcttccctattcccttctctcgaaaagtacagaactacaaagcagaaaataatcttatttctttttgtctcaactctggtctggcatcctaggcactcgaattctccaaacacctttcttctttcttctacgggaacaagaaaatcaacaaaagaaaagaaaacgtggatgcaattgtaacagaagctatgtcaaatgaaaggaaatgcagtggatgccttagagaatactatctaagtgtacaggaaccaacttgtaggggggatcgctcttctgaggggggtcacaggcaacaatgaagaatttgtactgggcagcagcactatagcggcactggggatactttcctgaagtgagtctgcagtcagtcatgttgacaggctttgagctctggtggcagttgtgccgacgatttttgcagaccatgctgagcaaatcacagacagcagccacattctggaaagagtcatgcagaaaggtattttgatgcttacagtgctgggtataattgttgatgccactcattgccctgttgcattggagaggacttggctgtatatgctgaatttcaanacagtgagccttggtgagacgcttaaggcaagcatgaagtgga

SEQ ID NO: 132753 - DNA, 1000 bp, Homo Sapiens
  misc_feature (795)..(795): n is a, c, g, or t
  misc_feature (916)..(916): n is a, c, g, or t
  misc_feature (930)..(930): n is a, c, g, or t
  misc_feature (944)..(944): n is a, c, g, or t
ttttttttattgattaaagtaaaggatttattgtaatctgcttacagtcctttgcaaagacagacatatgtttttgcataaagatataaattgcttcattttaaactaatttagtgtttttttaaattatatgaacttttggtgaattatgaactgtaccaaaccaagatttttaagagcaatatggtacaaaaataagagcagacagacaatttggactgggacaggcattcaacagtgaatttagaatatggctttgctgtttaatcaagcaaagttacctggagacacacaaagagccagtaactttgttaatacaaaaagctgatgcagaccatctccatcccaaacctggttaagtaagtcagaattcccattttataaaaactaagtctgaactaaaagctgcttttgtaagtaagccatttgtttgctagcaactcccagtctgcatgctgtgtatttattaccttcaaagtgtggctttcatattactgtgcaccgtaagttgactgtatttaaagatctgcctataaattaaattcctgaaattgcaaattatgtaagaaaaactcctccctctgagtgcagctttcacaggtttccccttgcataaggcaggtgtcttttgaaagacaaggtaatgttgcctgcatggtgaaccctggagaaaagtgttgatctaattaattgctgcttcctcgtgggcatgggcttctccagctacagcttttagattttgggaaataattaatatgatttcactgagtaaacctgatgatatcatatttttanagattaattggctctatcaagtagttattagtgcatcatatgttagttccccaagaacatagttgtgattggggcagaaaagcaacatgatcagtgcaacaacagatatgataacatttangcacgtctgctaanatcgtatttctcanacgttagtaaactattttaactactttaaatcaacctctacgtcgtctgtacgtca

SEQ ID NO: 132754 - DNA, 838 bp, Homo Sapiens
agctatttcacggcccgggtttcctggggaaacgtgtagggccagggtcacatgcctaattgggccacgcgcacaacgaggtgtttagaaagctttttcgaggcgcgcaggctcgccaaaaaggtgtatgatgtgatagtattgatggttggttataagtagcaggatcaagtttaataaacgtttattgagcagtagaatacaagtgagtgcctggatcctgatcaccaagtcctgtacaactgaggtaattatttcacaatgatgggtggctcagtgagattctgattgcatgcgctgcatgacaaattatctactcagagtatgcctgacacgccggaggggctgagggggaacacactgaaagcagtaccaggtagcagtgcatctcacagatccatttattcatgccatgaagtaaacggtacttatacaagtgtacagtgacgttccacgctccccatctaacacggcttgctgaaatttacaggcagactgacgttttctttcacatgtactccaagtaaatctggttagtgatgaccaggagcaggcgctgaagctttcaaagccttacttcttttatcagcagcccggattttataaacgatgaagcccatcagccccattcctatccaaatctcctggtaaactttggtgtagtagggcttcatggggatccatatgtttttaataatactttgaagcatcttggcgcaggacagacggctcagaacgcaccacaaatctgcagccaactcggaaaggtcaccgagcgcgcaggcgcccccggccgtaatggccgaattcccgggcatatgtccggtaccgtcgactg

SEQ ID NO: 132755 - DNA, 866 bp, Homo Sapiens
  misc_feature (438)..(451): n is a, c, g, or t
  misc_feature (454)..(457): n is a, c, g, or t
  misc_feature (459)..(465): n is a, c, g, or t
tacgcacaaggggaaccagggtggtgaattcccgctgggcgaattcagggttcaatcaaggcccgtttggggagggctttcccaattcgggcagaaaatgcttaaattgaattttccacccgtttcttccgaaaagttggcagggccggggcgttaattttgatattcgaggctcgcttgggactcctgtttggaaagatcccagtaaatgccctccagaactcccattttggaatttgttccagaaacgctccggtttcccgcccggggcgtttttttattggtgaggaattccaaggcccctagttcatggcccaaggattttcctaggaaaacagcctatggaccatgtttcactttacctacttggggcccgccgcgccaaaccgaatgggtctagaaaagcttcttcgagggcccgagggcggccgacatggnnnnnnnnnnnnnncgnnnntnnnnnnntgcatctcacagatccatttattcatgccatgaagtaaacggtacttatacaagtgtacagtgacgttccacgctccccatctaacacggcttgctgaaatttacaggcagactgacgttttctttcacatgtactccaagtaaatctggttagtgatgaccaggagcaggcgctgaagctttcaaagccttacttcttttatcagcagcccggattttataaacgatgaagcccatcagccccattcctatccaaatctcctggtaaactttggtgtagtagggcttcatggggatccatatgtttttaataatactttgaagcatcttggcgcaggacagacggctcagaacgcaccacaaatctgcagccaactcggaaaggtcaccgagcgcgcccc

SEQ ID NO: 132756 - DNA, 281 bp, Homo Sapiens
gggcagtgcatctcacagatccatttattcatgccatgaagtaaacggtacttatacaagtgtacagtgacgttccacgctccccatctaacacggcttgctgaaatttacaggcagactgacgttttctttcacatgtactccaagtaaatctggttagtgatgaccaggagcaggcgctgaagctttcaaagccttacttcttttatcttggcgcaggacagacggctcagaacgcaccacaaatctgcagccaactcggaaaggtcaccgagcgcccc

SEQ ID NO: 132757 - DNA, 931 bp, Homo Sapiens
  misc_feature (569)..(804): n is a, c, g, or t
  misc_feature (817)..(864): n is a, c, g, or t
aggctggaccggtccggattcccgggatgcgatttgtggtgcgttctgagccgtctgtcctgcgccaagatgcttcaaagtattattaaaaacatatggatccccatgaagccctactacaccaaagtttaccaggagatttggataggaatggggctgatgggcttcatcgtttataaaatccgggctgctgataaaagaagtaaggctttgaaaggtaagatttttgcttctgaaaatggttgggaatggaaaacagcatcatgtcttttcaggacaaggtatatcgttgttctcaattgaaatcgaaacacagttcagtatatatgtaaggtgcagttgaaatgcttcacagcttgaagtttgctatgcctgctgggaaagagaattctgaatttctgctttttatagtcaagtggatcaagtaaaacttccaggagtaatagaggaatggattaattagaggtagtcgatatcatcaccaatagggaagcacaagtgagctgtgcaagcatgctgtcctagaagttccctaatgatgtcgttttattttgtttattgttttttgnnnnnnnnnnnnnnnnnnnnnnnnnnnnnnnnnnnnnnnnnnnnnnnnnnnnnnnnnnnnnnnnnnnnnnnnnnnnnnnnnnnnnnnnnnnnnnnnnnnnnnnnnnnnnnnnnnnnnnnnnnnnnnnnnnnnnnnnnnnnnnnnnnnnnnnnnnnnnnnnnnnnnnnnnnnnnnnnnnnnnnnnnnnnnnnnnnnnnnnnnnnnnnnnnnnnnnnnnnnnnnnnnnnnnnnnnnnncgtaatgatgtgnnnnnnnnnnnnnnnnnnnnnnnnnnnnnnnnnnnnnnnnnnnnnnnngagacagaagtctcggctgtgtttgccccaagcctggaattgcaagtgggcacaaatcctttggctt

SEQ ID NO: 132758 - DNA, 773 bp, Homo Sapiens
gaaagtttaacctgataatttatttgtggggaaaaaagctagttttgatgagaaaaagttcagtcctttccttgtaaacacaaagaaactcaacaggaattttaaaaatagtaggtcagaaaatgcaacagtaactcttataattcttttcaattaaacagacaaatcaagttgaagacaagtgttaaaatactattcagcctaaatatttatcagtctatatatcctgttgttcaattggcttttgatttttaaaaaaatcaaatcaataaactttgtaagagctaccacatttcaagtgatgaaaataaattagttcccccccaaagatattgtttaacttctaaagcataaaaagctctataatatcttatacaaattaaccagtgtttttacaaaagtaatgcagttttggactgatgatattacactgtatttgtggtaaagtactaggcacaagaatatatatatcgattaggcattttcagtctaatcagtctctaagtttatcatttaattcttggcaatatataataactggtatgcattttggtacttaagtcatagaattgtgaagaacaagaagcaacgtactatagtcacagaggtttacatctaacaaggcaattgcagtgttgagcaaatctcgtctatgaacttcgtaatttgttttgctgttggtcacttggagtagatcttgatttgattcttccgtattcatgctttctccatctgcagtctctaacatttcttcatcttcatcatcatcatgt

SEQ ID NO: 132759 - DNA, 1104 bp, Homo Sapiens
  misc_feature (1072)..(1072): n is a, c, g, or t
ggggaggccccaggcaagtccctgggttttccatacaaaattccccgtaaatcttgccacggtggcctttgagaggccagaggggggtgggaacatcgggccacggtccgcccccggtcatgccgttcagctccaagcttcgactgcatgctgaagctgagctttggccttgggtgtaactggagggggtgtttgctgggaggacggtgacgagggggacaccgagaagcgcctttcgcttccaatgacgttcatcacctggctcttcggtctctggggccgcaggggacttatcgtttccgaaaggatcacagcctcagactgctgcagggaaatgtcggtgggtttaaattctttctcaaatatctcttgatgtttgctgttccttttttccttcttcttgtccttcttctccttctccaggtcatccttgtccagcttgtcctgggacctggagtgcattttctttggcaggagaggctccagggcaaacccgtcggagcctggtctggaaggggtgctgtccgatgagagggaagagacagaggccacagacagagggcgggatgaggaaggcatcgtgaaggaccgcaccatggaccgggggcggctgcctcttctatcatccagacttgagggcatgattcggacgccgtactctttctccaccttttccttcagctgtttgaaacaggcctccatcctctcgtggaacggcctcagtgcctccgtgactttgtctccatggattctgatcccttcggccagaaaaggaatctgccaagcaatcaggtccttgagcttctcgatcttttcatgggcctcagggtgctcctgcaggtaccggtctgtaaagaaggccttttcgtagtttgcgaagccccccatgacagctgggtccacgatgccgttcaggagcatggagagcgggttgatgggcaggctggggtcatccaggtgctgctgcaccatgctgttgatcttgtcgttcgtcagctgcatggtctcaatggcattctccagggggctgatttccaccatgaaaacagacttgacctcaaaccaccttaanattccaggtaatttatatgcagttgtatatat

SEQ ID NO: 132760 - DNA, 281 bp, Homo Sapiens
agctaaaatttcactctaaattccaggaaattttcacgagatccttttagaggttctgacacaaataaagtaaaagtaaacctgttgtggcaaagttactaactagtctacactaactctcagtccttgctcaaagcaaaataatggagtttggggtgcaatctggtgaactcaatggtccaactgcataaaggcaaagaggaaagccaggcttgggcacttccgtagaaaatgaagattactggtttgaaggccagtcttctcactgcttccctcgttcc

SEQ ID NO: 132761 - DNA, 304 bp, Homo Sapiens
ttaaacaactcaaatggctttcttttaatgctaggaaaactgtccacctttcaacggtgacagggctgttaacacaggtaagagcaaacaaggtaaaaagtgaaagcacatacagatgatgcacacaaatatatataaaaattgaccagaaatcacaggacatgtaagcaatgttttcttaagcagaactttttttgtactttaaatagactaaaatatttggtgtaggtgggagaaagacatcagtattcaacaattttaacttgaaaaccagctgtaataaagcctcagctcattgtttaat

SEQ ID NO: 132762 - DNA, 643 bp, Homo Sapiens
  misc_feature (573)..(599): n is a, c, g, or t
cgcagagggtaaaatatattgatggctgtaaaggggatattttaggtctgctgagatgatgcacagcatacatacatgctctagtttttggaacaatgtcattaagttttcaaatacatctgttttgaacatggtattttgtttttctcattagcacgaattactactctacagtttcttctagagtaaataaatataatggctgtttgcagagcgactacagacttacttagatgtttaacaaggtgaacgatttcacaattagatcaaccattgagttaacagcaaggtgtttttcatctgttttgtttactgctatagtggggacaggtaacttctccaatttattctttgttgacatctttagttaccaacagactcccaaaagtaatgaaaagtcgattaaaaagaaaattgtaattatgccatgggttttcccaagatccttaaagtcagctcatttaaatttacaagagaaaaataacaggcatcatggaaaactaagtaacaaaaagctattgaaaaatacatctgtggaacacagtggtcagttgtaaacagctcagaagagcnnnnnnnnnnnnnnnnnnnnnnnnnnngtccttctagcatgttaagcagtccaatgacaaactctgctttt

SEQ ID NO: 132763 - DNA, 983 bp, Homo Sapiens
  misc_feature (190)..(190): n is a, c, g, or t
  misc_feature (243)..(243): n is a, c, g, or t
  misc_feature (246)..(246): n is a, c, g, or t
  misc_feature (433)..(433): n is a, c, g, or t
ggggggccgctgtaaatatgagtttgtaacccatgtcatgtcagattgtctgtaatgttctacatggtaggccccctatggagtgatgagggctgccttcttgggcaaaagtcattgggcattgaggttcatgacttgaaaaaagtcacttccgcaatgcaggtcacatgaatatggcctcctggatccntacagtgatggagatggctcataccttgccagatccccttttcagtccagccnttntggacaaaggcttgggttaggaggagctgattcgttatctcttcacccactgccttctcagtatcaccagtcccaaagacaggatacgtccctgtaacccaatctctcggttgattgatagcagaacagctcttgttggtctgagaaggcaggataagtgaccacatatttatgccactacctccanccagggagagtccttctccacaggcttgataaattcaatcaccaactgtgctgtcgtccctgactttgctactcccgttcttcctgctttcttgctccgtatctcagtctgcactgaccccagggtttggctgacatcaagatgggagcccccagccccccaccgtttataaacacccaagaaccgtttcagatcttctctgtgctgatgcaggtagtttttaatttttctcagttccagtgatagaaaacccacacaatacatcctctgccagtcttaatagaatatcagaggtaagaggggcctcagagaagctctgacgcagtgctgctggggaagggaagtgactaaccccgggtcagcctgccatttagggaaagagctgaggttcttacccttgttgcatgctgccacctctccttagccagtgctcttgtacatccacacagcaccctaaggagccatagtcaccatcaaagactcaaccctaaggcccttcaagatctcaaagtgccttctgaagcatcagagattaaatattgttcaaact

SEQ ID NO: 132764 - DNA, 1361 bp, Homo Sapiens
  misc_feature (697)..(697): n is a, c, g, or t
  misc_feature (933)..(933): n is a, c, g, or t
tattagtttgaacaatatttaatctctgatgcttcagaaggcactttgagatcttgaagggccttagggttgagtctttgatggtgactatggctccttagggtgctgtgtggatgtacaagagcactggctaaggagaggtggcagcatgcaacaagggtaagaacctcagctctttccctaaatggcaggctgacccggggttagtcacttcccttccccagcagcactgcgtcagagcttctctgaggcccctcttacctctgatattctattaagactggcagaggatgtattgtgtgggttttctatcactggaactgagaaaaatttaaaactacctgcatcagcacagagaagatctgaaacggttcttgggtgtttataaagcccgtgggctgggctcccatcttgatgtcagcccagccctggggtcagtgcagactgagatacggagcaggaaagcaggaagaacgggagtagcagagtcagggacgacagcacagttggtgattgaatttatcaagcctgtggagaaggactctccctggtggaggtagtggcataaatatgtggtcacttatcctgccttctcagaccaacaagagctgttctgctatcaatcaaccgagagattgggttacagggacgtatcctgtctttgggactggtgatactgagagggcagtgggtgaangagataacgaatcagctcctcttagcccaggccttgtccagaaggctggaactgagagagggatctggcaaggtatgagccagtctccatccactgtagggattccaggaggcccatatttcatgtgaccctgcatttgctggatgtgactttttttcaagtcattgacacgtctattgtctcatttgactttttgtctcaaggcatggccagccccttcactcagctctcactanggctggactctacccaatgtaagaaaacatctaacaagagcaaaattctctataagggagtgagaaatagcaataattatggaggtagaaccaaagacttatatgtttagggttaacttgaacttaaggtaactgtttctcatcttttgtatttcttatacagacacagatgtttcataggctgtgaagaaactgatttgaaaataaatacatttatttagcaaatatatattttgggctcctatgtgctaggtactatagttgtgtgtaaaacaaacatgtttattggcttcatggaacttcttgtttagtggggaagatggatataatgcaaatgaacacaaatatacattttggtaaatgttatgaagaaagattacaacgtgctgtgagaataaaatggggatggagtaggtgcaaactacgcc

SEQ ID NO: 132765 - DNA, 1047 bp, Homo Sapiens
  misc_feature (84)..(84): n is a, c, g, or t
  misc_feature (103)..(103): n is a, c, g, or t
  misc_feature (106)..(106): n is a, c, g, or t
  misc_feature (159)..(159): n is a, c, g, or t
  misc_feature (230)..(230): n is a, c, g, or t
  misc_feature (236)..(236): n is a, c, g, or t
ttgacgatagattaccgctccttagaatgcctgggccaaatcgccgagggacaagaaagatgtcagcaagagggacgagaacgncatcccttactacgagacntgnaaagaatcatatgcctagccatgcccacagatgaatcctagtatgcttcaaangcgaatactcgagagatatcagacataaagactatcactgctcatgatgagtcataattttacatgatctnctgtgnaaagaataaaaagcaagctatccagcacttcatgtattcagtactttcttctatcctaaattaaagtctgggggttaccaagcagtgaaacgatggaccaaaggggtaaatctctttgaacaagaaattattctggtgcctattcatcggaaggtacattggagcctggtggtgattgacctaagaaaaaagtgtcttaaatatctggattctatgggacaaaagggccacaggatctgtgagattctccttcagtatttacaggatgaaagtaagaccaaaagaaatagtgatctgaatcttttagagtggacccatcacagcatgaaaccacacgagattcctcaacagctgaatgggagtgattgtggaatgtttacttgtaaatatgcagattatatttctagggacaaacctatcacatttactcagcaccagatgcctctcttccggaagaagatggtgtgggaaatccttcatcagcagttgctgtgagaaaactttgcctggtccctctagctgctggtggttctttcacagacatttccatatacctcatgcattgtgggttaaaaagtccctgcatcacttctgttctcacaggtactgagctgtcaaaagtgcatgaaggcctctcactgtactctagtcctgacttggggtgcagagggctgcttgcaatcctgtttgtaaggctgtgcctgctcagagctttggactgttcaacccacacaagaacaaacgctaactaatattttttttaagagattcttttccctatgaatgtgggaaatgcaggatttattctgtg

SEQ ID NO: 132766 - DNA, 734 bp, Homo Sapiens
  misc_feature (662)..(662): n is a, c, g, or t
  misc_feature (676)..(676): n is a, c, g, or t
ttttttttgggttcttttcttaaaatgtgtattttcagaattacaatgcttacattttaaagtcttaatacaatggttttaatctaacaatatattacataatatgaaaaatgacttttcatagtaaaccatgaaaatggaatacctgcagtgtcaaagtcaccaacttgtcaccttttccagtcacagaatcccaacacattgtattaatgatgactggggggggtcttacagcctgatgtatataggatgaataaatgtagagaaaggagcattttcatgaaaaataaaatttaaaaaccaggtaggatttattttaaagaacacagttgaaagtaaaacatttacatcagcccagtttgcccttttataaaaagtagtatagcttttcattttatatacaaacctgcagtgtctgatttcattttaaaacttaattttaagcactaaagaaaatttgaatagaagcctgtgtgtattttctctgctaattctgtatgggatatctggcatctccactaagagtaattaatacaggaatctgaccctcctaggctgtgctgacaatggaactgttgtaggtaaagtcattttcagattaaatacaacaatttccacattagaatcagaagagttataatttttccaatcataggacatcncatgaaattcacanaaattataacttattttagtttccatttgacagtatttacatgttccacagatatttg

SEQ ID NO: 132767 - DNA, 1107 bp, Homo Sapiens
  misc_feature (207)..(271): n is a, c, g, or t
cctctttgaactggttgtagttatggtattatttcttttaccatgagaacctgccaaagttgtccaggttgcagatatacctatggtagtagtggttgtggcacttggaggttctgtcaagacttcaggctcatcttcaactttaagcttttctttttcttgagcagcttggagttcaaagttctctttatttttggcttcaatttnnnnnnnnnnnnnnnnnnnnnnnnnnnnnnnnnnnnnnnnnnnnnnnnnnnnnnnnnnnnnnnnngcagccaaagccagcctccgactttcttcccttaacttttccaagtctaactcctctaacaaaatgctggcgtttttgtttgcttcagcagcctgtctatctttggcttgtactattgactccatacaaagatgacacttcttcagcatctccttatcagtgatggttgctatgtatctcatacattcagaatctgatggaaactgattgacttctttgactaagtagcgcaccaccttcacatgaccctttctaaatgctgccataagaggagttatcttgcggttatctgctgcatccacatctgcacctgcttgcaccagtaactgaaccacatcgaggtgtccaccatttgctgctagccacaatggagtgttccccttcttgttacgtacatcaatatgagctcccctgccaataagaagctcacagaatttgtaatgccctttatctgctgctatggttaaagctgtatctcttgaggagggaactggaggggcattaacatcagcacctttatccaaaagaactcggcccacctccgcatatccaccagaggcagcttccattagtggtgtgagaccagtcttagctctgtgttcaacatttgcttttctatcaagcagaagactaaccacttcagttcttccttggaagcaggctaaagtaagggcagtgttccgattggtttctatctgagcatttatgtcagagcccatgtctaacaggagcttaacagccagctcgtatgcccattcatagctgctaacatcagaggagagatgccccatttgctaccagttctagagtaatctcagctcctcgccgatccaccc

SEQ ID NO: 132768 - DNA, 1189 bp, Homo Sapiens
  misc_feature (41)..(79): n is a, c, g, or t
  misc_feature (83)..(117): n is a, c, g, or t
  misc_feature (291)..(363): n is a, c, g, or t
tacaacttgaacaaatcatataggggctactccgttaaagnnnnnnnnnnnnnnnnnnnnnnnnnnnnnnnnnnnnnnnccgnnnnnnnnnnnnnnnnnnnnnnnnnnnnnnnnnnncagtcgacggtaccggacatatgcccgggaattcggccattacggccgggacttaatcatggaattgcccttgccaccatgagctctaccatccacttccatatgtaaattataagagggacttcaattaagtcactcctgagaaaatatccttttttctagaagaaagaagannnnnnnnnnnnnnnnnnnnnnnnnnnnnnnnnnnnnnnnnnnnnnnnnnnnnnnnnnnnnnnnnnnnnnnnngttcaactaagagtgcttatttcttcttgaaggttaacattatgtttattaagtatcaaaatggaattatcttttaaaaaagaagacaagttttccatactgtcacagtaagctccaaagaactttgtctttctcataaagtaatattctttatttgcatccatttactatgattccgttaattcgtcgaattaaatgcctttataaaaatatttacaaatgttttcttgccttaacaattgtaacattttctacttaaatttaatttccaagagagtgattatttgcattacaaaggaattcttaataattcctgtaagcctaggaaatcacggaatgccaaaagtaacatttcaatgtacttctctataacttttcatcaatcagacattttacattcatgtttatataacccatttaactttgtattttaatgtgaatatatattcagaaattatttgatgtaaatttcaaaatgattataggaattaagctgaattctaatttttttgcttagatttagaaatatgtatgtgaaatttaagaatttatataatctgtgattagtggaaataagaacatccctactttgttcctaatgagtatattatgttattgttttgtttagtttgtgaacaaccatgtattagctttacttagctgatgtcagtaaatgtttctgtctcctaaatgtaaggactgtactcattaatttgtgtaaaagtaaaacactacagtagcagaaaaaattgcactggctctttagccaaaataagcactgtaacatggatgtattactattactgccaaataaaaaagtgatggt

SEQ ID NO: 132769 - DNA, 550 bp, Homo Sapiens
tttttgaagaaaaccaacattgaattctcttccaaagcagcagagagttcagcagggaggcaaggagggggctgaggaacgtgcctcttcaggcaggaaactcacagatggcaatgaaggaggaggtgcaggagatgccattccagagcccgttgttcaggagaataacgcagtcctcccctgagccgtggtcatttggctcatccttcttccagttgctgtaggtcagcctcccgcccgtcaagtacatgaactggccttcagttgcctcatctgtgatgcccaggaaggcagtgtctttggccacatcctggatggccttattctcctcggcattcttgggggcagccactgtggcctggagcccagcacacagagccttcactttggagataggcatccgctcaccattggtcacgaaaagcttcttcccagacattttccccaaggagaagggttacagcttcttcgtgtggtccagttctgatctcaggctctatagctttctctctaagttggccagcttatcctcagcaactgaattgtgccc

SEQ ID NO: 132770 - DNA, 708 bp, Homo Sapiens
  misc_feature (664)..(664): n is a, c, g, or t
  misc_feature (697)..(697): n is a, c, g, or t
gaaatattttagtgtatttattgtagtctgcattaggaaaatatacaaaagaaatcgtaactacaataaaatgtctcatttgaaaacacattactatgttttattttagatgagactgttttttagaaaatagtaattcagggggcattagaacaagacaaaaacaagtaaacagaaagatgtcaaaagcacaagattattttttgttaccattatattttgtctggacaacttaatccttttcctactggccactgtgtgtaattggttgtagttgagtcagggaaacattgcttttggataactctccaaccaaattccaaaacatcaacctccttcaaatttactctaaaataagtatgatgtgttaacagtaaaattttttgcttgttatgaagctatgcgttttctgcccaattttgtaatacaaaatcattaaatatcagaatcaaaagtgtatttagagatcaaaatactgtaagcaattcattttgcaggtgattaagttcttctcactcaatcagcccatcagtgactaagctaaaatttgaacccaagtatcctaattctctctgcctctctttctcactgccactattgggaaatcttgactgggaacatttggatgtgcaaacagtgttttctaaatagaaccaatttccanacttattcttcagttttagcctgtaatgaccanatacatgcaaa

SEQ ID NO: 132771 - DNA, 552 bp, Homo Sapiens
  misc_feature (198)..(232): n is a, c, g, or t
tttctttcttcatccaaaatagtagagatgtctttcccacgatgacctgtgatggtggagatatcttttcctcggccaactcctcctccatcggcttctttgatgtcatcttcaatagcttcatcaattgcttcatcaaactcatcaaatctgtagcttatacatttccttgttcttgttgacctcctttcaagcaannnnnnnnnnnnnnnnnnnnnnnnnnnnnnnnnnncttcttgatcttcagaaaagtctggctcttgtggaggaatgatgttttcaatactgataccaacatacaccaagcgttcttttcttcgttcggcacgctctttcttctttaaggcaacatccaaatcctgcaactgttcctctaatttttcacagagcagtttatgttggcaaggtgggcagaaccattctccatctgggatgatcatcagaggagggcgaaggcaggcagtatggtatccactatcgcaagagtcacacagaagaattagctcaggatggtttggaagggccacattttttgcatggttcatcatcatc

SEQ ID NO: 132772 - DNA, 1538 bp, Homo Sapiens
  misc_feature (916)..(916): n is a, c, g, or t
cggtccggaattcccgggatggggaaggcggttggggttctgacagctgcgcgcgatcctgctctctctcagccgcctgtggacatgcgcaaagggccctctcctgagtccagatgatgctcataccaatggcttcagtgatggcggtgactgaaccgaaatgggtctcggtctggagccgcttcctctgggtgacgctgctgagcatggtgctggggtccctgctggccctgctgctgccgctgggggctgtggaggagcagtgcttggctgtgctcaaaggcctctacctgctcaggagcaaaccggacagggcgcagcatgccgccaccaagtgcaccagcccgtccacggagctcagcatcacctccaggggcgcgacgctgctggtggccaagaccaaggcctctccagcgggtaagttggaagccagagctgccctgaaccaggccctggagatgaagcgccagggcaagcgggaaaaagcccaaaagctcttcatgcacgccctcaagatggacccggacttcgtggacgcgctcaccgagtttggcatcttctcggaagaagacaaggacatcatccaggcggactacttgtacaccagagcattgaccatctcaccctaccatgagaaagcactggtcaaccgcgatcggacactgcctcttgtggaagagatcgaccagaggtatttcagcatcatcgacagcaaagtgaagaaggtcatgtccatccccaaggggaactcagctctgcgcagggtcatggaggagacctactaccatcacatctaccacacagtgggccatcgaggggcaacaccctcacccctctcggaaatcaggcacatcctggagacccgctacgcgcgtgcccgggaaagagcctggaaggagcagaaacgaggtcatanggcatgcatgcagccatgaagtacatcaacacgactctggtttcgcgcatcggctccgtcaccatcagcgacgtgctggagatccacaggcgggtgctgggctacgtggaccccgtggaagccggcaggtttcggacaacacaggtcctggtcggacaccacatccctccccatccgcaggatgtggaaaagcagatgcaggagtttgtacagtggctcaactccgaggaagccatgaacctgcacccagtggagtttgcagccttagcccattataaactcgtttacatccaccctttcattgatggcaacgggaggacctcccgtctgctcatgaacctcatcctcatgcaggcgggctacccgcccatcaccatccgcaaggagcagcggtccgactactaccacgtgttggaagctgccaacgagggcgacgtgaggcctttcattcgcttcatcgccaagtgtactgagaccaccctggacaccctgctttttgccacaactgagtactcggtggcactgccagaagcccaacccaaccactctgggttcaaggagacgcttcctgtgaagccctaaccctagaaatcctcagtgacaaaggctgtcctgaggtagg

SEQ ID NO: 132773 - DNA, 282 bp, Homo Sapiens
aacttatagacaatagaaatttatttctcacaggtatggaggctggtaagtccaagatcaaggcactggcagattccgtgtctggtgaggactgctctctgcttccaagatggtgtgttgttgctgagtcctccagagggaacgaagactgtgtcctcatgtggcggaagggatggaaggaaacaaaaccactccctcaagcccttttagaaggaccgtgaccccatctataagagctgtgccctcacgacttaatcacatcctaaagttccccctcgtgcc

SEQ ID NO: 132774 - DNA, 761 bp, Homo Sapiens
ttttagagcaagagttcttaacatattacatttttattatgaaaaataagaaagttaggtaaaggaaagaaaagtctaactagagctattttgcaggctttagtgtttagggagagaaagaaagtgtgggttaatagccttcaagatagaagatgccctttcatctctgttaagtgtcctcctttagaaacttgagtagaaggaaaactgaccagagtagactgcttccttaagtcttctgggttccaactgtttgtaatatcagcatccaagatgatacgagggaagcacaatgctttggactgtgatttgagatttagaaataaattagatatattattgaggcttagaatcctcaaactttgtattttatacatttagccaataaggaattaatatctggggaaataaatttaggcaaatatttcttttttaatgttttattacctgcttctcctgtgttttagttcaacatttgggcttcttggcctgattttcatacaatctcaatttacgaagctgtaaagaggaagatatttgttctaatctcactcttctaataggaatcaggcaaatgaaagtctaccagacttttaaaatgggctgtttttatactctctaggtgttttgtgttgtaaagaccttattaaggtcaggtaaattggtctgcttgctgttgaaatttgccttctagcaaacatatgtgctttctgtttgaccttgtgtttgctgccaaacctaatacagttgaattgggaaac

SEQ ID NO: 132775 - DNA, 1905 bp, Homo Sapiens
  misc_feature (47)..(65): n is a, c, g, or t
  misc_feature (73)..(90): n is a, c, g, or t
  misc_feature (93)..(93): n is a, c, g, or t
  misc_feature (96)..(96): n is a, c, g, or t
  misc_feature (101)..(251): n is a, c, g, or t
ggaaaaaaatttgccccttttccctttccttttggggcccgcccccnnnnnnnnnnnnnnnnnnntttttttnnnnnnnnnnnnnnnnnnaanaanttttnnnnnnnnnnnnnnnnnnnnnnnnnnnnnnnnnnnnnnnnnnnnnnnnnnnnnnnnnnnnnnnnnnnnnnnnnnnnnnnnnnnnnnnnnnnnnnnnnnnnnnnnnnnnnnnnnnnnnnnnnnnnnnnnnnnnnnnnnnnnnnnnnnnnnnnaaccttaaatatttatttgagaaaacaaataaagatccaaatacgtgagttgatcatctgataaaagtaagagttgacaaaaaaggtacatcttctccaatccgaaaacagaaagtgggaaagatcaaggtatcactagaggtcaatgaaacaaaacatacaatagtggatgacaaaagccaatctctgaatctttgaaaagaatataataaatgaacatctgaaaccagtgatcgagaaatgttttagataaggcacaaaaagataccaagaatgttaacactaggctgtacatcctaaaacagtcagatgagctcactgttataattctggttcaccgcaagaaccttagcacaaagaaaggactcaacaaacatttggatccatgaataaaattatcttcccacatataaccacctgcctaaaacattctcctcctccttgaattaaattcaccatgtctgcatcataggaggcccaagggccagtaccccctcccccatctgcacaccctgtgttcaaaccagtcccagctcctgtcatgttattggctttctgagtatctgtattaatagttgttcctgccagcatatgaagatgaacaaatacacaactgagagagatccagggattttaatccacagatgccagagcttgctgggatgtagtcagaaatcaagctgaactcaggagttcacagtctttcctgtaatgatggttgggaggtgagggaagtcagaggccttttctaggatctttctccatgctgctgtcctccaggaagtcatggcaaatttacatctccagcaggttgtagaccaacagccttgaaggacacaccagggtctctccccatggtgtctcctgtactctgctcctggggtcgagtcggctgctggggtttatcatctggaagattctctgcctcagcctcagcctcagggaacaacagcttaccctgcagggtatacagaagctggaggaaggtctgatacctctgcagcttgtcccgctcctgttctgcctgctgcttcaggtttccaagtttctgaaacaccccgtcaagctcctgctgagtccctgtcttacgctccctcacctctgcagaaacctccgccagatgctgcagatgcttctcctgttgtagctgccactggttctggactgctctgcgtttctccatggccatttgtttcttggcctggagctgctcaaaggcttcccggagttgtgtccgtttcctctgggcttcctccatctgagtcagggccttggtgaggccaattttgatggcctctacgtgctccctgtaggtggccttcagctctttccattgttccttagctgcaattgccttctgtcggctcgtgtcttcagaagccaaggggtcgagacccttagcagtgtcctcctgagccaggatgttctgcaggaaatccgctacctgaagctggctgcagagcagcttgtctttcttctgagagtccaccacaaactcaaccaggatcttggctggcagttctgcctcctcctgcaggcctacaggttccaagatgcctgccacctcagccaggacctctagggctgcagcttccgcctctgtctccgctgcctccatctttccaggcgccgagttcagctgccttcccacccc

SEQ ID NO: 132776 - DNA, 469 bp, Homo Sapiens
aaaaaatgagtctaattttgtttctgagcaacaatacaaacatgcagtgacaaagggctagaaatttagatttttcataatctaaggcatggaacacccttaagaaggagttttcaagcaattgcttcatgagtataaaattacaaccagataacatttgtaaaataaagcttaaatcacttttcagtttgagcttagacagaatgtgatacatgcatgttaattttactggcatctgaaaattagcaggccatgggaataagaaccatgatagtgacttgtatgttccatcccttctaaggatggtgtcaaaggagatttgggcttcagagatgttgcagaatttcctcactgccaatggacctcagtccaacatggtccaatatgagctgaaggcacccaaacaattgctctacaacgggaactttccaatcaagttccccttctaaagcagtttacccctcgtgcc

SEQ ID NO: 132777 - DNA, 479 bp, Homo Sapiens
  misc_feature (116)..(173): n is a, c, g, or t
  misc_feature (288)..(311): n is a, c, g, or t
  misc_feature (317)..(339): n is a, c, g, or t
aatttcatttccaggctaacctactttttatttaatgcaaattacagtaccagttaactatttccaaaccaagtcacatagaacaaaatgtatttacaagggaatggggaaagggnnnnnnnnnnnnnnnnnnnnnnnnnnnnnnnnnnnnnnnnnnnnnnnnnnnnnnnnnntcagtcacagaggcattcaagtagtaataatgttatacagattttgcttttcctttatatcaagacagatttgcacaagtgtttgcaatagtttgtatacaacccacagtccttnnnnnnnnnnnnnnnnnnnnnnnnataaannnnnnnnnnnnnnnnnnnnnnnaagatggaagtggtcacgctaattggtatgtgtacaggcccaagtgatccatcggcaacacatttataaatgcaaattttacaggcaagcagattttcatacaactatctgtatctgcctgtagacagatatagttaagg

SEQ ID NO: 132778 - DNA, 580 bp, Homo Sapiens
ctcctgtgtaagacgaaaagtctagagagggcccgtgttttctaattgcttttcctgtaagtcagataaggctctggtaaagtcgtttttcatgagacagacctttgtaaggtgaagagaacagtctgggcatattagaaatgtttactcacccccttccattcctggaagcagggagaaatttttcttcagtcttcactgtgagatcctggactctgaaggtaattcacacaaaagtatgggttctccacagaaactgacctcccgccccaagggtttttaattgtgaagattagcagtttgtcagttgctgtttaagggttcctgcaagttacgggctccagctataagggctgattctctgtattcaagggtctctccagctttcagagtggtagtttgccctgtgacctcagttctctgacagatccaggaggagttgtaaattttcagtttgttcatcttatttcttattgtgaggatgggactgatgacttgcagctttttacatgtttgaaaggaaactgaaagtcctcatcattatcttttatccttgtttatcatcattaagcctcgtgcc

SEQ ID NO: 132779 - DNA, 476 bp, Homo Sapiens
  misc_feature (44)..(82): n is a, c, g, or t
tttaggattttgcatctaaatctatgagactttggtctatagcnnnnnnnnnnnnnnnnnnnnnnnnnnnnnnnnnnnnnnngtatcaaggttgcactggcctgaaaaactgaattggaaaagttccaacttttttcttctagaagagtttataaaagcctggtatgctttatttcttaaatatttggaataacttcagtggagccatctgttcctagagttttctttctaagcaagtttttgaatattccactcaggtattgtttgcagttgtgacaaggtacaatgaatctctggtatgaccttgtttccagggcttttactgatggcatgttcatgaaaggaccaacccactggcacttcctaaggtctaatcatttctcctccatattgcaaaatgcaaaacaaaacaaaaatcctacttgttttcttctcaaattagcttttcagcctcctgccctatgcagcatgagata

SEQ ID NO: 132780 - DNA, 639 bp, Homo Sapiens
  misc_feature (615)..(615): n is a, c, g, or t
actaatatttctgaaagatcaaatttgtttcaggactgatgaaataaactttggtggatcttttcagagctcctctggtcttgtaaagaggacgttcccgcggcctgtaactgaatggctggatggaggaaatgtcttaatagagtctcacttgaccttgtactaacatttgcgataagggcaacccactgacgcttgtcaacattttttaatcacagcagcaaagacaaaggagtgatggcacagcaggttctctgaccaaccctggaaatactttatgtttctaaatgtgcttcctgatttttccagagtcataaagctgatgtgtgtgtggtgttggctgttttcttcacagtctcatgccagacacacaacataatgtttacattcaagctgtgaatgggccacagcgcctgccggaatcccctcagccctggcttgtccttctcttggtgaacgacagatctggcttcacattggactggcttttatggctttagcaatttctggtcttaaatcttttttttagcctaattagttataaaaacctcagccctcaatggaatggctaagccctgatactgttaagagttgctgtgctttttgtttcttggntaatgcttttctatttttgggttc

SEQ ID NO: 132781 - DNA, 1894 bp, Homo Sapiens
cgattctgatgttccatagaactccgacatcctttctgttggctccaccagcaacagcacagagagccacaagccaccactactgccgtttcttgtcatcctcgaagaaattctggtgaacaagtcgatatggaatgaatacccttaaagtgacaagaaactccttactaagattatgactgagaataaaagagaagcctaatccagagggaaaaatatgtgttcaacatcattgaagattgttggtgccaattataacttatttcgcagctcttatgtttggaaattactgcaagaggatcctaagataccacattttgccctgcctaagctgaagaaagccacacagttgattgggcctactaagctcccaattccactgccaaccttagtcacttctagcacaatccagttctattatggctatattcaacttgtaagtactttcaccatagtttctagatttttctggccattctcatcgttcattgttcttttctggcatcttcgaaccactgaagagccatcaaatgtcaatcaacataaggaacatctaaactatatactaaaacctactgttagaaatgcttgttcctcggtgcaataaagaaatagcacttgaacataaatttaatttccttagtaaggccatttttactttctgcagaaagggtacactcgccagcagttttgccacgagagtacaccgaacaaaggagacagggtcatttataacctgacgcgtccaccttactgctgtgtccggtttccattggctggaacgggacctcacattctgtatttgtcctgattggctagcaacttagaactttttaaaagaggcaaaggcagaggggaacaaaggaaggaggaagtaacttgtggaatgctgagaaaggtaaaaacaccttcaaataaggaagaggaacaggctatgacctaatgcttgcttggaccagtataagcatgccagggcaaatatttaggctaaattgtgggagctaagaacataaagtacattgatttctttattatggctagcagatatttaagaatgttagcacaggtctttgaataaattttgcttctaagagaagttactatttattcttaattagacggggaggaaagtctttgaagaggaacctcactttactttttacacccctaaaaaccatgatgatagactgcaaaaaagcatcccatcaaccatcactttttccaggaaatggctggccacagaaaactctccgcccctttcctcttttgaaatgttcccagactgctcacctgcctccttgaagctaatcaagtcaaatgtacttgaagacactttgtctcttggcttgcttccacaaatcctacccttatatgacatttgccaagtcaacactgtcagtatttctcctttttactctataacgtcttaacacctctgaacacttaccaaaacaaaggtttcagcagaagggttcccctgctgcacgtttatgaataaatagcctttgtcgattttatcttggacttagttttgtctctgacacatgtggaatggatgtctgttagaattctgcccttgccacacctcttgcttcctggataaatgtgggttcacttgggttgatgaccttgggctacactggcttcttcagaacccctgagaagcgtgtagggattctcattcagacctctagaattgagtgaatcagtgaagggcagctgacaccaaaaatgcattaaaatgtcaaggccggcagccctctagcttctggctggagtgtgtgatgatttcgtctgaattccctgagttcaaggcatgcagtgggcagatcgactatgggcccatcagaggctgagtttgcagcagcagctgtcctgtacagcatgcagcaaa

SEQ ID NO: 132782 - DNA, 853 bp, Homo Sapiens
  misc_feature (708)..(709): n is a, c, g, or t
  misc_feature (714)..(715): n is a, c, g, or t
  misc_feature (722)..(723): n is a, c, g, or t
  misc_feature (728)..(728): n is a, c, g, or t
  misc_feature (733)..(736): n is a, c, g, or t
  misc_feature (740)..(740): n is a, c, g, or t
  misc_feature (761)..(761): n is a, c, g, or t
caaggacaggacagtggttttatatatggcaaaatacttctcctaggggagtacagacaaatatagacagacagatgggggcacaggacaccagacagggaggggggaagggagggcagtggtgtcttctaatcagtaagtggaagctgcaccccacccccaggtggagggtgggacattggcacaggaggtggcgagacaggcatgaggtgcccatccctgaggcgggcagccgggcaggccccagtccttgttggcacactcggctctctctggcccagctgggatgctggggaggggcagggttgctgggctacagggatgccaaggcaaagggatgccccaggggagagggggtaccaaggcctctcctgggggaagtgaacatgggtaacaaacagaatcacgagaggcaaatacagagcagcaacagcagcagccaagccccccagaggagatccgaggtcccaaggcaacccctgggcaccatcccacgggtcctctcccctggggcctcagggtgagggtgaaggagcagttttttggtttaaaatgaggcggaccagagtgttccatgggctccacacccaggtggcacagggatggggggctcagatgcagaggggccccctctactaatggcagcaggcaagggatgttggaggccaagctcattcctggggtaggcaaaggctgaggcatggaaannggggnngggtggnngaaanaaggnnnncggncccgcttcctccctcaggggntctggggcccctggacgtttccctgggccccggaaagggtaaagggtggcttgtatgtgcctgtgtgagttttttactcaaaaacctttccc

SEQ ID NO: 132783 - DNA, 324 bp, Homo Sapiens
aaagagccagactttttttgtatgtattatcaaactttgagataaaactagttaaagcagaagagctcttgttgaaacagcacaaagtacctggcttcctagacccagcacaaagtgccttgcccctcagctgacctgatgcaactttgaaaaaccatagggttcccagaaacttagtttgaaaaccttcactcttatgagcataaccctataaccatgagagaaaagggttttattggaaaaggacgtgggacaccggctagttaatacttctggctctgattctggatgcattaagcgatctttcaatgaaaatgttgaaag

SEQ ID NO: 132784 - DNA, 1506 bp, Homo Sapiens
  misc_feature (35)..(35): n is a, c, g, or t
  misc_feature (44)..(44): n is a, c, g, or t
  misc_feature (1254)..(1345): n is a, c, g, or t
  misc_feature (1365)..(1376): n is a, c, g, or t
gtgagctctctctgatggcattgaaatattctacnatcttcagnggagaactttccctaaccattgtttgatttcgtcctcttttttcttgaagttctctagtttttttaggcccttcactttctgttgctgtaaggattcttcactctcccatgtgctgtggatgtaagaccaacccttccacttgatgaggtactggatttcaccttcatccttttcagtgtcaaagtcaccactagggtcgccattagcttcaatcgcatatacagtagtagatgctccagtggctcctttctttcccagtcttgaatctaagaccttttcaatagtttcactattatcttgctgttcatcaactccttctccagtcatttcaatgagatcatctgagtcagtctcaaagtcatcatcttctttgtaactaacgtttttagccgctcttcgacgagtctgccttttgggagcttcgtcatcatcatcatcctcatcagaagaatcttgcttttttctctttccacgctgagtcttcggctgctttttaacacgaggtttgggcactgttcttctggggacaggtcttctggcttttacttttttttgttctggctcactctctgcactggtgccttgttcctgttcatcttctgagggttcctgtttccatttttcttgttttttcagctgcctctggcctcttctttttgggctcccactctcagacccgctacttgcctcttccttaatattaaatcgcgatggttcttgtctgcttcggtttgaccgcctgaccccatagacatcaggatattcttcccacatcttcttcacatcagctatccgttccttcttagaggctggcttctctttggcttctgggaggactggctgggatttggaacctgctgattcgctctcagattccgactgactctcagaagattcagagctgctgttcgactcgctgccatgtccacttcctggatcacttccctgctcactttccgactgactgcctgagtctgaacccgaagcttcttcagaggctgagtgactcgatgcattgctgtgtagcgaactgtcctcctcttggcttttgtccttatttctcatcatcttttaattcttaaatattaagggggagggggaatctgtgtttgctttgaagtcctgtgcccaggtatttactgatccatgtagtatgtccaaaccaagagtcctatctactagtagaaaaatatcagatcccaaataatnnnnnnnnnnnnnnnnnnnnnnnnnnnnnnnnnnnnnnnnnnnnnnnnnnnnnnnnnnnnnnnnnnnnnnnnnnnnnnnnnnnnnnnnnnnntaatactaaaacaggtccgnnnnnnnnnnnncctcattaggagagcgcacaaaaatggaggtgcgccatggcttctaagctggaaaaaacaacgacctgggctctcagtacggctgcttctttccaacaaggcacgaaaagaaagctcctaaaagctgctt

SEQ ID NO: 132785 - DNA, 1347 bp, Homo Sapiens
  misc_feature (208)..(222): n is a, c, g, or t
  misc_feature (340)..(541): n is a, c, g, or t
  misc_feature (543)..(618): n is a, c, g, or t
gggaaaaagaaaagaagggggatatccggggaggggatgagggaaaatcatgggcggaaaatagccggacgtggtataaaagagggtggatggagagggcggaataacgaaaaggcgggggaaaaggcgtatataggatatagggggggtaaaattgagggaaatcggggggatggaggcggcttaaagagaagaataggacgcgccnnnnnnnnnnnnnnncggccagcagcgggggacaactgtggggtggggcggttcagagggggacgaggggaaaaaacggggtgacggagaaagcgaagcttgtgggcgtctccggaaataaaaaaaataagannnnnnnnnnnnnnnnnnnnnnnnnnnnnnnnnnnnnnnnnnnnnnnnnnnnnnnnnnnnnnnnnnnnnnnnnnnnnnnnnnnnnnnnnnnnnnnnnnnnnnnnnnnnnnnnnnnnnnnnnnnnnnnnnnnnnnnnnnnnnnnnnnnnnnnnnnnnnnnnnnnnnnnnnnnnnnnnnnnnnnnnnnnnnnnnnnnnnnnnnntnnnnnnnnnnnnnnnnnnnnnnnnnnnnnnnnnnnnnnnnnnnnnnnnnnnnnnnnnnnnnnnnnnnnnnnnnnnnccattatcctggttttattcaggaataggatgggggtggggagggcttaagtggcccacacgtccaggtgtagactgactacattgagtatcgctccaacaccgaacttccctttaacggtttaaaaaaagggtcatgagtgtcaacacagttcagcagtgttttcatgggagaccttcaggcaggcaggaggacatcctcctctctgctcaggaccaccacgggagttctaggcactccacctcactgttcttcagacagctgtgatgtgagcaggggctaggccggtaatcaagggggccagactgagccatgccacacccttcctcctagtccccatgctctcctgggagcctggcagctctgcttacttccgtttgtgttttttcttttgttccttacgttgctgtgctctttggtccttcttcatccttgagtccaccaccttgaaatgacctctgactccagctggccggcgcactttgcggcccacaccttttttggctacaacgtaggtgacatggcgtttctccttgccaagcccagccttcttgtagagacttcgcagctgtgccactttctctcgttctgagatgtccactgtgttcaccacggcttctgccttcttcctggtctgctccagcctcttcatagtagccctctggagactccgtctttgggatggcaagctgtttccgttctggaatctgtggtatgaacaataagaca

SEQ ID NO: 132786 - DNA, 705 bp, Homo Sapiens
  misc_feature (679)..(679): n is a, c, g, or t
  misc_feature (695)..(695): n is a, c, g, or t
gagtctttaattcacttttaatagtataaacctcatttaggtagtagtattaagccacaacaataatgccacattgaaacagcatttaataaaatgcataaagctaattcatgcactgcaatactctatatacaaacacaacaatgcaaattcttcttcaagactgaagacattgattagatataaaattcagtttaaaaagaacatgctattttttaaatgccatcacataaacaaagtgatttcacagggagaagaaagctgtataaagctgcagctttcaacaggttttaaacctggcattaaaatgtaatggcaaaaccaatattttctatattgtgaagggcaaaggttacagaaacggtcccaagaaaatctaacacccaaattttcctttgatagatagatgcctttaaaagggctggtaatgcagttacattctaacagagaagtccaaactacaggtaaaaactacggcttgtactgtgaaaaatgtgcagcttttcagttataaaactagttgaacactggtttacaagataatccgtagaacagagagactgtagaaaaatattccagcacttgagttgtgtgtggcagcagcatttgagtccatgaatgctatggtcattaaaataattgattatactttcctaaagaaaaccattttttaatgcanagtctactacttccanatgttattcc

SEQ ID NO: 132787 - DNA, 1131 bp, Homo Sapiens
  misc_feature (498)..(584): n is a, c, g, or t
gacagataaaaacactttatttaaaagtataaaaccaggcttactccttcaaactgctcccacccctaattatctccacaaagagctatataaattgggcaggggtatgtgtacagtcatctcagctctaacaaccccagttcttctttcaattctcctttctcccttcatacaattgagatgtttgtcctttgcactttccccaagatagcaaaggtgatacaaatgtggaaggaggggaagtgtagaaaataaactgtcatcatcctctattcccatctccagggaacagacagattatatgaactctgaccaaatgatttgcttgtctgaagaaacaaataataggtacagttactctctgtatcctaaagaaagacacgagggtccagagtccttcttcagtatatagcctcgtccatattgtcatcactgtcaccaccaaagtcctctccattgtcaaaatatgacatgatgtaatcagtttcctcttcatgnnnnnnnnnnnnnnnnnnnnnnnnnnnnnnnnnnnnnnnnnnnnnnnnnnnnnnnnnnnnnnnnnnnnnnnnnnnnnnnnnnnnnnngttccttcttctccagggtctctagtttctgtattgtttcctccttatcttctgtggtcttagggggcctcttggggagcagaattgtaatccgttccttctgtagcttccgcactcggatcatttagctcccggggtagacgccgccaatcagggttccaatcgatggcattgtcaatcggacctgacatctgatatttgtctgaataacgctccacatctctcttggggacagctggccggatgaagtaggggagctgcctcatggctcctcgtagctcttgcttcagtgccaggacatattccccttcctcgcctgagggcaaaggtactgggcggaactccaagggagggaagagtggagaaggctgcagggtgggtgggggcaagcatcccctttcccaatgcccacggcctccacgttgaaggtcaactggccccggccacgaccccggcccccaccccggctggccatggtggagggggcctgggtattcagagatccagtgaataaacctgctgcccctccccaaagcggagcccaagc

SEQ ID NO: 132788 - DNA, 972 bp, Homo Sapiens
  misc_feature (259)..(259): n is a, c, g, or t
  misc_feature (303)..(388): n is a, c, g, or t
ctttccccccaggattgggcaagggtgatacaaatgtggaagggaggggaagtgtagaaaataaacgggtcaatcatcctttaattccccatttccagggaaccagcagattattatgaactctgaccaaaatgatttgctgtctgaagaaacaaataatagggtacagtactctctgtatcctaaagaaagacacgagggtcccagagtccttcttcagtatatagcctcgtccatattgtcatcactgtcaccaccnaaagtccctctccattgtcaaaatatgacatgatgtaatcagtnnnnnnnnnnnnnnnnnnnnnnnnnnnnnnnnnnnnnnnnnnnnnnnnnnnnnnnnnnnnnnnnnnnnnnnnnnnnnnnnnnnnnnaagttacttcttcttccttcttctccagggtctctagtttctgtattgtttcctccttatcttctgtggtcttagggggcctcttggggagcagaattgtaatccgttccttctgtagcttccgcactcggatctttagctcccggggtagacgccgccaatcagggttccaatcgatggcattgtcaatcggacctgacatctgatatttgtctgaataacgctccacatctctcttggggacagctggccggatgaagtaggggagctgcctcatggctcctcgtagctcttgcttcagtgccaggacatattccccttcctcgcctgagggcaaaggtactgggcggaactccaagggagggaagagtggagaaggctgcagggtgggtgggggcaaagcatcccctttcccaatgcccacggcctccacgttgaaggtcaactggccccggccacgaccccggcccccaccccggctggccatggtggagggggcctgggtattcagagatccagtgaataaacctgctgcccctcccggacgcgtggtcgacgatatcccgggaattccggaccggtcc

SEQ ID NO: 132789 - DNA, 787 bp, Homo Sapiens
  misc_feature (584)..(668): n is a, c, g, or t
ggggaacgccaccgacttgaggaagcccagtacatttcaagttggtcgcggcttgggctccgctttggggaggggcagcaggtttattcactggatctctgaatacccaggccccctccaccatggccagccggggtgggggccggggtcgtggccggggccagttgaccttcaacgtggaggccgtgggcattgggaaaggggatgctttgcccccacccaccctgcagccttctccactcttccctcccttggagttccgcccagtacctttgccctcaggcgaggaaggggaatatgtcctggcactgaagcaagagctacgaggagccatgaggcagctcccctacttcatccggccagctgtccccaagagagatgtggagcgttattcagacaaatatcagatgtcaggtccgattgacaatgccatcgattggaaccctgattggcggcgtctaccccgggagctaaagatccgagtgcggaagctacagaaggaacggattacaattctgctccccaagaggccccctaagaccacagaagataaggaggaaacaatacagaaactagagaccctnnnnnnnnnnnnnnnnnnnnnnnnnnnnnnnnnnnnnnnnnnnnnnnnnnnnnnnnnnnnnnnnnnnnnnnnnnnnnnnnnnnnngtatgatgaagaagaacatgaagaggaaactgattacatcatgtcatattttgacaatggagaggactttggtggtacagtgatgacaataggacgaggtatttctgaagaagactctg

SEQ ID NO: 132790 - DNA, 918 bp, Homo Sapiens
  misc_feature (812)..(846): n is a, c, g, or t
ttttctgaaaagatacaaagttttattaaacaaacctggaatcaacagtattattacataaattagacagcagtaaaattttcctagggcatatgtacaaatcacagtgatttccattgtgcaacaaacagacaggattaaaaataggcactcccctccccgaccccccatgagaaggggtcaccccgcggggttcccagttctggctcgccaaggggtgcacaaacctgccaaggcactctgcctgtgtgcgcggcatccggcggcagtgacaggggccccagaagcacgttggcaacatggtgaggctgcccagtgttcagcgcaaagaaagaattcagctacgacagttgagcagagctcaacagccatctcagagcacaaggactgtggaaaggcttcaagtctcatctgctaaaacacaattgtaatgccttttacatacagaacagacgtgtccaccatggaagatcaaactaagcctcaacagaacttcccaacacacgataatttacagaaaaccatgacagagcatccccgttattaggaaggactgtactgctgggggcaaggccagatggtttgcaaagcaaacttgattatgaaaaggcttggtgaaaatacagcccaccttcaccaagacacacacacagacaggcacacaccccaaagtatccaaatgcattaagacacctgttcatgtgcttttcttcttgcttttaagtgaatcccgtccatttaagttatactaattagaaggccccggccgtaatggccgaattcccgggcatatgtccggtaccgtcgactgnnnnnnnnnnnnnnnnnnnnnnnnnnnnnnnnnnnccggccgcttccttcgctcactgactcgctgcgctcgttcgttcggtgcgacgagtacccctatatgatgat

SEQ ID NO: 132791 - DNA, 1275 bp, Homo Sapiens
tactggtaccaacaaaacaagttccttttattacctggaaaccatggaaaaagaaacctaagtgctctggcccagtcctggggctctgggaggctcacgctccctcctcaggctggggacccaggtctgtccgtgccctcatcttcctcctctgccatgaccacctcctccagggtacgtcctcgaagtttgctctccactaacaccttgcacgtactggcaggcggtagcccttcctccacgtagcgacccctcaggaacacaactctctcctctccgtccaagggcagcccgtgggcctggcacaggtcccgtgcttccctgagtccatccagggccaagaggttgaccatgaagcccagaggcaaggtctggcccttgggggtgctaaaggcacgagcgaagcgggccagggcttcccggcgggcatggcccacatggcactgcacagcgcaacttggcaggtagggcagggtctggagcagacggaacaggcgggcagcattgccctctcggaaggcagcatctaccgccaaggccttgcggaggggcgggcaggcgcgcagggcagcaggcagctgtagaacctcatgcagggcttccaccgagcccaggttatagagcagaaagaggccctggaaggcgggttggcgggggttcggcccggcggccccgcgcgtagcagcgccgcagcgagccgaagccctcctgcacctgggcctgcagcagcaccgggtccgcgggtccccgcgccgcgtcgggcccgagccgcgccactacggtcagcagcgtggccagcgccgcctccagcaccacagctgcctcggcgtcgcccgctccctgcagcgccaggtccaggcgcacagctcgcaagcggtctgccacgaagctggccacctcggcgcgggcgatgtcggcgctctccgccacctcaccggccaggtagcgcacggtggccagcagcacggagggcggacgcaactggctgggcgggggccggggcttgccggcggcgggtcggctgtactccttcaccgcgcgctgcggatccgcgcggggcgggtcctggcggcaacccggcaccacctccaagcggtgcaggcggtgctccctttcgcgctgggcgcgctcggcggccgggcacatgtccgggcaggtgcccacgggcagctcgcagccgggcatgagggggctgcggggagacggtgggcgctcagcatcccgggacggcagcctcgtgccgattcaaacacccagcctcgacctagcctaatt

SEQ ID NO: 132792 - DNA, 728 bp, Homo Sapiens
  misc_feature (101)..(129): n is a, c, g, or t
  misc_feature (584)..(584): n is a, c, g, or t
  misc_feature (643)..(643): n is a, c, g, or t
agagtgttaaattctcatgaatttatttttatttacctgccttgttttggggagcatatatattgttgacaaatatatacaacattcaacaacttagcatnnnnnnnnnnnnnnnnnnnnnnnnnnnnngatagttgagaaggcaacataaaatggacctaagtggtagtttaaaagttcattccatattaaactatatacatgttttttagtgggccacaaatttgcctttaagctctcttgccaccaacaccaacacatccactcagtttcaagatgtgagtaaatatctaatatttctaccatataagctaaattagcaagcacaatcacattcaaagacatgagaagatacactgtaatcgggaaaaacaaactcattactacacatttctaaaacatttagaacaatattttgagttcctaaaatggtcagtatcccttttcttctccctttgccataatcctaggagaaaaatcgcatattaaaaaacctttagctaagcaggacatgttctgaatgctggaggacttatttccttttttgttaattatggaagacagcaagtaggtagcccaggcanaaggtaaagaaactaaaactattaaaggacttacgtgtcatctatgaatgttattccanaatactccttttctttcaggttgaaatgtgaagcactaggtccagcaactctcttgctagaagtttgggctgaacagcagctcca

SEQ ID NO: 132793 - DNA, 1056 bp, Homo Sapiens
  misc_feature (526)..(996): n is a, c, g, or t
tttcaggtatcacaactttaattaccggtaatgatagttttgctgtatagcagcaattacatgaaggtttattggataaatacctctgcattctctgcagtaaggagggctttgtggatgctacaaaatctatgaaaatgaattgctaagtatttgtagccatctaagcaaaaatttgacaaaaatggcccaaaatttctcatttgagttagaaacttaattaaacatacagttaaaatagatgctgactcttggtgcaattattacttgcaatttcttgctgaggtatttttttctagggctagagaactttaagtattagagagctaggttttcttttgcaagctctacatccatcttaatcctaaattcctctaacaatgttcattttaccttttcagttcagtgattgatttctgcattgtcagccacctgtttcaagctttattataccttttctatgcctgttctggatgtaatcagaaaatgtcatttttcctacacttggcctcgtgccgaattcttnnnnnnnnnnnnnnnnnnnnnnnnnnnnnnnnnnnnnnnnnnnnnnnnnnnnnnnnnnnnnnnnnnnnnnnnnnnnnnnnnnnnnnnnnnnnnnnnnnnnnnnnnnnnnnnnnnnnnnnnnnnnnnnnnnnnnnnnnnnnnnnnnnnnnnnnnnnnnnnnnnnnnnnnnnnnnnnnnnnnnnnnnnnnnnnnnnnnnnnnnnnnnnnnnnnnnnnnnnnnnnnnnnnnnnnnnnnnnnnnnnnnnnnnnnnnnnnnnnnnnnnnnnnnnnnnnnnnnnnnnnnnnnnnnnnnnnnnnnnnnnnnnnnnnnnnnnnnnnnnnnnnnnnnnnnnnnnnnnnnnnnnnnnnnnnnnnnnnnnnnnnnnnnnnnnnnnnnnnnnnnnnnnnnnnnnnnnnnnnnnnnnnnnnnnnnnnnnnnnnnnnnnnnnnnnnnnnnnnnnnnnnnnnnnnnnnnnnnnnnnnnnnnnnnnnatcacaaatcgagctcagtcagaggtgggaaccgacagactatagatacagcgttccctg

SEQ ID NO: 132794 - DNA, 704 bp, Homo Sapiens
  misc_feature (652)..(652): n is a, c, g, or t
cacttatttcaaaaatgattttatacaggtgtttcacaatacacatttggattgattttacaagatagaattagattctcagcaagatactacacaatttaccactatactaaacaaacaaaaaatctaattaccattagcatagttcatagtttattccactgtcttcaaattcgttctccaccctgtcagcatttcaatcaacagttttactttcttcagcattgtcttcccttctcaaaatagaatgtcattaaattttgatgtctgaatatgtacatataatcattattctcattttataaataagcagtgtcttaaatagtgctggtcctgggtagccaaagggatgaaatgtgtttttaaaacatgcaacattatctgatattttaagttttgatgtttaaataaaaataatatacattaataatggaaccaactgaataccaagtatcaaagctattccttagactgtccaataagcaggccttgtagtttgaaaaataaagggtctgatctgaactgtggaaaaagcatgattcactcaccttgaagaagtgcattttctctttcagggcactgagagttgctaagagcaaggtacagtatttccttgattcataccaggaggatcaagtctggtaattttcanattagggctcactcaaataaatacctccatttaagccaacctaaaaacttcc

SEQ ID NO: 132795 - DNA, 502 bp, Homo Sapiens
tttttttaatttataaagaaaaatggtttatttagcttatggttctataggctgtacaagaagcatagtgccagcatctgcttctggtgaggcctcaggaagcttacaattatggcagaaggcaaagggagagctagcatatcacatggcaagagggaacaaaagggagagggaggaggtgccaggctcttttaaacaactagctataggatgaactcatatccatgtggaggacaccaagccattcatgagatccaccccataatccaacacctcccactaggcgccacctccaacactgggggtcacatgtccgtgtgagattttgagggaacaaatatccaaatcatattaccacattttgtttatccattcatccactgatgaacatctgggttgtacgtatttcttggttattgtgaataatgctgctatgaatttctcctttttttatttaagtacttaacattcctctcaactctgctttagctgatccttccaa

SEQ ID NO: 132796 - DNA, 837 bp, Homo Sapiens
  misc_feature (771)..(771): n is a, c, g, or t
  misc_feature (808)..(808): n is a, c, g, or t
cacagggccctttcttttaatacggctgaaatcttccacagcctcaggagagggacgtggacctgtctaaggaaaacaacaggctgtgcgaaatcagccctcagggtaacactgaacctggcgctcttccggcaccacacaggaggcgacgcccgggaaagaagactgagcggctcctgtctgaagacgtctccatcagtccagccacctggtgtcactggtatctgcgaacatttcctgattctccatattttgtgttaaaaaatgtattttgaggctgtgctgccggcaggccaagcgaaaggtttccagtgagggccgcccgtcgacgatctttgttcaaggttaatcccaattttagcttcaatacttcatcctgtagctctgtggcaatttccagatcctcggcagccttcctcatctcctccagtggggcctggccatggaatcttctttgctcacgcatttggaggacgtgctgttttatcttctcttctaaatttctctcctgcagggcactcatttctttacttgcttgtggcgatttctctttgcttggtttcatttttccaggcggattcagtggtactttcctgttatctatcagatctgtggcagagggaatctttgatgccaccatgctcctccgcggaggcaggagtttgctgagctcttccttcctcttccctcatcctctgggctcgctctctccactcctgcagtgcccttttctctcgtctctgctgctccatcagagcctgcttctcctgnagctctcggagcgccgcgctcggctctcttccagtcnttttgctcggatcgcatttggtacggtga

SEQ ID NO: 132797 - DNA, 1120 bp, Homo Sapiens
attaaatcactataaaattttattaaatgcatatatgtaaacttgtgttggcaaataaacaaatttgagctgtattcaagcagcgctgaattccttattcttagcaaataatcaaaagtattttccaaagttgaacattattaaatgaaagtaaaacatacgttaagaactagtattgttgtaaatatgtatgcaacagaaactaatcatgtgtacgcatgtgtgtatttcagtatcctgagtaggatacatataccacattaattttactagagattaaagctgatgaaatgaaatgtatctttatgaatgtatatgcatctgcaaatatccatgctacatacatggaagttaagaatttccactggccatttgttcagccacttgagcgttatcttctgtttcctctgattttacaaattccttgataaatttccaaaggccctcctgcctctcttcactgatctttcctatgatctgcttcacatggttttcagtaacttttattttcttctttaaaatcatattttctgtttccaattgtatagcttcatgctctatgcttttaatcctattctcagtgatatctgaaattccagtatgaaccaaagttgttttaatttctttttccagagcttgtatctcatcccacttactgagtatttcacacctcttcttttcaaccttctcagtaagagtaagtcggttttcatcaattatatgtttctcagatgattctgatcgttcctttgcagactgcagcaatgccacctccatctccagttcacttctgagtctatcattctgctccagggctgcttttgtggctgtcacgagcatcctcagctcttccctggcgagatccatgtccgccgtcttcaccggcctctgccccagcgccttgagttgagccagaagagcctcgtactgtgctgcaggctgggactccaggagcgttgccatgtagagttcatattcatccttaacttttttcaagagatcaccaaatatcaaagaactgttacaaatatcttcaaagacttttccaaagacgtgcagtctgttgaactgctgggggctgcacgtgcaaattttctggagctcctgctgcagctttctc

SEQ ID NO: 132798 - DNA, 1002 bp, Homo Sapiens
  misc_feature (700)..(700): n is a, c, g, or t
  misc_feature (714)..(714): n is a, c, g, or t
  misc_feature (723)..(723): n is a, c, g, or t
  misc_feature (758)..(758): n is a, c, g, or t
  misc_feature (850)..(850): n is a, c, g, or t
  misc_feature (879)..(879): n is a, c, g, or t
  misc_feature (966)..(966): n is a, c, g, or t
agagtcagtatttgtttttattattttgaagtaaaatttatacatagtgaaacgcttacgtctttaacatactatttgaggagttttgacaaatatataaactcttgtcaatatataaactcttgtcaatatatagagtattccaccaccccaaaacatttcctaaagtctctacccattactgtctctactccacctggaaacgcagagaggcacagccctatctcttgcacccataaggacactcacagcatagactgggcgagggccagcatctctggactgactgcccatcagggagggcttaggcctcagccagctgctgcagcaatgagagagtcccatagagggcagacaggggcatctttgcttctacatcccaggttgacctggggttatccagctccgtcctaaggccacactcctccagcaggccataggtgatggccaaaccctcactctggagtggggcgaggagctcaggtttgagggtgaagggaatgctccaggggtatctgaagtttggctccaggatgctccttaccagctcctgttgctgaagcaggatcctcttctccatggaacaggccagcaaatcgtgttggaagtcactcagcaccattatggcttcaaggagactaaggatggggtcctttgggttaaaccatgcatggtttgaatcctgttgaagtttctttangatggaccaccagnggcatccanatgacctgagctgtccattccagcatgttcatcangtcctgtagagccctctgtctctgagcatggcaagatactgtagacatgacatctgacatccttgagactgagcaatgtctttatttctggnaactcctctgtaatgctgaatttgcagangggtctctatctctactggagattgactgtcgtattgcaagccgtcaaatgcggtagaaagtctggttactcaacatggtgagatgnaagtgggaatgataatatgacacccatctccacata

SEQ ID NO: 132799 - DNA, 873 bp, Homo Sapiens
  misc_feature (526)..(544): n is a, c, g, or t
  misc_feature (708)..(720): n is a, c, g, or t
tggacatatattaatgctgcagacatcagtagtttattgtttgtttagtccaaacacattcaatatggaaactcaaagaatactttccacctgaaacaattaaactagattctactagcatataatgcttaacacattacagcaataaagatggtaatccattgtcttctatacctactaaagccaagatggtaaagccaatttggttgcaatagtgtcataaggatagaatattaccatcaaaaaataaaacaaaatcagcaaataacagtaatggtagatgaatatttttactctgtttcactgaaaagaggacaaaatgttaaaactccacagtactgcaggtgaacaatcaccatgtaaacttctccatatgatgttttaatgttttattcatggtatgtaaagactgaagctgaatggctctttgctctacttttctattattacacttaacatttgtcattacttttggtgccagaacagttttcatggatggcagggcaatatcctgaattggaaattnnnnnnnnnnnnnnnnnnnggaaacagaaatacaagaaaatatgcttgggggaaaaaaaacattgacaataaaacaactgcttctttaaaagtagtattaataaaggcttcaaaactccaaagtaattttctggtaagaatttcaagtactatatcagaaagtataaaactgtttcaaacagnnnnnnnnnnnnntccttaagccccccaaaaatggaaactatgaaaatctgtgtccccaaaatatatgcaatagtgcaagactttccctcaaacatggaagacctcattcaaagggggaaaacgggacagattttactcatattgcccagtacatgaaaaacaaaa

SEQ ID NO: 132800 - DNA, 833 bp, Homo Sapiens
ggggagatcgcacactttattttgaaaaccaggccagggacagctccagtttggggggaggggaagagattataacttttaaatctactacgaaaatacaaaaagaggaatgtgacagggttccttcctgtgttatgtcaccgtctgtaatcagatcccacagtccagcccagaatcataattcacataacagcgaaactcatttgccaagttccgggtgtgtcttggaacaaacgtgcacatcttcactccaaggagttctgctgcctgttcttccatgatggcacctgtgcacagcagaatcttgccccgcgtcaggtacttgacggtttccgatgtttttctgagacattcctccgaaagatagggaggatctgctattacgatgtcaaaactatgtgcagcaattctttcgggtaagtccaatggattattgtaatcatagaaaataaactcctctccatacatggcaaatcttttgtcatattcaaagatgtatatcgaaaagttttctctgcacagctctctgagtttctggtaaacactaggggcactcacacatgcgattctgccaccttctcctacagctgcaattgcctcctgtgccagctgcagagcagtttcctgactataccaaaactggctcagttgccaattctcttctattattccaatgttatatttatcatcctcgcctggctcaatttgttgcttttgctcagcataaaattcctggagagctgctaaggcatgggcagaaagctggggtgtctcatcatcttccaaatcactcatttcacaagttgtttataaccagccgccgtgcgcagtcg

SEQ ID NO: 132801 - DNA, 695 bp, Homo Sapiens
  misc_feature (555)..(555): n is a, c, g, or t
  misc_feature (617)..(617): n is a, c, g, or t
tttaactatttaaataattttatttgtttcatcctttggtagatgagaaaaatacattacaaaatacattatacagaagacagctcacagtacacattactaaaaacacaatctacattccagccagggctggtggtaagttcagaagaaagccacagaggccttgaaaaccagatttcagctctatggaatgaattttccccttatgtcccgtctttatctcaacctcagcatgttttattagcacccctaattaggtgggtgtgggtagagttagagcagcattgagtgggactggtggactctccatccacctaaagcagcaaacattaaaagtccctcaaaagaaaaggggtaggggaggggaaagaatggccaatgtgaaaattgctgtgtctcaaagcattacagaactgctctagcatcctagttcccaggcagttgtcccaagtctgggttttctgagacttgggtcttcacttggccatctttggcctctgtcatttcactgttaatgagagctgctggcatcgtaggtcctaagaggctgagtcncagagcaagcttacagacaaagagatgcaggcagcacccgctagatgcaaagtcatgcccanacttttacaacagcaagtacatacaacacagcactgacagttccatctcagtacagactccccacctcatcttccctc

SEQ ID NO: 132802 - DNA, 678 bp, Homo Sapiens
ctctgtatatagtgtatataatggacaaatagtcttaattttttaacatctagaggttgccagtgtatgacaaagtagtaaaattaacatattttgtatgctttgtgttgaaattcataggaaaacttgtcttctgtaattgacttttgcataggaatttgtttggccatctctaagcattacacgtgcgtgtacttgtccactggattgaaggcagagaaggaagggaggagggaatgattcaaggccaaaatggtcacatttagaagataccttagatgataaccattgttatgtgtgtgcagttttatttaacagtgctgtgtatgtggtggacaagttctatgaaatatctagtctttctagatgtttggaagtgcttgatgtattttaaagtagtggtagtagaataacactttttgtaaatagcttttaaaaactgatgggaaatgctgtttggaagtggatttgttgaaccacctgggaggtgggagggaagaaattgcaaatggtgttttgccattgtttattagaaaatttcagcttaatccattgtgtatatgttacatgcatttcatttaactttgctatactgtatatattgtgtatatactggacaaattagtcctgattttataatatctagtctgtagcttaaagaggttgccagtgtatgac

SEQ ID NO: 132803 - DNA, 975 bp, Homo Sapiens
  misc_feature (846)..(880): n is a, c, g, or t
  misc_feature (884)..(923): n is a, c, g, or t
tgccgtcttacccctcctgtccccctcctagaaacaacctttgccacaaagttcacataaactctcatcctgtatccttaaatacttttaaaaaaccccacgtaaacatcagacagactactatcaatataattccagtgtaaatttttaatccgccctgacctgtatggtaagaattaaccatattctcattgagtgtccacatgagttcacaaccttaaataaagcatggacctacaaggagttctttttgagtaacacctgacaataatactaacaccaagtgtactttgttaactcttatatttataacaattataaaccctcagaaaagtacagaatgaagtatgtgaatgtatttgagagtgacaaaaataaagtagaaattgaaagaaaattttacatggcttttcctctgagggcacttctcagcttgggaggcatggtctaagtagaccaaaagctggaaatcaaggaagaaaaatcttagaaaggagacagccacagggtggcaagaattccaaatttgcgtatacactatgataagctccttggatgaccccctgaatagcatatgtgggagaaatttcaaagagcttagtggaaagcaataccagaaggcttagaagcctgatagatttttaggtactacccacacagtttggagttgaacttcaccaagccagaagtgcttagcaaacacatcagtcttggtactgaaaccccagaaaaacaagaaagactatgtgtcagaactagacacaggctgggctcagtggctcacacctgtaatcccccggccgtaatggccgaattcccgggcatatgtccggtaccgtcgactgnnnnnnnnnnnnnnnnnnnnnnnnnnnnnnnnnnncggnnnnnnnnnnnnnnnnnnnnnnnnnnnnnnnnnnnnnnnncgagcgaagacgtagcggccccttagtaggtgaggtcgtagtatcaagtctc

SEQ ID NO: 132804 - DNA, 1129 bp, Homo Sapiens
  misc_feature (312)..(320): n is a, c, g, or t
gcaatatgtcatggtaatttggcctaaagatacttagaatattgcgtttcctttttgattaaaggaataccatacgcatcaccatcaagctgctatcgtaactcactttttactgtggtaaagtgaccatttggtccatggcacccaggttacatatatcacacttctgtcacaactgagaaccttataagatttcatgtttataagctacacatacaccctgaccatgctgtcagtcccctcagagtttttaagaaaaatatctacatttgtccttatggatgtccaaatgttacaccatcatttgttccnnnnnnnnngatgcacattcatactgtgaagttattaggaaaatactcttgcaaacaaactatataaagataaaatacacttcaaaagtatgtggtttgttttcttgtttgtctgttttacaacattctataaagtgcagagtcctaagggaaaaaactactccctataacaatagtttaattacagcagcttttgcatagcaatacttagaggaagttggacacttcagtttcttcaggaagagaaggatggaagagtatcttctgattcagattgttttttggccataagtctgctttcttcaggaatggttgctgatgccaaatctccattaagtgtattttttgaacagtgaacaggtctatctgggtcttcaagaggaatatcactacaagaatctgtatctgagtaggttcttcggcgtcgctgggagagtcggtgaagtgtagatactggttcttttatagagtggctactcctctctgaactgcaagaaccagggtggctgacagaacgcttcatcatttgaacaggagaaggtgacacaggagaaactaagggatccggatggtgcagttgaaacatctcaggtttaaacttggcattggctatcttcacacattcctcaagcgttgtgatgaatgtgttacacgtggcactaagcagagaagaggcttcattcatgttctctgcactaggagatgaatgattctcatcatggtgaacaaattcctgtattgtatgaacttgctgcattaagaggtcacagtagaggcgaagttcagacattttggttttcagcgattcacctcgtgcc

SEQ ID NO: 132805 - DNA, 727 bp, Homo Sapiens
  misc_feature (517)..(517): n is a, c, g, or t
  misc_feature (620)..(620): n is a, c, g, or t
  misc_feature (675)..(675): n is a, c, g, or t
  misc_feature (681)..(681): n is a, c, g, or t
tttgacagtttctccactttattagcctggagctcctccctgccagccccaggggctggtcgctggtccctgggcacagtgagcagggctgaggtcagacgggttcggcccttggccatggcagcttggttgggacagccgggccaagggaaaaaaaggtgcaaaagtccaaatgctggcacttcaggtgtggccggcacccagccaggcgcagtgggtgggcagggcgccatgcttctctcctggcgacaggtcggccgtgtagcagcgccccctcccagcagccactaggaacagctggtgattctcgccaggaactgctgcgcccaccactcgtctaggtcaatgggcacaaagttctgcagccggggattgggggtcctctccacgtactgcacaggccttggcccgccctcaccggctgggccaccatccagctgctgttgcacctgctgccaggcttcggacacaaagcggacattctcctcgtgggccactgtgtaggtctcctgggtcncctcgaaggatggggacgtggagggggcccgccggccattcacacgattgaacacaagccttggccctggactacagccggaggtgggagccgggagtcctgngctgcgcctgctccgccaggcactcgcggtcccggccggcctgttgccttcctgngctcanggtgcccagcgccgctctcggttcctcctcagctgagaggggcact

SEQ ID NO: 132806 - DNA, 1244 bp, Homo Sapiens
tctttttacactatcccccatatctctatctacttaaataatctaaggtagcgaggcctgggtgtgcgaattcggcacgagggcgccgcctccgccgcgtgtccggggtcagcccgagcccgtgcgggccctttaagggccgggggcgtgtagcgggcccgccccctccccgcggcgcccgcagtccgttaagtgcgagccccggcgcaggggccggatctggccgggggccggcggcggtgtgggagcggcgcgtcatgtacaccatcaccaaggggcccagcaagctggtcgcgcagcgccgcacaggtcccacgcagcagcaggtggagggccggctcggcgagctcctgaaatgccggcagcccgcgccgccgacctcgcagcccccgcgggcgcagccctttgcgcagccgccgggaccctggcccctgtcgagtccagggccaaggcttgtgttcaatcgtgtgaatggccggcgggccccctccacgtccccatccttcgaggggacccaggagacctacacagtggcccacgaggagaatgtccgctttgtgtccgaagcctggcagcaggtgcaacagcagctggatggtggcccagccggtgagggcgggccaaggcctgtgcagtacgtggagaggacccccaatccccggctgcagaactttgtgcccattgacctagacgagtggtgggcgcagcagttcctggcgagaatcaccagctgttcctagtggctgctgggagggggcgctgctacacggccgacctgtcgccaggagagaagcatggcgcctgcccaccactgcgcctggctgggtgccggcacactgaagtgccagcattggacttttgcaccttttttcccttggccggtgtgccaaccaagttgcatggccagggcggaccggtttgaactcagcctgggtactgtgccagggaccggaccagccctgtggctgcaggaggagccgccgcgtaaaagctggcggaacgtggcctcaaccagaaacacagagaaacacccggcgcgaattttggtcgacaaacatgaacgcaggcataatgtgcaccgctttaaagaagaacgcccctaggatagctgagagacggcagccgcagcacagcagcacaccgagacacggcagtgactaagctgacaagtagcagccgcaaccaagcgtaggcgagtacactcgcagctaggctcgcagcgcagacggcacgacacacaaact

SEQ ID NO: 132807 - DNA, 405 bp, Homo Sapiens
  misc_feature (44)..(77): n is a, c, g, or t
  misc_feature (80)..(94): n is a, c, g, or t
  misc_feature (219)..(284): n is a, c, g, or t
attattttgtacaaaaataaatcgacttttaggaatttcttctnnnnnnnnnnnnnnnnnnnnnnnnnnnnnnnnnngcnnnnnnnnnnnnnnngtcttttcaacttttcatagaagttggttgtaacttgtaaacatgtttttaaattaagaattaagataaagtgtagtacccgttccgttacaaagtgccaagacttctaatgtggttggttgccnnnnnnnnnnnnnnnnnnnnnnnnnnnnnnnnnnnnnnnnnnnnnnnnnnnnnnnnnnnnnnnnnngtgacattggaatttgtggattttctctctctccccccatccctgccatcaccagaccctggggttcctctgatcgtgactctgtttatcccacactgttgcctgctcctctgaggaaaag

SEQ ID NO: 132808 - DNA, 467 bp, Homo Sapiens
  misc_feature (128)..(184): n is a, c, g, or t
  misc_feature (315)..(349): n is a, c, g, or t
  misc_feature (369)..(401): n is a, c, g, or t
tttgtcttttcaatttttcatagaagttggttgtaacttgtaaacatgtttttaaattaagaattaagataaagtgtagtacccgttccgttacaaagtgccaagacttctaatgtggttggttgccnnnnnnnnnnnnnnnnnnnnnnnnnnnnnnnnnnnnnnnnnnnnnnnnnnnnnnnnnattgcttttgtgacattggaatttgtggattttctctctctccccccatccctgccatcaccagaccctggggttcctctgatcgtgactctgtttatcccacactgttgcctgctcctctgaggaaaagnnnnnnnnnnnnnnnnnnnnnnnnnnnnnnnnnnnaattttgtttttaaggaggnnnnnnnnnnnnnnnnnnnnnnnnnnnnnnnnngaccgcgtatgcggccgcaagcttattccctttagttgagggttaattttagcgttggcacttggc

SEQ ID NO: 132809 - DNA, 566 bp, Homo Sapiens
tttttttaggtttaataattattttaattacaaatttccaccaattcttgccagtcatattattgtggatatcacaaatgaattatataatagtatattaccttatattcatctgcatgaaacttaggagaaaggagagcagaaatgtataagtttctgagaatgacaccataaagctcatatttacagtatggtagtctgtaaacatacaggcctgccagttaaagcccactcttctatcatcacccagctgcatgaccctgagcaagtcacttttgtttgctaatttttaatatcatctatcacctgacttctctatctacgagagttaactggctgcatgcaaaataccatgaaaaataccatgcacttttaagtgtgaagtagcactgtaaagtgacttatatattactggtctttctatttttagagtattaatattcatacatcagttaaaagtcaacatgtgtttgctaagtgatccttttgaaaggatccctttaaaagttcctaggcatcagcttcactgacaatctggtatgattctgaagccagcacctcgtgcc

SEQ ID NO: 132810 - DNA, 786 bp, Homo Sapiens
ttttgatagaatattgtatttattaatgtggagctctttgtaccaaatataagtttaaaaatcaggttatcaaagagtatgtatgatacaacgcttttttaataaaataaaatacatttacatacatagtcactatgccacaagatgttaagaatagttttctctagatagtggccttacaggcaatttttatttggggtgtgtgtgttttactcaataaatatttattacttttgtattcagaaaaaacattaagagaatcataggaaagtttaactaaaaaagaaaatctttaaaatatcattaaattatttaacatatccttcaagtgagattgtttccttttgctaagctatattttgtaatctccacaacaaacatgaaatagtaaagttgacataaaaaaacttgcacagtaataggaagcagtgtttacattttgccaccccttacattttgaagagggaactcatattcttaaccaagactgtttcttatcattattcaaaggtacctacttttcctaaatattgcaattaaattatttgtacttaagaaagcagtgtattgtaaaggaaccagccagacctgggttaaattcctaattttgccatttaactttgacataaccacctaaacccaatcaaaaaacgaaaagtataggtactcaactgagccagtgaacagaatatttagtccaggtacacaccaggtagttccaatttaatactcagcaaagtacatatcccctctatttacattttgctcatttccttttgatattcc

SEQ ID NO: 132811 - DNA, 1364 bp, Homo Sapiens
  misc_feature (1237)..(1272): n is a, c, g, or t
caaattttaaatttttattaaaaatcacagtttttaaaaatgtccagtgacacaatgtatctcttctgaaatgaatggaaaacacaacacactgctaaccagtggagggagctctctgcagggctgggagacctgacaatgcagctgtagcctctgcaagtgaaaatccaggccgacttgcagtcattggactgatgtccaagtgcaatcaccatacagcagctacaggcagggctggctgatagggagtatgggagaaggacacgctcagatgaaaacatgcatgcaacgattttcaccactgaacacactgttttctgtgatagaaactgtcggccctgctgggggacaagatattcacggcctcactagccagtgtgatgccaccagggcagcctgcccctgatgctcctttgttacctgctaaagaaggaccataaggtaaaaggcaccttaccttatggagtgagcccagaccccagggaaaagcttgggtagaacaatccaaggggcagcctgggtgtgagaatccagcccaagctagctgctctagaagcctggaggcctttcccagcttcccaaatgtagcccttttcacatgaccaatccttcaattaggttacctttctctatttgccctccttggtggctacaggggaaaggataattattcctgaccacaagacacattttcactagaaaagacttcctcgtgctggccacagtgggaattctgcacacaggtgcctgctccaccaagcagagaggtctcaggagattgtccagggacaaggagacctggccggacctctgcagggaggtgaggcccctgcccccatcttgtcccatcacattctggatgtttggcatccccaggctcctgggaggggagaagtgctgataaaaaggcccaaaatcacacagaaagaagacagaaaactccacgcacttcctacataggtgctaccgtattcctacgagcacggggcctgtgttgaagactccctccggaagttacagaaggaagccaccaagagttcagcctcacagcctctttctcagatgcagtcaccactttaccaacttggcacatccaaccactcctttcataattttacacctctttgtggcctgcctgacagatattttgtcattgatctttctaatttcagggattctaaatgtacccgaccgtaatggccgaattcccgggcatatgtccggtaccgtcgactgnnnnnnnnnnnnnnnnnnnnnnnnnnnnnnnnnnnntccgcttcctcgctcactcactcctgcgctcgtcattcgctttcgacgagctagcccctatatgatcgattagtcttgtgctctcttccgca

SEQ ID NO: 132812 - DNA, 675 bp, Homo Sapiens
ttttggtgtcacatccatttattgtccatgaggctacagctccattctcagggccaggaatgggcaagcctgcccagtgtgccattcctgcctcccagctctttccctggaggcctaccatggtgccagcctggagctctgcctgtcctactgggacctagcagacagccccttggcccaccattcgtaacacagggacttggctggcctcaccccactggcggggtctcctccagtgctgacaacacttgccggtgccttaagtttggctgcaccctcctcctctttcctagtgtggctcatgctggctaccgggcacttccccatccatggccagtttgcaagattggctctgccttggtccaagttcctggggttgtccaagagaccaccctcggtcccggatccacttgcaagcccaagcttccagcctagaggtctttaggacgcctgtctgagagacgacagtgcttcccaagctttcatgcccaccctaggcctcccaattcctgcccttgccgggctgcactggtagggtgggagagtgggcaattaattctagctccaggttccattcctctccatgcagccctgcctgggcttgtcctgtttgggagaaaagtccagtagacaaggcctgcaaatgtcctgctgttcaagatatctgcatggcaa

SEQ ID NO: 132813 - DNA, 605 bp, Homo Sapiens
gtttctagcctgttcagtgtacagtttattcaaggctacatgcttttctttaatgcttctggctatgcattttctctttttacatataggatttgggattgggggtgggttggatgtttttgtttggggacttatttagtagtattgagtctcttatagccctactcttaagccttcaatactgtccactctttatattcctttacttgcagaatttataaaagcccccaaactgcatataatatgagcctttaaaacatgggtaaaactaatcccattgatgggtttggatggtatgttaagaaatggagatgctgcagagcccaacgtaattttttaaacagcaagttttccatctccctacgaatcctctgaagcttttacccaagccctttcttgcctctccagtgctattttccttcagatggaccttaaacataatttcttggacactactagagagacttcgaggcaataataaaagatcagtattaaccagctataacagaggtttgatcatgcttacttgtacagtttttcgcccgttttaaaaaggaatgtaataaaatttgttttttctatagaattaaataatattaaaattg

SEQ ID NO: 132814 - DNA, 771 bp, Homo Sapiens
cgggccccgggttattccttgaggaaaacaggtttgggcccatgttccgcttggcctatggggggcccgcgcgcccaaaagaaatggttttagaaagcttttttaaggggcggaggcgggcggacagggtattatggtagaaggggggggtgaggggatttcacacacttagcatatgcaattttaatcaaccaaaagaaaatcccaaatgtacaagtgaaaaaaatccaaactgttgacacaggcctaactaatatcagctacttttatgtacagctgtatagttcaaaaaagctatcctatatgtatatacaaaagttgtttatacacaggtctgtacataagggtctatacatttatttcctcagaacccttaggtgccacctcttggtgaggacaccaacacttcattcacatatcttacaaaaaagaaagaccatttccaggattgacaacattgtgcatcctgtattcagacaatgtacactccactcgactggttaagatccttccatcataatgcggaccacaccagatgcatgggttccaccaaacagcttcacacagagtgctccaaagtaaaagcccataaaccaacccgagatgaagcagggtcctgcccagtgtgccaccacaggtccgggcttagttgagtctgcctgccctgctcactgtcggtattccaattcatctacactgataactttggcgggcatggagggcaggggttgctgtagcacatctgagccaaaccatttggcaaggccacag

SEQ ID NO: 132815 - DNA, 180 bp, Homo Sapiens
ctcacacacagcaatctttattatttatttatttgagacggggtctcacattgtcgcccaggttggagtgcagtgatgccgtcagctcgccgcaggcctcaaactcctagcttaagccattattcccccttagtatccctagtagctggggctacagtcacatgccaccatgcccagttt

SEQ ID NO: 132816 - DNA, 409 bp, Homo Sapiens
cagatcagaggccctggcctggggtcagtttctccagaaaggcctgcacaatggagttttcatgtaaaaaatttcttacatcctgattttaaaaaatcagatgatcaggaaacattgagttccgattcctttgttacaacctccactaaagctaagtaacagctgctgtattaagatggggctccccctctccatcccacacctgcctcccttacatgcctaactcctgttgtaaatagggaccctaatctgatgtttttgtagtccctttcctaggggcactgtggggaggtggaaggaatttcacctttgttgttggacagacttagatttgagaactggttctactacttactgtttgtgtggtctgggacaagtcacttggtccaagtaagcttctgcatctgtt

SEQ ID NO: 132817 - DNA, 2108 bp, Homo Sapiens
  misc_feature (45)..(45): n is a, c, g, or t
  misc_feature (90)..(90): n is a, c, g, or t
  misc_feature (828)..(842): n is a, c, g, or t
  misc_feature (1213)..(1293): n is a, c, g, or t
  misc_feature (1478)..(1514): n is a, c, g, or t
  misc_feature (1576)..(1586): n is a, c, g, or t
  misc_feature (1732)..(1732): n is a, c, g, or t
  misc_feature (1996)..(1996): n is a, c, g, or t
  misc_feature (2064)..(2064): n is a, c, g, or t
tgggatgtagcaccccaaagtagagctttctgctctgctcctggnaaaggctagggagctggggctggggctcccctcccatgaccaggnagtggtcaccccatgggacaggcacagctacttacgcgaacacagcaggttggtgttgctggctaactaggacctctcgaaagtctctgtgggggcattagggagaaaaggccatttggagaattactgcctttactttgggactacttttatgctgataacttgggatttcttgatagtccttcacccctgaaaccccgtatttactttaacaagatttagctcttagttcttcaagtaaaattaaagtctcttgtgtaagagccaacacatgcccagctgcggatgggagctgttcctggacagccttctactgcctgggaagtgatggaacaggaactcagggtgcccttaccccctccccagacctgttccctttctttgactgacagagcaccatccaggcaaaattagagcgccaaatggttttcttctcaatcttaaagcagtatacctttccacaggctcgtctgtgtccctgccactctgagttatccagaaaccaccacctacaaatgaggggactcatctagaagacctctaaggtccccttttggctctgaggggtctctaataatccccacttggaattcagcaccgcaaggaaattatgggtatgtgagccataatatgatggccagcaggtggcgctgccttccacccatggtgatggatggtttggaaagggaatgttggtgccttttgtgccacaagttaagatgctactgttttaaaggnnnnnnnnnnnnnnngtactgatcttcaatatgaagacatgagcttttctcgcaggaaattttctttttcacagaactggtgtcaggaatcactgaagggctaaccgtgatagtccttgcaagtaagtcaaggttttatcctgattggaaatagaagacatttccggttgagagaacagattcgttggaagcttaacttttgttgcctcttaacgccaccaaattttagggtaatttgattatgaaagagtgaatttttctggacagaaaagggagagctaccaaattgtttttttcattttaaaaggaagtttaatgtccgttgtatcacaaatcagtgttaaaacaccagaactttagccaaaataaatgtcttacattacaannnnnnnnnnnnnnnnnnnnnnnnnnnnnnnnnnnnnnnnnnnnnnnnnnnnnnnnnnnnnnnnnnnnnnnnnnnnnnnnnaactacggggaaccatagcgcccccgcgattatgaaaaaaatagcttgtggggggccccgccttccgcccccctgaaaaaaattttttttagaaaccctctttgcttttggggcgccgcgggggccccccctgtgggcgaaagcgggcaaacattgggcccaaaaatgtgttgggtcttctcacnnnnnnnnnnnnnnnnnnnnnnnnnnnnnnnnnnnnngaggcgctcgtggggaatatcccctcgcccccacaattgataaaataaaccccccccgcgcnnnnnnnnnnnaacaaccacgcgaggagggtgttattttgttgtgaacaaataaatactctcccatcaataaggtggggggggcgtttctctcccttcggagaggggggttatctttcatagcgcggggcgggattttttatttctatctctaaacnaggcggggagggagagcgcccccacaggtggcgcgcggcgcgctcctcccactcatatatctgccgcacaattttttatccccggcacgtctgcctgcgcccaacctgcggttgaccacatcttatctgttctttgcggcaaggagcaacagcgtgggggcggggggaaaaaaaccctcccctattttattaaaaggctatatttcttcttccgccccccacacctcctctgggtaaaaacaacactctcactttctctaacanaaaacagggcggggattgtgatagacaagaacacctactccgtgttataaatctcccccaaccccaangggggggcgttaatccaaccacgcaacaccacggtatgtggata

SEQ ID NO: 132818 - DNA, 727 bp, Homo Sapiens
gacacattacataaatatttatttcctctttttaaaacatagctccaagtgaaatttgagagggcaaattaacaatgctttacaaagtctccatgtctaaagaattctctatgcaccttcgtaggtttccagaaagtaaattaaagaaaacaagctgaatttagcatcgtgtgatcattctgaagacctattattctaaagcatgtactgtaaaggtgaaaacttgttttgctttttaaaaaacatctccatatcaattagctgtattaaggtaacactgaggatggaataaaaaaaactgtatttcgtttgtttaattcactgctagcactgtgtgttaacagtactaaaatgcaagttgcactttaaacattcttttcctgcaagagtttacaactgccataggaaatacggatgtgaaaatctcaaaatattgttagtttaagaatggtttatatagacagctcaaagtcagcaaaggttttccagaaacctctctcagatttctgcttatagtttattgggcaaaactttgtcctatggccatggctagcaactagggggctatgaatgtaactattttatttctgcagactttatggaagatattttccagagagattgagaagttattggattggtcacacaatagtatatatacttaaattatatgcactatgatgagctagtcttaatttcttccttcttagctatcctcgtgccgaat

SEQ ID NO: 132819 - DNA, 979 bp, Homo Sapiens
  misc_feature (633)..(633): n is a, c, g, or t
  misc_feature (703)..(703): n is a, c, g, or t
  misc_feature (732)..(732): n is a, c, g, or t
  misc_feature (746)..(746): n is a, c, g, or t
  misc_feature (888)..(888): n is a, c, g, or t
agtcgtagttccaccgtttacttgttttgacaagacacagacctttcagaacctctattgccctctgtgttaaatggcagcaataaaacctcccaggattttcagggaagggggtggatcaaacaagttacaacacatgtgaaagtgtgttggaaagcaccaagtattctaacagaaaaggccaagaaacagcatgcatgctgccacttccctctcccgtgcccaaggcagacatggctatctatctcggcactgtctcaccaagctatattgatcattcagaatccctctcaacacattccaggatagttagggtgacatagcctccatggggtgaagagaagcagcaatgcaaagcagggaatgcccagggaatgggccaggtggcctgtgccgtctatgggctgggcctcatgctcagctgggctgtggctgggcttcaagaggcctttgttcccagcatcctggttagcaaccccagttcctctttcgtgcattgtggttccctgagaaaacgttaacccagcccccagcacagtcaggccagccctggggaaggcctcattcatgaggcaggaccccaggggccaagttggtgctcggtggtggcaggacccctgcagccccctgtcncactgcacactcccaagtccaccccgcgaggagcccccctgaaaaaggcatgtatcagccctctgcctgngcacgcatgtgtgggactctggtcggcanagtctttgaaagcngtctgggctctgcactcacccaggccatcgcaggatccccagcaggcagctgcacacatcacatggctcatgttgttttaggatgtgacggtccgcgttcacaacctcaatgtgcttcatcatctcactccctggaggatangaggatctcatacgtattcagaaagtaatgctatctatgtcctaagatatctaagatgttcccagcccaatgccacacgccaatcgccacc

SEQ ID NO: 132820 - DNA, 1164 bp, Homo Sapiens
ttcttcagatcgctgatcatggtgaaagtaaacaaaaacaacaacagaataagctttccccacactaatttctaatccaaagagctttactgcaattaatgtaaattgctatcaatcactgaattgactgggcaaagatggacttggcactgtccccccaaaataacctagaaagaatgctttaaacagatataatccatagagaaagagatttacatcataaatgctgggggtaaaaagtacgtagaatgacagatacacgatttggggtgagagatggcattgctccacataacacaaaagaattctgttgaagtggtcactgcttctgttgtttcgtggctgggttcttgggaggaaggagtttgtatgtattgaagtagcccaccacctgctggggaatctctgccaagacacactgagcaagtgcttcttttggagctttctggacctgtctgacaaggccacaaactggacaatatctctgatggccacttcgcccaatggggagcggagacttccaccatcaccatccagaaactccatggcgtctgaagtcagcacctccaactccaacaattatgatggacataggcagcctggaggcattaactatagcttgtctggtttcatcaaggtctgtgatcacaccatcagtaataatcaaaagcacaaaatattgagaagctgtctgctgttgcgtggctgcagcagcaaacctggccacgtgatttatgattggagaaaaattagttggtccatagagttttatctgaggaagacaagaccgatacgcctctacaatgcccttggattccattgcagtagggattggatgggttgaagttcattggaaattcatgtgatacctgccactgaggaggtatctgagcgccaaaccaaagctggaaacatcttatcagcatcataatcttgaatgaccagtcccacagaccagagagcagtcaaatactcattaacgccattggggctgatgtaatgaagggagtctggagaccttgggtcaccattggagccagtgaagtccactcccacagtaaaattcagctgacatcctcccattatatagtcaaggaatgtgcattctactgtaatctcaccgacgcgtggtcgacgatatcccgggaatccgagcgcgtacca

SEQ ID NO: 132821 - DNA, 478 bp, Homo Sapiens
tttagacctaaaggagccatgctttattagttacatattctgtataacaaattaccacttgaaaacttagttaaaacaacaaacattatctcacatagtttctgttggtagggaattcaggagcttcttagctaggttgttgtggctcagtctctcatgaggttgtagtcaaaatatcagccctggctgcagtcatatgaaggcctgactagggctagagaacccacttctaagatggctcattcacatagctggcaagttggtgctggctcttggtaggaggcttcagtttctcaccatgtggatctctccataggaatgcttgagtatcctcatgaaaagtagctggcttcactcagggagagacatccaagagaacaagtcagacatcaccgtgtcttttcggatctagtgtcacaagtcacacaccatcacttccctgaattttatcacaaagaccaaccttggtatgacatgg

SEQ ID NO: 132822 - DNA, 467 bp, Homo Sapiens
  misc_feature (381)..(381): n is a, c, g, or t
  misc_feature (440)..(440): n is a, c, g, or t
gccagaaggggcatcccttacccggaggaaaatggatttattgctttataaaaaagaagtctaataaaactgaagagaaaataactaaaaatccaaacacaactcacccctctaagcacgcccaggaggtctcaagacacacttctgggggcagtcaaggtgggcgggttggtgggccaggcggacgggcctcccccgtcatcagctccagggccccacggagcccgccggcagggggtgctgtgggcctgtggccttggacaagctcctggccccacgccaggatggctcctgggcactggcccagctgcaggcctggcggctcccgcctggtcagtggggataagggctaacttttccaaaccacccgaccccacacanccctcggacccacccacgtccccaccccggcctggacctccacgtctgccggccacagnccttcgtccacctccacaaaaggcagc

SEQ ID NO: 132823 - DNA, 2180 bp, Homo Sapiens
  misc_feature (2074)..(2108): n is a, c, g, or t
tagggacagaatatcccacaagggtgacaacaatcaggcaataaattcacaaaacctatatacagctagttaaatcagtttaagaattgttcccgtcagtcacatttttttggccctcagaagttcattcctaaagatttcaactaactctaaatttctagctaccaagaagttaagaatgattataagaagctttccaaggagttatgaaatctttgtagaccagaggccaactatcatcacctcaagtctgctctcaccaacagcccttgtattttttcagggagaaatctctaggaaaaaagtcagacaccagtgtagtcactatctcccatgtcaaacctaggggactaaaatggtcagtattaccataaaatgataattttgaggtttaccttaaaaggcttattctggtctcaaaaattagataagattatcttctactgaaatgaatattgactaaacatagaagactgctgtccttttgccagtcttagagtgaaagtcatagacatgagtcttaacctactgtatactatagctaatgtcagctgaaaatctgaaattaaaagcatgctagaaatcctaaatgcaatcttttggaagtctgctattaaaaagcctttaaggatttactaacttcgagtctaagtgcaaaggggacgaaagcttaagcctgtcagacattccttttcttggaccaaaagatcaaagtttcctacaaattgctaagctttgcacaagggagaagcctacatgtactagtgcatggaatcagtttcatcttatttcatggggactcttctcccactggaaagaaacagaatgaggaatgaatcttaattggtctcttcatcagaagtggtaaacttggtctctatattcacgaagtcagacagttttttaagcagactgtggaagcagacagaaccagcttcctgtagccacagaccactacatggtatctaagctaaagcaaagatgaacaattatccagattcacttgaactgtactaaagggcaaggttcaccactacaaaaaggaagttgtctaaaagcaagaattcaattaacgctgggtaagaaaagtcaaaacactaatgagttgtccatgaagccaactgctaagaacgcgctcaactatacgcgacatgaagacactatgcacgaagccttacttggcgagtctgaatttctattaactaagggcagagtgagggagaacaaagagctacttccgtaacattttagtatccagatagtacagcagaaacggttcccggggcaatgggtgctgcattaatcacactgattaaagcagatgaatcattcgtttttcttttctttttggtttgagaagtttgtttatctccctcttggccattccaatgtacttcaaaatgattccatgttggtttagtccaggaagcaatagtaaggaagtcactatcaggtaggtgagaagcaggttgtggacttgttgtcccacccaagcaaccgcagcaagggaaacgatcatggtcatgaagtacatcttaggtttttcttcctttagtgtgaagaggcgtttccaccaacccacagctctgcgtcgagtttttactagattgctgcaaatttcatggaatctttgctgttgttcagtggtccatttattggagccaaaaattctaggcgctagaatgggaacaaggtagtcagccaagcacaaaaacataacaaaacaggaaacgccggacagaacagatggatctagatagtagataatcagaaacaccaaagaaaccacacccatgatggcaggtggaaaccaggctctttcccatcggaggactttatcagccatcagcatcacttctccccatccttgcagctgttcttccagacttgcagtctctgcagccagcaggttggtgctgcgattatctccctccgccatcgtctcggggatgcagtctctacaagcgcaggccacctccccaacgagtcctccaaccgaaacccgcacaccaaccacaacccccccggccgtaatggccgaattcccgggcatatgtccggtaccgtcgactgnnnnnnnnnnnnnnnnnnnnnnnnnnnnnnnnnnncgccgcttcctcgctcactactcgctgcgctcgtcgttcgctcgagagctaagcgcctaatgatctatacaa

SEQ ID NO: 132824 - DNA, 1222 bp, Homo Sapiens
  misc_feature (47)..(71): n is a, c, g, or t
  misc_feature (94)..(193): n is a, c, g, or t
  misc_feature (206)..(219): n is a, c, g, or t
  misc_feature (381)..(389): n is a, c, g, or t
ggaaaaagtttagccccttttcccttccctttggggccccggccccnnnnnnnnnnnnnnnnnnnnnnnnngggggccgagggggccccaaaannnnnnnnnnnnnnnnnnnnnnnnnnnnnnnnnnnnnnnnnnnnnnnnnnnnnnnnnnnnnnnnnnnnnnnnnnnnnnnnnnnnnnnnnnnnnnnnnnnngaagattccagcnnnnnnnnnnnnnnccccttttacacaaaacaaagtagaagaaataatacaggattaaaactgcaaaagtagttaatcagtagaatatgtatgcacacaaaaaatccagataggaagacaggcttatttacaatgaaagtaaggtaaaattaacgtagttttcttatgaaataatnnnnnnnnntcaaacatatgctacaatgggcaccactgttcacagcaatattaaagaggagaaaacaacacttatttaatagggacagatataccacaaggtacaacatcagtgcaataaattcacaaaactatattacagctagttaatcagtttaagaattgttcccgtcagtcacattttttggccctcagaagttcattcctaaagatttcaactactctaaatttctagctaccaagaagttaagaatgattataagaagctttccaaggagttatgaaatctttgtagaccagaggccaactatcatcacctcaagtctgctctcaccaacagcccttgtatttttcagggagaaatctctaggaaaaaagtcagacaccagtgtagtcactatctcccatgtcaaacctaggggactaaaatggtcagtattaccataaaatgataattttgaggtttaccttaaaaggcttattctggtctcaaaaaattagataagattatcttctactgaaatgaatattgactaaacatagaagactgctgtccttttgcccagtctttagagtgaaagtcattgacatgagtcttaacctactggtatactatagctaatgtcagctgaaaatctgaaattagaagcatgcctagaaatcctagatgcatcttttggaagtctgctattaagaggcctttaaggatttactaacttcgagtctaagtgcaaggggacgaaagcttaagcctgtcagacattcccggacgcgtgggtgacaaatccgggatccgacgggacgccgttttgtcacactgttctttgtcccaaagcacggcag

SEQ ID NO: 132825 - DNA, 742 bp, Homo Sapiens
gatttctgaaaacattttgcacatcttgaagggaagttgctgaataaattcctctctccgtcatctagaagctgacagcttaacccctttatcttggcagatttaagctctgaacattttgataggtgacttggctttgaagtttttccactggccatacattttgcctttcattgtatgtgaataaaatacgtatgttaaatcaaagatttagtaactcttacttaacagtttcaatattgaaatatgtgtgtgttctagtcttggtaattttttatccatgtagtgagaagtaagggtaacaatgaaaatccaaccgttgtatgacttcctggtctaatcttccttcatttgtgaaatcagtttattgagatactgtttttgccacctttgcagttattcatcatactaatcaaagtaaaacatggcgtttctaagcaaaattaacaagcattaacatttatgcccaactgttgacgtgtataggctttcctttgaaataggaggcatttcaaaaaatacacatttcaaaatagaatcaactgacttttgagtttcccttctctttctcagtagtggaggtggtaaacaatcctaggtaagtagataaaagtgcagccccagaaagaatgaagaggaatcagagacaggaaaataaaaccctcagtttgtgtaactggcctggttgataaagaattggattacagtgggatgccatggctcatgcctgtcagctttggga

SEQ ID NO: 132826 - DNA, 1041 bp, Homo Sapiens
  misc_feature (838)..(839): n is a, c, g, or t
  misc_feature (882)..(883): n is a, c, g, or t
  misc_feature (885)..(885): n is a, c, g, or t
  misc_feature (890)..(890): n is a, c, g, or t
tggagcaacatgctgttttaatgagagcctgggtgctggcgggctgaggcctaaaacggcgtcagccccaagtgaggatggggcaaaggttttatagtctcctgtaaacaggaagtgtcctggtctgacgtaactgcaacgttgtacccagatggcctctttctccatcttcagaggtacttgtcttccggctggctctcttcctgcttttgctatcttgctggcgcatctgctcacgcacgctgctgatgcaagcggccttgcgccctggggctgggcctgagaagggaggagttgctcaaccccttaagctttcaggccctggagagaatcttacaatatcagaagtgggattcacatagcgcttcccgtgaccctccaggaatatcaagtgacccagcaaggtactgtaaccaccctatgggttcattttgccccctgcccaggtagagacaatttatcaagacaggaaaattgcaatagagaaagagcttaattcatgcagagctggctgaacagaagactggagttttattattacccaaatcagtctcccggaaaatttggaagccagactttttcaatgatagttggggaaagagaggggaggtgactaggcaataggttcttgctgctggttggttgggggtacaatcacagggatgttggagatggtcctcatgcacgctgagccacttctggatggggccgcgggagtggttggcaggtctgggtggagccatcagtcatcagacaagcaaaacttgaaagaatccgaaaggctgatcgtggttctacactagtgatgtgattgcaggagtattggggagttcatgtnnctgtgactcagattatggcacgtatcatttatgtctaacttannanaacangctctccaaccctttacttgggggccccactagcttaaattgttgttgacttggatacatactatccatttaacgatacttatgtctccaaagtacttggccagctcattaaatgtgcgattgattggtcagatatttccctgccattctg

SEQ ID NO: 132827 - DNA, 540 bp, Homo Sapiens
tttttgttttcaactttttattttgaagtaattatagattcacaggaggttgcataggaggttgtctagggaggtcctgggtacccttgccccagcctcccccaatgttaacaccttatacactacagcacagcatcaggacgcagaaattgacattggtacagtctacagaacatactcagtttccccagttacatctgtactcctttgtgtacctaactctacacaattttaacttcatgtatagccctgtgtaaccaccagtcaggctgacagatggttttcaacaccacaggactccctcgtatgaaccaccccctcaccatccctaacctaaacccctggtaacctttaatctgttttccatctctataattacattatttcaccaatgttacataaatggaatcctgctacatgtatgttttcaagattggctgtttttgctctgaagaatttccttgagtttcatctgagttgctgtgtgtacagcagttactgaaaatggcactatatcacatacagtacggatacatattg

SEQ ID NO: 132828 - DNA, 1094 bp, Homo Sapiens
accagtaactataacggttctaaggtagcgaggcctgggtggcgaattcggcacgaggcgggcccgggcggcgcgcgatcgaggtcgggtcgccgtccagcctgcagcatgagcgcccccagcgcgacccccatcttcgcgcccggcgagaactgcagccccgcgtggggggcggcgcccgcggcctacgacgcagcggacacgcacctgcgcatcctgggcaagccggtgatggagcgctgggagaccccctatatgcacgcgctggccgccgccgcctcctccaaagggggccgggtcctggaggtgggctttggcatggccatcgcagcgtcaaaggtgcaggaggcgcccattgatgagcattggatcatcgagtgcaatgacggcgtcttccagcggctccgggactgggccccacggcagacacacaaggtcatccccttgaaaggcctgtgggaggatgtggcacccaccctgcctgacggtcactttgatgggatcctgtacgacacgtacccactctcggaggagacctggcacacacaccagttcaacttcatcaagaaccacgcctttcgcctgctgaagccggggggcgtcctcacctactgcaacctcacctcctggggggagctgatgaagtccaagtactcagacatcaccatcatgtttgaggagacgcaggtgcccgcgctgctggaggccggcttccggagggagaacatccgtacggaggtgatggcgctggtcccaccggccgactgccgctactacgccttcccacagatgatcacgcccctggtgaccaaaggctgagcccccaccccggcccggccacacccatgccctcctccgtgccttcctggccgggagtccagggtgtcgcaccagccctgggctgatcccagctgtgtgtcaccagaagctttcccggcttctctgtgaggggtcccaccagcccagggctgatcccagctgtgtgtcaccagcagctttcccagcttctctgtgagggtcactgctgcccactgcagggtccctgaggtgaagtaaacgccggcgctgggcttggccagtcggcagtgaaaaaa

SEQ ID NO: 132829 - DNA, 487 bp, Homo Sapiens
gacttccttacatttccttttctattaaaaaattacttgtcttttaaaaattaattctttaaaagaacaaatgaagaatacagctagaggagctctttccatatattaaaaaccacaaatttaaagcttttaagacagcaaaaacaagacaaaagaaaacattataaggtttggggaataagcagtcttttccaaatgatctctaaactcatgctttcttaacacgtttggcttaagtcatcaaactatggtcaagcaggcatggggccgttgcccttaagggaggagataagccatctttcaggatggtcctgattcactttcctaaatctactctaaaagtaccaattgaggttcctttgtgtatcctcctcctaccactggtgggttctttatattttgtccctggtagcctataaaatgggtcagaactgtacgttttcaatgtcaaggaaactccattgacaaataaaaaagttatcatttt

SEQ ID NO: 132830 - DNA, 1462 bp, Homo Sapiens
  misc_feature (169)..(429): n is a, c, g, or t
  misc_feature (432)..(468): n is a, c, g, or t
  misc_feature (1350)..(1384): n is a, c, g, or t
aagggaccccattccaccctccaaatttcccaggagcccatggaatcacctctggttttcccccatgacctttttccataatcctttcctacttctgtcttcccaaccaatgacacagaactgaaaacatcctttaaaaatctcatctttggctaggcacggtgctcannnnnnnnnnnnnnnnnnnnnnnnnnnnnnnnnnnnnnnnnnnnnnnnnnnnnnnnnnnnnnnnnnnnnnnnnnnnnnnnnnnnnnnnnnnnnnnnnnnnnnnnnnnnnnnnnnnnnnnnnnnnnnnnnnnnnnnnnnnnnnnnnnnnnnnnnnnnnnnnnnnnnnnnnnnnnnnnnnnnnnnnnnnnnnnnnnnnnnnnnnnnnnnnnnnnnnnnnnnnnnnnnnnnnnnnnnnnnnnnnnnnnnnnnnnnnnnnnnnnnttnnnnnnnnnnnnnnnnnnnnnnnnnnnnnnnnnnnnntcatctttactgaaccatttcataagctctactttatttgtctagttggatttcatttcttctggaaaatttattgtttattggcatgtgacccttgactgatggcttcattagcattttgtttttctttttggatccttaatagaaaactcaattctgttagggatttccaaataggatagggcaaagtcgcacttagtatatcctccacagaaagaaagaagcaaaatcaagccaagagggccctttacttgtcctcttgctaagttaataaatagactggtggatggtggtagatggagaaacaaaaatgtaagggcagagaagggtccaaatggggaggaagaaagcaatgacagccaggctgtctggctcattcctgttcattcacatgcagaccacccatgatctggtcttcaaatttcttctgaattccaccccactaaatacagtagcagttactactttaaactactactaaagcacttgttctccaaatgacctgagaaatccccttgcctcagctctgggacagtagttcctacagctgtagggaggtctgttaatgcacctggctgaacaggaggtacaagagtaagtaccttctctcacttggtggaacaggccaaggagatcccccaagtacagcatcagcttcaccctgtgtaccttcctccagcaaaggaaggcctggccacaagagggctctggaatgaaggcctgaaattcagaagctctgccttgagataagaaccaggaaggggcaggaccaggcactgggaaccagccccaggttgctgggaacgcaaggctttgaggcattttcctgtccccggccgtaatggccgaattcccgggcatatgtccggtaccgtcgactgnnnnnnnnnnnnnnnnnnnnnnnnnnnnnnnnnnncgcgcgcttcctcgctcactgactcctgcgctcgtcgttcgctcggcgagctagcccctatatgatcatatgcagtct

SEQ ID NO: 132831 - DNA, 2243 bp, Homo Sapiens
  misc_feature (79)..(88): n is a, c, g, or t
  misc_feature (113)..(127): n is a, c, g, or t
  misc_feature (135)..(141): n is a, c, g, or t
  misc_feature (143)..(265): n is a, c, g, or t
  misc_feature (1197)..(1197): n is a, c, g, or t
  misc_feature (1250)..(1250): n is a, c, g, or t
  misc_feature (1270)..(1270): n is a, c, g, or t
gggggggacccaacccccttgttctggccccggtttttttggggaaaaattaagcccgggttccttctcccttgggggnnnnnnnnnnaaaaaagggtttaaaaagttttttnnnnnnnnnnnnnnncccccccnnnnnnntnnnnnnnnnnnnnnnnnnnnnnnnnnnnnnnnnnnnnnnnnnnnnnnnnnnnnnnnnnnnnnnnnnnnnnnnnnnnnnnnnnnnnnnnnnnnnnnnnnnnnnnnnnnnnnnnnnnnnnnnnnnaaatggttctttattcataaacttgatgcaagtttacaaaatttactgtacattgccaaataaatctgcaattaaaaataaaatccattaaacaaagcatgccaaatgtgcagctatcagtctgcttgccatcaggatattaaagaattcaacaatgtattcaagatttagccttaggcttaaggaactttactgatttaaagaattctgccttgtcacttgttatctgagcaactggcaatcagaactttatacaaatgtaatcaagtgaacaagaataccagaaaatctatttactgctctcttaaccaaaatggaatcaaaagaaattaaacacacacaatgtagaaatgacaagtctctcagatgtggtttacaaagttaaaaactgaatctcaaagctaatgcacaagaaacacttttgaactttgtaacttgtttgtgcagaaaaatgtgcttctggatttcttgttaaaagtgcttaagaactagaatttacttttaaatcaaacgtgggtgtataaaaaaatctattaccaaccaaaaaggactgattcaggtaaggcaataaaatggagagtaccttgatttgagtcaggttctataaaaaaattaacatatgtagagtttctattaatctttcaatgtaaaagccattgttttgacatggcaaaaattactgtaagagtctccaaattaagtatctttttgtacttaactgcacagcttttgctcaaggagtctttgtgccaatcactttataagtttattagtttacaaacgattgcaacatcccgttaataaaatggaaacgtaagatgacttagtattttaaataacttgaagctctgtactgtggctcttgttcatgaagaaacactgaaccaacaagcagcagattcagcccagccaagactctgatgccccagtgnaaatcactactcacaagccttaattgatacagttttacactgctttgcctaanaagtacaatacaactcaatnaagagtattatcttcaggaaacaattcatatcttcacatagtcattaaaaagtttaacaatttaatgagtaggtttcctatcacattttggcaatatcataaaatggttttagacatgaaagagctattatgatttagaaggccttaaatttcctaaaccaatattgaacatcgattaaacctgtattggctgtaaatggaacaatatattgcaaatccttgtaacccatgggctcaatataggaaagttaccctaaagcctcaacttcagtagcctgatgttgacttggctgctttaaaaagttcacttttcaagaaaaagagataaggagtggccagtatgtgtatttatcaggaaaaatccagtaaaggccccactgctcagtccaagatatctaaaatgagcaaaatgcgaaggctgtaacttatactggatgtcagatgacagattatccactaaaatatctattaactaacatcttcggtactgctgtaataggggcactcaaagcttttgtctgcatgttggaaagattttctttaaagcaacattagtccaaacatacaacagtcaacatatttagccatcttcctttggaggggtgtaccagccatttttctcatgtatctgtacaatggaattataggattgttgggctcttgctagattatattgattcttatttgctccaaactgcactctggctttgcctttgactaaggtggcatttatttgcatgatgaccgattctattgagtaggcactgctccagccctgttttgtgagaagttccatacataatgctcctccacccaatacataccctcctgagagaacaggtaacaccactcgaacaaatggaggatcaaatggaaagttatccttaaaagagaagttaagcaaaatatattctatgccttctttttcttttaagatctgaagatcactgtgcaaaggactatcaggggcaac

SEQ ID NO: 132832 - DNA, 1057 bp, Homo Sapiens
  misc_feature (54)..(54): n is a, c, g, or t
  misc_feature (134)..(134): n is a, c, g, or t
  misc_feature (142)..(142): n is a, c, g, or t
  misc_feature (148)..(148): n is a, c, g, or t
  misc_feature (170)..(556): n is a, c, g, or t
acagttcgtagcgcagtcgaacagagaccagaggagtccaggggaacgctgatntatatctgtcgttcgccaccttgatttactcgattttgatctgtcaggggcggactatggaaaacgcagcacgcgccttntacgttcntgcctntgctgcctttgctcacatgtcnnnnnnnnnnnnnnnnnnnnnnnnnnnnnnnnnnnnnnnnnnnnnnnnnnnnnnnnnnnnnnnnnnnnnnnnnnnnnnnnnnnnnnnnnnnnnnnnnnnnnnnnnnnnnnnnnnnnnnnnnnnnnnnnnnnnnnnnnnnnnnnnnnnnnnnnnnnnnnnnnnnnnnnnnnnnnnnnnnnnnnnnnnnnnnnnnnnnnnnnnnnnnnnnnnnnnnnnnnnnnnnnnnnnnnnnnnnnnnnnnnnnnnnnnnnnnnnnnnnnnnnnnnnnnnnnnnnnnnnnnnnnnnnnnnnnnnnnnnnnnnnnnnnnnnnnnnnnnnnnnnnnnnnnnnnnnnnnnnnnnnnnnnnnnnnnnnnnnnnnnnnnnnnnnnnnnnnnnnnnnnnnnnnaagaattcggaacgaggggtttggctatcctttaatccgataggccatttgcgcaccaagtggtcaaacaccgtttcaaatgaccgggtgaacagcacttccaatgtggtgtgccaccaagtggctatctttaaccccacaaaacttgcacatgtgtttgaaggcaggcaccaaatcagtagcacatgaactctactgtgttaagaggccctgcagggtaggactcacagtggactttaaaggggtaaggctgcacaaaatagagaaataaagagcatgaaaataaagccgtgctaagaaacgacgtgcttaagaactgagatttggccctggaaatggggagggttaacagatcaccttggctgtgaactgagactgtcttgacagttcgagactgtcagagagaagctgacagtttaacaatccagatgcaaaacaagacttttgacacaggacaagaggttaattctagggtaatatttgcagtttagctttatgggt

SEQ ID NO: 132833 - DNA, 979 bp, Homo Sapiens
  misc_feature (446)..(838): n is a, c, g, or t
  misc_feature (852)..(852): n is a, c, g, or t
  misc_feature (858)..(858): n is a, c, g, or t
  misc_feature (861)..(861): n is a, c, g, or t
  misc_feature (866)..(866): n is a, c, g, or t
  misc_feature (911)..(911): n is a, c, g, or t
  misc_feature (925)..(925): n is a, c, g, or t
  misc_feature (961)..(961): n is a, c, g, or t
tgacgactgcacccagcccaaatgagatgtttctaaatctaaagtttcttctgcttctgcatttctgtgaatctcatttgaaatttttcagggaagggattttatcatttgttcagagatgtctttatttttattaatacccataaaacgtttgtgtatttgcttcttcctctttctccttttgatcacattttagctacttatctagaggatctctggccaagtattcccttttattgtattgataacaattcttaatggctggcctctcttgtgtacaatgagccaatattcttttttgttctatatttttgtatcttcccctttcctgaacaaagcatatttagagtctcaaagaaatcctctccacaaagacatgttcctccctctggtgtgggtagacatagggtaagagtttggatgaaaccctcgtgccgaattcttgnnnnnnnnnnnnnnnnnnnnnnnnnnnnnnnnnnnnnnnnnnnnnnnnnnnnnnnnnnnnnnnnnnnnnnnnnnnnnnnnnnnnnnnnnnnnnnnnnnnnnnnnnnnnnnnnnnnnnnnnnnnnnnnnnnnnnnnnnnnnnnnnnnnnnnnnnnnnnnnnnnnnnnnnnnnnnnnnnnnnnnnnnnnnnnnnnnnnnnnnnnnnnnnnnnnnnnnnnnnnnnnnnnnnnnnnnnnnnnnnnnnnnnnnnnnnnnnnnnnnnnnnnnnnnnnnnnnnnnnnnnnnnnnnnnnnnnnnnnnnnnnnnnnnnnnnnnnnnnnnnnnnnnnnnnnnnnnnnnnnnnnnnnnnnnnnnnnnnnnnnnnnnnnnnnnnnnnnnnnnnnnnnnnnnnnnnagcaaaggcagcanaggcangancgtanaaggcgcgtgctgcgttttccatagtccgcccttgacagatcaanatcgacgtaatcanagtgcgatcggacagcttaagatcagggttccctgnagtcctctggtctctgtc

SEQ ID NO: 132834 - DNA, 1029 bp, Homo Sapiens
  misc_feature (719)..(861): n is a, c, g, or t
  misc_feature (894)..(894): n is a, c, g, or t
  misc_feature (904)..(904): n is a, c, g, or t
gacttaaaatctttattagtggaaagaaaagaatattaataaaaggctaaaccactgcatcttgcatccctaaaaggattattttaaattcaatttttgcactgttattattaaagcagttcactcaaccagtcactaggtttgaactttgatttgaatcgaggtttgcagggcttccatcaaatctctgctaaatccagcttcggagaggagcagttaagtgtaactgcagccaaggttagaaaccttggctcacaacacttggccttgaccagcaggtaccaatggcaattctgtacactgaggactagccagggccagaagaaaggaagttgaaattagaacaggcagatttcaatctaatatagagaacaaattcctacaggaagcaagaggcctaataagtgattagagaaatgatcaaaacctctggagggattacaatcaggataaaccttccctgatccctgaagttcttgaagactgtgtctggttcatctttgtagctccttttagtacctaacgcatactgggtactcaaggtatatgtagcagattgagttagaacaagtgtggagaataggcctaacttgtaatcttcatgagggcggggccatgtctttctagttcttcactgtctgctcaggacttagcatagtcgaagatgcttagtagtagtctccatccctatgtttcctcctcgtgccgaattccttggnnnnnnnnnnnnnnnnnnnnnnnnnnnnnnnnnnnnnnnnnnnnnnnnnnnnnnnnnnnnnnnnnnnnnnnnnnnnnnnnnnnnnnnnnnnnnnnnnnnnnnnnnnnnnnnnnnnnnnnnnnnnnnnnnnnnnnnnnnnnnnngctactcacattattgcgttgcgctcactgccngctttccagntcggaaactgtcgtgcagctgcattatgaatcgcaaccgcgggacaggcgttgcgtatggcgctctcgcttctcgccatgaccgctggctcgtcgttcgtgcggaacgtacactcatcaagcgtg

SEQ ID NO: 132835 - DNA, 1057 bp, Homo Sapiens
caatgtcaaatgcactttactgggcccctgggcctcccaacactgtcctcaccaaggctggggcaccccattcccagcaccaccagctgcccaggaagcaggacggatagagggaacacatgtggaatggctgttctcctaccccagagggtgccggatgatgttgacagcacggctgcttccctctcccctgcagcttctgtccccacccagcagcttggcctttcccatagcagggaagggggatacctggggcttcataccagccacctgctcctgcttaaaatggggcaaggggccatttgcaaaattcttccgaggggcaagtggtgaggtagaaggggtggcagcctgctcctgtttgggagagggctggggcagacactgggagcctggcagacactgggagccgggctggctcttgcttcaggcccagagccctgggccctgctcgctgaggaagctggtggttggagcggcgaggttcagccagctgaggctggagggagtactgggtggccaggaggggtagccagtccaactcggctctcctcagcacccccagccatgggtcaccagtcccgctcagcaggttctcggtaggggaggcctaagagcctgaagacatccttctcagtgggagtgggcagcactcgggcaggccccaccttgcagccatgggtgttccgggccacagcagtgctgagggcatgttctgacagactcatgcccttggttttggccagggctcgcatggagcggttgaagtgtgcagagccggtgaagtagagcagggcacaggcaaactcgctatagggcaccacgatgatgtccaggcgccggtgccgccgccctggccctgggagccggcacacccccaagtacttctgttgctgaccattctcctcttggctcaccaagtcatctgtgaggaacccttcctgccgaagactgtcaaggaggcggctgaagataccccggtgggaccggccatctgggtgagtgatgagcacgtcgacatcaccacaggtcgcctttccccgtcgcccacgcgtcc

SEQ ID NO: 132836 - DNA, 596 bp, Homo Sapiens
ggaagaggagccactgatggagatgcggctccgggatgcgcctcagcacttctatgcagcactgctgcagctgggcctcaagtacctctttatccttggtattcagattctggcctgtgccttggcagcctccatccttcgcaggcatcttatggtctggaaagtgtttgcccctaagttcatatttgaggctgtgggcttcattgtgagcagcgtgggacttctcctgggcatagctttggtgatgagagtggatggtgctgtgagctcctggttcaggcagctatttctggcccagcagaggtagcctagtctgtgattactggcacttggctacagagagtgctggagaacagtgtagcctggcctgtacaggtactggatgatctgcaagacaggctcagccatactcttactatcatgcagccaggggccgctgacatctaggacttcattattctataattcaggaccacagtggagtatgatccctaactcctgatttggatgcatctgagggacaaggggggcggtctccgaagtggaataaaataggccgggcgtggtgacttgcacctataatcccagcactttgg

SEQ ID NO: 132837 - DNA, 1742 bp, Homo Sapiens
  misc_feature (36)..(36): n is a, c, g, or t
  misc_feature (816)..(826): n is a, c, g, or t
gaattttacggtatgtgtatttctccaaataaagcncaataaagctattactcaacaaagatgacagggctttataatatacattttagagttgtttacttttattaataaaaagttagatcacttatatatatatacattgaaaaaaactattattgtccctttcctggtgaaaaggagtatacacaacagacctttgtgatattctgcaacaatgacccatattgctgtggaattctcactttttagtagaacctttaaaaactcaagtgagctgtacaacgccccgattgctttaactccagtgaaccacggaggtataaagacgctagagttctttgtaattcttcagtgccaaaaataataaagttggaaacttggattcctgtttgactctactgtattaagtgatcagaataaaattactgtaaggctaatcttcaaccacttcatggttttcattcttgctttctatagtgaacatctgttgtttccacttgctctaaacccctttccttttgggattcagcccactactcatccatgtgattctgacaggagttagcaatgacagtgcagatagatagcccaggcctggccaagatcacaggcccccatcccctcttccacagggactggtccaatgcaagggcaggtgatcctgggaagaccagagtccttttatagatttgatttgtggaccctgaaaaaggaagttctctctctcccttttgaatcatggataataaggatgtggacttggagctgacactggcccattatgtagagcgggccagactgaaaatgtaaccaggnnnnnnnnnnngtccgaagatgatggtaaagagcctgggcaacacaatctggggcctagcatcagctatgcctgtggacgctattaaagtgctgaggttattacttcagtgaatcagagcacaaatgaagtatttcttctcttaaggaatcaaacacaattcattttagaactagacaggaaaagactgaactaaagaaaaagttttatcctaaactttcccacagacaccttctggataggctgcatgttatcgactgtgtcagtcaaatcagtggcctgtactaattgggtaattcaattgaagagtcaagtttgcaaataacagtctttccattttctgtgctttagaacaattctcaaaacacatttattatgctcccaacccatacctgttcaattaggtttttcttctaaaaataacttggatcaagagaatcatttactttatacatattcgaaaacaactcatccactttcttcagtgttccacggaggggaaatctggtccaaccaaacagatgtagtaaaaagtatgtttcctgttttggcttctttgtgttaatgaccagggaaaatatttgttgttttccatgttggcttcaacataatgcatcaatatccttttcttcctctgaatcttgccctgttatccaacactgatcttttacactcaaaaaatgcgtacttcaaagagttgcagtatccttccttcaaacactgccgaggtgattttccttcctggaccacacagtccgactgcagcagacacgcgcccaggtcctccttcaggcccgcgcacgcgccgccctgcggcttgtcctcataatacttaggcatgacggcgcttcccctccgatgcggacgcgactttctcccaccgcaacacttgcaaccgggtcgggagcgagcgaggccccagtctccc

SEQ ID NO: 132838 - DNA, 2044 bp, Homo Sapiens
  misc_feature (1071)..(1087): n is a, c, g, or t
ggatcaatttgggctgattttttataagtcagctaaagtttttaggaaacccacgataggtgaaccagccaggtgatggcccatgtaccagactttgttgcttgaagctcttggtgtgccctccatggccgattttttcaaggcctccctaagccccaattccctggattaaattactggagtatacaatgccaacctgagctatgaaaacacagactttgtttcagaagagggtaataaaggcacagaaacctggccaacgtagatattttgttgtccataagaatagtatggttgattaaaatagtttatcactagtaaaacttgtatcactagagcagacaataccaattagtttttttaaaaatgacattcactgaattcttggtctgtgcattcaatgtgaataatcatccaaaatatattacaattaaaggtttgtaaggagctctgtctgggatttctgcagtatacttatttcggaggagaagaaccaccataaagtatgagctatccactgttcctcttttatgtcatgtatggtaatcagtctatctcctaatgcaggctcacgaacttccacggtgagatgtctaagtgacttagtgaccgttcacactcattaaaggcagccctgtccatcaaactccatacctagaaagttcaataaactgtattacattttaataaatagtttctgtgtactttttgttttttgctgtttaagctcagcttaaattttgtcaaggaaaccatttcacaagacagtatgtcacagcctactatcagcaatagtccttgtttattagaatctgcagatgtccatattacatcaaatataaatatatattatatttacatttccttcttagctttcaatttaggtgagtgtatttatagataatgccactaacgcaccactattctaatcctcagtgcaactcataccttctttccattagatgctcattaatgtaagacagcatcttaaaagaggggtactgttcttttttaaaataaaaggaaagaaagggaatccaagaatggaggtctagacatttcctaagagannnnnnnnnnnnnnnnnatacttagaaatacttgaaaaatgtggtccctttttgtagtactagtctctacttggggacaagaaaatagaatatgcaactcagaaaggaaagagcccaaagacgagagaacctgcttgttagctcattaacctgtttagtaaagatctgctttaaaatgcctgatgctgtgcagtatcatacaaaacaatcttcagccttcaaagcagctgatgcaccttctcagagatctgtttgtctgattaacagtctgctgccttggtgggccttggtcttggtcactttcggtcatcgatggttttaatgaattctactgctgctgtgaactgcatccaccaataggactcctctccagacagacagctagcataaaagctactgatatactgcacagtagacagcaaacagggtggatttgcctttatcaacacaaacaccaacacaggaacaaagtcatccgctccagggacagagtcctcattggccaggctcaggaggttcataatcgtagagcacattctcaggatgcactgcactttgtcccggggggttttataagcacttattgtcctgatttctgattgtgcagatggccatggtgcttctcgaagataaccctttggtatctgaaggagctctgtgatttgcagtcactactttagacaatctctggatatgttcatgaagaccctgttcgcgaagtatgtccccatcttgattagggtagaaggcgagcttgaaaatccggttcatcacgcttcgctcaatggccagctgtgcatcttgaagctgttcttcactcgcgttttgccatatgacatcctgggccattgcaccataaagaaactgcagaaaatcttctacctgagcagttttatcgtcagctgcggtgagtttctgaaagtcttgaatgaattccctgatcttcttttctttgctctcaagcagtaatctca

SEQ ID NO: 132839 - DNA, 2441 bp, Homo Sapiens
  misc_feature (686)..(705): n is a, c, g, or t
  misc_feature (2272)..(2272): n is a, c, g, or t
  misc_feature (2333)..(2333): n is a, c, g, or t
gagctgtagcaacaaaactccctgctgtaccccttaatcaggtcatggcattagtcagagcttgacctcccttgtccctgatcaagagcaggaattcaaggcatgaggcccatggccggcaacagacataccaacaccagaaagggcaaaataacctcaggaaagtgaaagagctctagataggtcttccagaggtgctaaaccgacacacctttatcccaaccccaacccgggaaagataagcaaactgaaagaaaatgcacagcaaatagacataatcttgaagatttttaaagaataaatatttttttgtaattaaacattatgcaaacacgtgccacgcttgctttgtccatgcatatgcgctatatacaattttgaaaaatactgtgttgtcctcttgttttaaaagtcatatacaaagtttttatgtttttcgtttgttgaatcctcttgctgcctacccctttccccatcccaagattttctttacaaggaactaagcatcattcactcatgaccttggggtatgagagaaagagagtcagtctgtgtgtgggtgtatctgtatgtgtaggggaggaaggggaagaggtcctttaccaaagtacaacaaaatggctggtttgaacatgaaaagcagtgtcaaggagctgtttgaaattttaactgtactacactcaggnnnnnnnnnnnnnnnnnnnnggagtcagctttgagaatgaagctacgttacaagttaaagttggagggcttttagtgtgtctgtcacacttttgttggcggcctagaatactgttgtacaatggtttatctacctttttattacaatataatttacttaaactttccattaacaaaacaattctggtactacagaccagtggtgtcagaataggcttagtgcctccttgtttgtgtttgttttgttttaattgcatgagcactctagatggtaaagttttcagagttcattttatgcagggccattctcagtcctcaatgtactcccacagatctttttcatagccttcatgcacatgctgtaacaaaacccttcgtcgactctcacagtatctgtacttgtcttgtactttctgctttatatcctgcagagaatcttgggaaatatctcgttcaaggtagcccgagagcacctctgtggcattctctagatctgcttggttattctcaaagataatggactggttattctttttgaggtagaaagcgaagacataagtgtacatgagtgtggcacgacactggcagaggacatcaactgccttcttcaggaactgcacctcaatccaggacatgttgtgctgctgcatctcctccattttctgtttcacctgagcatatagtttgtgctcaaagcgcaggctctgcatgtggttcatatagcgattacagtagaacaggtacctctgcagggctgccctagatcgctcctgtgcatctcttgctgcctttgcatcatcctcattatagcggttacagttgtaccaggcagatccatgtggttcccatgggccaagacacacccagcaaaactctgctttacaattctggttacgacagaccatgtgattacaaccaccatccttctcaattgtgacatggcatttgggacattcctttgtgttggctgcaatccaattggaggtttcactgtcatcatcacactttttaatccatttctttaacccacttacatttaacaggatcatgccaattttctccacagttaaagcaaaattggcgcccacatttgcagcgaacaggtttagcatcaggatattggactttaacaacatggtggcaatctggggcaggacaccactttaacagtcgattgcactctacaaagctatttgttattaaatgctgatactttaatttaacttttgaatctgtgatcaggcgcataactgtgttgtcatccactaagatattacaaccatgagcaggacacgaaatagtctgacccatgccttcttccattattttggtagttaaatattcactccagcactgcatacaaaacttatgtccacattcaaggccagtgaaatacgagttagggtagttcaagtagcagatctgacaaggcatatcctgtgctgatgaccttgtattccatctggcgtgttcgagactttttacttggattaattacatgacactcagcaaagagcttctccaggtttccatcaaagtacctttccattagcttctctttatcccaattgaagtggctaaggagtantcttgtgatagttgctggattctttgctgctgcagcccgcctgtcctttgcatcactgaantcatacttctggaagtacccaatatgcactggatgacctcgttgacctcccggatacattccaccatgtgttgtagaatctgctcggccgtgagcacctcgtatgcgg

SEQ ID NO: 132840 - DNA, 1100 bp, Homo Sapiens
  misc_feature (472)..(492): n is a, c, g, or t
  misc_feature (526)..(582): n is a, c, g, or t
  misc_feature (859)..(859): n is a, c, g, or t
tttcattttgggagtagggttttaaagctcaatctgttatctgctaaaattgattattgttgatatgagagaagaggggaaattttatttaaattgcatttattaatctttttatctgaaactttgtacacttttccactttcaaaacctattttaagtacagcaaaatttatttaaaactgtcatagcagtaaaaagtattacgatgaaattgttagggtattaatggaacaaacccagtttcactctcttgacacacttattaggaagggattgcttcactggtttaataatttaaaagttatgtttgttaaacaccctgtcagaacagtcattttcagtattagattcctgtactattgtgttttgagtgtgttttggaaccttcatagaacacactttcttttggaatgtatttgattgataagaaagtttaaacattgttttcacctcaatgtagaaatacagtggnnnnnnnnnnnnnnnnnnnnnagtgctgacaaaataaaatactcatttttgcatnnnnnnnnnnnnnnnnnnnnnnnnnnnnnnnnnnnnnnnnnnnnnnnnnnnnnnnnncccccgggcgaatttctgggccccaggggcaaattccccaaaagggggccgaataaatttcgaaaccaggtaaaactggttcctgggggaaaattgttaccggcccaaatttccaaaaaaaataggagcgggaagaataaggggtaaagccgggggggcctaaggagtgaccaaccccacattaattgcgtggggcccagggcccgcttccaagtccggaaacctgtcgggccacgggaattatggacccgcaaccgcgcgggagaagggttttgcntttggcgcgccttccgctcctgcgccaagaactcgtgggctcggtcttcgggtgggggaagcggtaaggctcaccaaggtggtatagtgtaccaaacatcagggataccgcagaagaatagtggcaagggcagcaatgcaggacgtaaaaggcggtgctgggtttcaaagttcggcccggaaaaacaaaatcgctcattcagggggaatcgcagcttaaaacagggttcctgagtcctcgg

SEQ ID NO: 132841 - DNA, 1496 bp, Homo Sapiens
  misc_feature (663)..(723): n is a, c, g, or t
  misc_feature (803)..(884): n is a, c, g, or t
  misc_feature (999)..(1058): n is a, c, g, or t
aaagttatatcaataagcagctttttattgaaggactgaaagaattaaatagaaggcacagtagcactgtaaagctttctcagaacataataatctttttctatgtatgtgtggaacccagactttcttttttgttgttaaaaatgtcttctggacaatcagaaaatctttatttgtcatccttccctttggtctttctgtaaaccatttctcgaaaactggccagaatcttgttctctctctttcgtctctcttcttggttaaaggatgcaagggctctcttctcatcagcactgtagatctggttctcttttcgcagtcgcacagcctccattcggcgatgcctgctaccactcattacataacctgagcattcaaatgatgcaatttcttcacttgtcaagccaatttcacctcttcgtgggatacgttttccagcttttacatattcagccatagctgcaccttcaccaggtaacagagcatggccatagttcaaaggtttatcatcttgagaggtaagtgtttttggagcctctgggccaattaaatctgatggttcttcagcctttgttcgatccttccagggattttccagaaactcttcttgggattctttagagcttgaatcactggactcttttctgctcttcttagacctcnnnnnnnnnnnnnnnnnnnnnnnnnnnnnnnnnnnnnnnnnnnnnnnnnnnnnnnnnnnnnctctccttttgttatcttcatcactggagtctgtttcagaatcagagtcactgtcgctatcttcagaatacttcttatgnnnnnnnnnnnnnnnnnnnnnnnnnnnnnnnnnnnnnnnnnnnnnnnnnnnnnnnnnnnnnnnnnnnnnnnnnnnnnnnnnngaagtagaagctgaagtagtgcttttctttggctcttcatcctccactggtgtatgttcatcagaatctggttcaggattctttggagaaagtccccatacttcaggagctcccnnnnnnnnnnnnnnnnnnnnnnnnnnnnnnnnnnnnnnnnnnnnnnnnnnnnnnnnnnnnttgtcgaggaggctaggccaaggcttgtcgctcccgtaggggcgcgagtagctgccgtaatagactgacgaggaggcagaagcgaaggggatgccccggggcgcagagggccgctctctagaacgcgaccgcgagcgtgagcggtaggactggtttcgggagccttggctgaggccacccagctgatgggtgagtccattccggtccccggaccgagagcaagagtgcgagcgagagcggcggccccgcggggagcgggcagatttgctgggcttcggactcttcgacgaactgcgacgtcttccccccgagcccgaggcctccctatccgggctgcgtgagccggacaccggagccatggctactggggggccccagcagccgtgggacaagggggcgctctcgcgagcctaggaagatgtctgttgccctcgtgcc

SEQ ID NO: 132842 - DNA, 579 bp, Homo Sapiens
ttttaacgagcgaaaaaaaactttaatagcttttaatcttatgctgcaacatatactcttgtatatgcacagaatgtatattctgtatataagacaccaaaatatatatttttgggggaaaggtgtcaggggctaaagtgaaagattcactttttactaactctcctcctataatggttgaatatttttaaaaccatgtgcacatattactttttaaagttaaaataacaaaaaataagctgctaaagatatctcaaaagaagctttttcctgagggacttactaatatggtaagtacagtagcactgtaaagccttttaacacttttggtcacataaaatttttgttgttaaaattcctgctgtgcaacaagtaagtccttacttgtcatctttcccttttgtctttttgtgcaccatctctcggaaactggctaaaatcttactttctctctttcgtctctcttcttggttaaagggatgcaagagctctcttctcatcagcactgtagatctggttctccttacgcagtcgtacagccttcattctgcgatgcctgctaccactcatgacataacc

SEQ ID NO: 132843 - DNA, 442 bp, Homo Sapiens
  misc_feature (162)..(222): n is a, c, g, or t
tttggacctttcttttgaacggctagacttcttctttttttcttctaagaaagtacaaataaaaaaattatattctaaaaaactatttctgaacatcaaaagaaacagacgatgggcaatttgagtaaaagcaaagtctaatgttcaactatttacaaactnnnnnnnnnnnnnnnnnnnnnnnnnnnnnnnnnnnnnnnnnnnnnnnnnnnnnnnnnnnnnaccttctgaagtagaagctgaagtagtgcttttctttggctcttcatcctccactggtgtatgttcatcagaactgaatttaaataaaatggttataagaattaggaaagtgatgagatatggaccatggagtgtaaagatatgaactccaaatttttcagtaacagcatcgattgtccaagaaccattaaaagcaagcattggagatcctaaggcagaa

SEQ ID NO: 132844 - DNA, 1130 bp, Homo Sapiens
ttttttccagaaaacacaactttattcactaggactgaaaacaaaggcttgtgcaatcaaaaggccaagttgagtgcaaggtggagcgtgctcggaaatcacagacctcacctgtggccaggccgggctggcagttgttgtttctggtgttttctgtgatttcccacattttatcacaaggccacaggcatcctccaaggtcagtgaggaagaccctattgctgtttgagccagagcctcctagagggtgggccgggagcaggcagctcccaggacacacagatgcacgatgtgattagcagtgaagccttctgtcccaggcgtgggcaggcgtcctcccttagctgcctgagcatgtgcggctgaagacatggcttttctagggttaggcactgtgcgtggtgccagccccagccctccctcacctggacgtgcccaggagggggcagcagagcaccgtggcaaagtctgtccacttgccgctccccgtcccgtgcagaagactgcttttccgtggcggccagtgtgcggccacgggctctcagaagcctgcttgttgggactgttgctgggaggaggaagggacaaggcttgacctggggctcctgaaaacagacactcgggcgttggccactgggcaacaaagtcagaagggcctggagaccctctgtccagccttctagggactgggcggcttcctccagaggactgagctcagccaggttcaagggcggcagcaggaggcccctcgaccctccctcttaacgtaatcatgcagccggaagcgcggctcgctgggagccttcatggagcgctgcttcaactccctgcggagtgggggtgacaaggggacacgatggcctggactctaatgaggattcaggccctgggctgggggagtcctggtgactggcaggacttactttgctatggctgtgaaggccaagtccacgttgaggcccgtcttggcgctggtctccatgaagggcagtccatactcctgtaaacagctgctgccagccaggtggtggcctggcggggacagcctaggctcgcagcctccaggggcaccccctcaccacccccctgccctgactcacctgatcccgggaatccggaccggtccagcc

SEQ ID NO: 132845 - DNA, 544 bp, Homo Sapiens
gccaattttcaaaacatttttcctataaaacacaaggtgttaagtttctgggcatgccccattccctaccgctacattctataattgcaatttctaggcttggtaaaacagtatccttattctccacaagtgtagtggcacactacaggcattaagaaacatgatcagagaaaaacaaactattacctcagaaaacaatttctcagtttattcccacaaaaactcaaaaagagatggtgatatcaaagaatcctggatttttgtccttaagtcaaacagatgtattgccagggctctggttatgctgctgcttgagcttggctgagtatatcactatgcttctctgaaaatgagaacagccagacctctaacattctttcagcctcttataatctgtaattttatgatcctgaaagtgttttcaaaagcactcatgagcctttctcataacttcttctccctccattaacctaagatgcccaaaaagtggattatgctaagatgagcaagcattcctcaatcttcttccttttctcctcgtgcc

SEQ ID NO: 132846 - DNA, 700 bp, Homo Sapiens
tggcactttctacaaaaaatgctttatttaaaaatatgatctttttaaaaaggagacttttatacacacttactttagaaacagtcaaaaacacaacagaatcaatccagatttagaaatgatgatttgtaacatacaatattggtatgctgaacaagacagtttaaatgtatgattctttttgtcccttcacatttcaataattcacatttgttaaaactagtggttgggactaaagaaaaggtcatatctgaatcctttccccttcagaaatctgtcacccttctgggcagttacagaaatggcagcagctaggcaatgtttgtatttctttgggtgcctctgtgtcaaaaaatatatctccgcttttattctttttctatgaaatttatatttatgtggctatagggcctggtcgtatgtcccacgccttttaaaatctaaatttctaaaaacagacactccgtaagggcaaggagcatacactgctatgacctcactggactcagagcttaatgctcttaggttatcagcaagagacatgattttgatcttccagttagcactccaagctgctatcaaccaacctttttcagcacggtagtgaaatatttcaaaccatattcaaacatctaatatagatttataataaaacaggaaaaatggcttgccaaattaaagtgctatgagccctcgtgcc

SEQ ID NO: 132847 - DNA, 728 bp, Homo Sapiens
  misc_feature (643)..(643): n is a, c, g, or t
  misc_feature (713)..(713): n is a, c, g, or t
gtcaattgagcagatttaatttccctgagattatattccataagtgatacaaatactaccccttagaccaggggttttcaaagtttgctgtgcaaaaaatcagctaggtatcttattaaaatggtccccaacatgtctgagctggagcttcagtgttcacaggtctcagttgatgctgatgctactggtctctgggtcacactttaaagaggaagacattagataaagtaaaaggagtcatgagaaaaggtgcacctaaaaaacatcacataacaaaatactaaagtcactagtggagaataacaaacatgtctctctactctatattctaagatcagtctttggttttctatatttccatgtgtctgattataaagactcattaagtttatgggctttttaaacttcaaaaataaagtgctacgatttttaaaataaaaacacgactataagggcttttaagaaacttgcctgtttctgagagtgaaggacaatctttgagatccaaactcttctgaaattctatttcattgcataaaccctcgattatttattgccttttgagtctaatctccatgagatttaatttgctccttaagggcaaggccattttatatattaataatagtttggtctcctcganagcacttaacatttacataaaagttcacaatttgtaaacctaatcagaagtccatttttccttgcagcangataggaaaaaggac

SEQ ID NO: 132848 - DNA, 459 bp, Homo Sapiens
gcacgaggagactcattaagtttatgggctttttaaacttcaaaaataaagtgctacgatttttaaaataaaaacacgactataagggcttttaagaaacttgcctgtttctgagagtgaaggacaatctttgaatatagagtagagagacatgtttgttattctccactcgtgactttagtattttgttatgtgatgttttttaggtgcaccttttctcatgactccttttactttatctaatgtcttcctctttaaagtgtgacccagagaccagtagcatcagcatcacctgagacctgtgaacactgaagctccagctcagacatgttggggaccattttaataagatacctagctgattttttgcacagcaaactttgaaaacccctggtctaaggggtagtatttgtatcacttatggaatataatctcagggaaattaaatctgctcaattg

SEQ ID NO: 132849 - DNA, 632 bp, Homo Sapiens
  misc_feature (367)..(375): n is a, c, g, or t
tgactttgggggtaaagtctttcaccagcacacaagagtttgattgtacaaatatatctccggtattaacatctctgcctgttgcttaagatcagttgcttttatactcagaatggaaatacctgatcttggctagttttgttataagatattgatttcatttagatttccctccacgaggtcagcaaactatcatgttcttatgtaaacttaggccaaggccagagttatcatagtccctaggttgctacggcttatcatgtgcttggtaaaaggtgatcgcaggttctcagacgagtttactttacatgagatggaatcaggcagagaggctgggatgatggagaaagctcgaggtgaagttttnnnnnnnnngttgtggaaaggaaagttccaaagaggtggtttctgaggaagtcagagcgcccagggccagagcagtcagtaatgggtgaatgaggttgtttggaaagtcggtgtgacagacacatggatgccatctacttctaggttgctggtgggtattaaatatgcacaatattccatagctcactgaggattttaaaattataagcataggattttatattttggggtgaaagaattatctggcacattaggtattggagttt

SEQ ID NO: 132850 - DNA, 640 bp, Homo Sapiens
  misc_feature (593)..(593): n is a, c, g, or t
  misc_feature (605)..(605): n is a, c, g, or t
tttgcttaaaacaacagagatttattctcttacaattctggaggccaaaagtccctgtattttttttcccaattagttttgcagccttttagggccagctggatcaaaacagagctcctcgggatcctggaggtgaggagctcatggtggctcaagatgaagaacctactgctgcttccccctagacccacagccctggacaagcagactaaggaaagtgaggcactactgggggcggggcctgcagatccccaaatgcttcgcagcacactctacggtgagtgacaggttgcagaataacctccagaatccctcagggcatggaacgaaagtctgctctgacctcagagctgactcccctaggccccaccctccacagctcctgaagcccttgcagtcgctctgcgatgtctgcatgggtgagttgttcccacggcagaggttcctgcctgcagacactgctctccaggaagctccttgcaagccttggggaagcacccgagacaggggcacagttactctgcacattgacaaacagcacagtctgcaccagggctcctcaacctttttgaggtcgggctccctttgagaantctgctgaaagncatttccatggactcaggctcacatgcacaaaatg

SEQ ID NO: 132851 - DNA, 1602 bp, Homo Sapiens
  misc_feature (508)..(587): n is a, c, g, or t
agaattcggcacgaggataaaaagctttattaaccttaatatgtttcttcatagcccttgtaaaaccctagccactcttttgcaataaagcattttcaaaaagtaccatcgatccggggttatctctgtgttcttttcctggaggatcctgagtgcgggctgtgtcgacatcacgtcattaatgtcttctgctccctgcactgtggtcaaaggcttttcaacgtagccttggatcccctgggtttgctgcagttcagtgcacctcaaagcacgataacaggaactgaaatggcagaaactgaaagcaaaataaaattcagccaggaaacacttagctgtttttccctttgctatcgtttcatgcttggagttctgagagcacaaggggccccctttacttccttgtttatgtgacaacaggggaaatctcatcatcctcccctcgccaggctaacttttatgaggttcagctttgtggttctctttaattctctggcattgtggactnnnnnnnnnnnnnnnnnnnnnnnnnnnnnnnnnnnnnnnnnnnnnnnnnnnnnnnnnnnnnnnnnnnnnnnnnnnnnnnnctattccaggacggttcaactatgatttttcggctcctcttctcaagcagctttccacacctggttccatgatctcttctggcacagtagctggtatttggcaaacataggtttcatcctgggatctcagggattgaaatctgtcctaggtgtgcaccagaaagtggtggcaagagatgaagcttcggaggaggctgacctcggccaggattcttgagtctcaacagtttcagctttctcacccctcaacggacatgaaatctacctatttgtaactccaggggaaagtaaatgagataatgtttggaagatatctagtctagccagctgctcaggcggggggcgaaggttctgttcccctgtcccttctctatcaaatggctttaaaaatcagaagaaagtattacgggtaggaaatggggactgcgaaaaaaatggaggctgattctggccctaaaggatacttatctctatacaaagggcttctgattcaaagaggccccgggattcaaaaacacaagcagagctacaccacgtggggtttgggacgagctgaattccggataaagatgcctgtaaagaggagttgatgcgaatccagaaaagcacttgaaatgcccaggctttgcatggcacattccccaggattttttcgcaccgcatttagaggtttagacggagtgagctcgaatcaggccaaaagtcttaggttactcctgggcggcagcggggcagaggtcagatcaacaggtgtggaaggctgcgaggtgagggaagaagcaggtgtcggtggaggccccagttcctccggcccagaggctccaacgctgctattggtgttccagcagcgggcggaggggtcctgcccggcatctgggcgcgctgggcccagagcccgggaggaggcagacaggaggcggcgggtcagcggcgggccagccccggtgggcttccgctcccctcggcaggcccggtccggcccgccgtttatgcagggattccggaccggtccagc

SEQ ID NO: 132852 - DNA, 534 bp, Homo Sapiens
aaatgtctgttgtcataaacaacatgtttatttgtaagaaagccaactaggagaaagcacaacctcagacaggccttgaggagggaactgcctcttctccttggggcacttgtctgctctctgtccccatacagctgtcactcaggtgacacaccgccaactgcttattcacacttggccatcaatttcatgcctccgttggatcaaggtgaggtctttattctgagttttttggtcaagctgaaaatgcagcaaaaccccttgcaccatgcatttgcagcagctgcagcatcggttttctaggctgtcagtacagatgcagtcaaggaaaactctcaactcttgagttagaatttaggttcctttcaaccaggaaaaagctgagggcatcccagagccactgccaagcctcactgctgcacacaacataccagaaaggccagcttggggctttcatgggctcctgtgtgtctgcaggcagttcctcaaaacacaggaccttttttgccaaatcctcgatgatcccctcgtgcc

SEQ ID NO: 132853 - DNA, 313 bp, Homo Sapiens
tctgacaacaatgaaatagtttattttcttcaaatattttaaggtacgaacgtcagaaataaaaatgcagcatttaaccctggaacctcaaatatcactgattatactcaaaggagcagaggcattgttttccatctgattcctcagttcctcacacacacaaccatccccctcaccccatgatctgaaaagcgaaatgaggaattcaccctaaaattagtgtggagaaaacaagcaaattaggttatttactaagtgactacataaaaaactgagtatgagaccaagaaaaatagattctgtagttttagtt

SEQ ID NO: 132854 - DNA, 930 bp, Homo Sapiens
caagtcatgtctttatccccatataatggagaatgtgccacttggctaataatgtgttttcaaaactacaagttcagtgatgacaggaaagagggctaaagtagtcccacagaggctggtagaaaaggcgaatcacacttaagcaccagcaggttaaaaacctgaaagggtggccctgacaattcagactataggttttacagcatgccacttgtgcaataggaggtctagggttgaaactttcaagaacgagaggaggtgaaggaaggagacgtttactgctcaaatgccatgcatttcactgcttgccactgaacttgtatttgaatgacttagtaatgcttaatataattgggcaacttttttagcactttggaaagagtcatcaatctttctggtaaattataaaagttttctgagtgagaaaaggtgtgtttggagtttgtttgactttttatattattattgttattaataaagaaaaaaatctacagcatttttcagactccaccctagaaaatatgtacccctgaatttggtttgcagtttgatactcagggaaggatgtattccatagatatcctttccgtataaaacactaacatctttgagaaattcacctgccaactaacttcaattgttgtcactatgcattcttcaatgaaaactagcttatttttccatatagtaatgcagttagggttctcagcactttctttcttctatcctttttttaactcttcatattatgttcagatgatcatactgtcaaggtttgtgtacattactgaaaatttgtattgtataaagctttttgcattacgaggctgtacagggtcattttgacagtaactggtatattcctttgcatcttatgttgcattgccaatttctagtgtatccagtttgaaagtataatatactctaatt

SEQ ID NO: 132855 - DNA, 942 bp, Homo Sapiens
  misc_feature (816)..(816): n is a, c, g, or t
agattttaactgaagtttatgtctaagacaaaactgaccttttagagcataaggaaagtgtgatggtgaatccctgagaataatgttaactgagtagagacagaatcttgtaaaaggtgttaagaaagccagagagctacaggaatatgtttatcatctacggtttcaaatgccgtggtgaagttcagacctgaataaaatttgcagctgtgacgcggaggcgggcagaagaatctccagttctggtgagcaaaacgggaatggtcctctccacacagtgagctgtttcaagtttactcagtttatgtttaggaatatattgtgtaatgatcattttcaacaatttcaaagaagcctgaaaaacggaggtcacaatgtcctttatggctcttctaacgagaaagacggatgctctcagtgtgttctttaaatcttcttttggggttccaacaggcatttccattaacttcttagacaaggcaagcagtgcatcctctcggtaggaccacgtcttacaataggcctcagcaaaccaaggtttctcccaaacacatcgatggcagagctggcttctcttcaaggccttcctcggttaagggctctggctccccctaacatgccctcccctccgaagcatcgctgatgtctgcaattactcaatttccggctccaccactgcctccccataatgcttacgaatagctggaagaggccgctcatcgtagggcagggactctgcattgatctttggatgaggatctgtggcagggagtaacgggtctactgcagaatgcagctcggcatccaggaggctgntgagctccagctgctcgtacacctcggcacgatactgctccatctgctgcttcttctccttggcgagatcgtagtcttccttctccacggcacagcgtttctctacctcatacctcccaaggcgct

SEQ ID NO: 132856 - DNA, 770 bp, Homo Sapiens
  misc_feature (501)..(553): n is a, c, g, or t
cagagctcggtacccgttcgctactgtgtggagaggaccattcccgttttgctcaccagaactggagattcttctgcccgcctccgcgtcacagctgcaaattttattcaggaaatggccttgtttaaagaagttaagtctctccaaattattccatcctacctggtgcagccattgaaagcaaactcttcagttcacctggcaatgagtcagatgggcctcctggcccggctgctgaaagacctgggcactggcagctcgggcttcaccattgacaacgtgatgaagttttcagtgagtgccctggagcatagagtgtatgaggtccgcgagacggcggttcgaattattttggacatgtacagacagcaccaggcttccatcctggagtaccttcctccagacgacagcaacacacgcaggaacattctctacaaaacaatttttgagggatttgctaaaatagatggcagagctacagatgctgagatgagggcacgnnnnnnnnnnnnnnnnnnnnnnnnnnnnnnnnnnnnnnnnnnnnnnnnnnnnnctttacaagggcagctggcagcactgaaagcaaattcaggctgaagttcaggttggaagttaacacgtctttcacctgtgtgcttacagctgagatgtatatgctgtatagatccacatcatacttgacttatctttcatgggattatgcaaatgagcatcttgatatcctatatggtaaataggtaggtaggggtggatgacagacgccctccatg

SEQ ID NO: 132857 - DNA, 1083 bp, Homo Sapiens
  misc_feature (806)..(829): n is a, c, g, or t
  misc_feature (900)..(977): n is a, c, g, or t
  misc_feature (1069)..(1069): n is a, c, g, or t
ttttttcataagcaaagttgtttatttaaaatcagaaaatataaagatgctgagtcccaaaaatgtgataaaattaatatgacctctttccaagtataacacattgcctttctctaacagaaataaactatgattcttattacagtcttaaaattctttttttaatgaatgagtgtaactttttattaagatagaattatttttattaaagaaatatatgaaaatggttaagtaaaatcaaatggctccaaaagtcttacaatgaaaacagtcctgcgacttgttctttccagaggaaagcacttttcattctcttagtttttccttctggtagttacctccatgggttttaaaaaattactatttttttagtttttcaagtgaatacatatattaatacatgtaatctttaaaagcctcttcagtttataatgcatcctaacagtcccctgccccatccctcctaattctctggagcaatgacttctaactcttctagcaatgttccattcttttcttcacataactacttagtcatttcttgattatgttatacattatatagtgatttcttgatatgacagatgaggatttagctcttacaccatcactatcttcacttttccccccatattgtcccaaagtagttaccagatttaggggctaagcagtcagtcaccacatcattatgactatgtacatattgcccattgttgagaaaaacagcgtatgatgctcttacttcctatcctgtacttcttcctgccctagaattaattattgcctaaccaacccttcccccttgnnnnnnnnnnnnnnnnnnnnnnnnacttttgctttatcttcaatgcacttctttccaaatgccccaaatctggcaataaagttattatttttaannnnnnnnnnnnnnnnnnnnnnnnnnnnnnnnnnnnnnnnnnnnnnnnnnnnnnnnnnnnnnnnnnnnnnnnnnnnnntagctgggactacaggcatgggccattccacccagctaaccgattaatatttttactgttcctttttaaagctagctccatagctggaatantgcctgtgttggat

SEQ ID NO: 132858 - DNA, 1448 bp, Homo Sapiens
  misc_feature (111)..(125): n is a, c, g, or t
  misc_feature (133)..(224): n is a, c, g, or t
  misc_feature (428)..(443): n is a, c, g, or t
  misc_feature (851)..(870): n is a, c, g, or t
ggggggaattccaacccttgttctggcccgggtttttttgggaaaaactttggccccgtttcccttccttttggggccccgcgcccaaagaaaggttttgaaaaatttttnnnnnnnnnnnnnnncgccaaannnnnnnnnnnnnnnnnnnnnnnnnnnnnnnnnnnnnnnnnnnnnnnnnnnnnnnnnnnnnnnnnnnnnnnnnnnnnnnnnnnnnnnnnnnntattaacaagtgtaactctttattaagatggaattgttcttattaaagaaatagatgaaaatggttaagtacaattaaatggctccaaaagtcttacaatgaaaacaacagtcctgccagttgttctttccagaggcaaatacttttcattctcttagtttttccttccgttagttaccttcatgggtttttccaaattattgnnnnnnnnnnnnnnnncaagtgaatgcatatattaatacataaaattttaaaaaggcttttcagtttataatgcatcctaacagtcccctgccccatccctcctaattctccagagcaatgacttttaactcttttagcaatgtcttctgtttttttcctcacataacttagtcatttcattattatatattatatagtgatttctggatatgacagatgaggatttagctcttacaccatcacaatcttcacttttcctcccatattgtcccagagtagttaccatatttaggggctaagcagtcacatcattatgactgtgtacatactgctccttgttgagaaaaacagtgtattatgctcttcctatcctgtacttctttctgccctagaatgattgcctaaccaaccctttccccttgnnnnnnnnnnnnnnnnnnnnacttttgctttatcttcaatgaacttctttccaaatgccccaaatctggcaataagttattatttttaagagaagggatctcactaagggtggccaggctggtctgaactcttgggctcaagtcgtccttttgcttagcctcctgagtagctgggactacaggcatgggccattccacccagctaaccgattaatatttttactgttcctttttaaagctagctccatagctggaatattgcctgtgttggatcctatttgctggattcatgtcattctctggtttgtgtactccttcattttgctggagtattttctccaacagcttccctaaaaagggcacatggaggtaacccctgagtctttgcttgtctaaaaatgtattattttaccttcacccttgattatttgggtgaatatagatttatcagttgaaaataactttctagaattatgaaggcatggttccattgttttcagattcctttttgagacagggtctcttctgtcaccaggcaggaatgcagtggcaagtcacgactcactgcagcttggactcatggctcaatgaatcccct

SEQ ID NO: 132859 - DNA, 711 bp, Homo Sapiens
gaataatataacagttttattataaatcaaaacaccaaacttttgcaaactttacataaacgtgtagccatatgactgtataacaagagcccaagagcaaccattgtctaacaggtagaaatgcagacagtttcatgttaagcctttagaatttcctttcacggcaggtttccaaaataaactaacttttctaacatttattctcacaaaaatatatttcaagttagaataaacaactcattggcttcagacatttaattgtatgtatttaaccatactcagataattgtcatatttagccaaatggaggctttttctgtgacctatttccaaattctcagattctggttcatctactccttcaagcagtttggaatgacttgccagttggcatttatatcattggaactattctgcaaataagccattttgataaagcttgcttggtttgagacaactatgtatttggagataaaagactcagaacaaagtgcttgccttttctacagtttatatcaaacgagatgggcacttaagcagtcagcctggattcatatgtctagagtggccaggctgtaaatacaataagtctagctgccttccacatgtggtcagacagctatattaagaagatctactcactgctggttatgaagatagccaggagcttgtctgatttaaggaactattcagccattgaaggatagacac

SEQ ID NO: 132860 - DNA, 828 bp, Homo Sapiens
  misc_feature (44)..(70): n is a, c, g, or t
  misc_feature (703)..(703): n is a, c, g, or t
  misc_feature (764)..(764): n is a, c, g, or t
ccctcactgaaagggaataatgcttgcggccgcatacgcggtcnnnnnnnnnnnnnnnnnnnnnnnnnnnatgttgtagcgtttattgggtgcccaccgctggctgggcaccgagctgggcgtttgcaggacacgcagtcacacaacacctcacaacagccctgtgaggtagggatgagtcccatggaacggtccagaaaacgcaggctcccaggcgccctgcctgctcccacagctaggcaggcggtacagcggggactgaagcagttctttttgactccaggttccatccagctcttggtcccattgttttagagattacagaaggtttggtcccagagtccactgagcccattcacaacgtttacaggttttgtttcctatcccccacgctcatcgtcctttttgaagtttggaaaaatacaatttaaaaatgaatatgagtgtacagtttggagttcggaaaattagcacacgttctgtttggttcagggtccctctccacctgggtcactggcgcagcagtaagagttctaacgggcaactcagcggcctccctctgtccccgtcactcctgagcatgtctgaggccgccagtgaggctgggactcataggttcgagcagaggaagaggagctggtggcagtgaaatgggcaacgggaaagtggaggcgggtaaccctccacaatggctgctcagcanacacagaaatcctcttcattctttctcgaccaagaatctgcagtcctcctccctcctctanggcgcacagcttagccctgacccaggcaagcacagggcttcccgtggtctgcaggaacgcacct

SEQ ID NO: 132861 - DNA, 746 bp, Homo Sapiens
ttttttcagtttcaccaaaattcctttatgtaagtaaccctctcaacagtgctaagaagtaagtattgacattttcattttgcagatgagaagcatggattctgggacgtcaggtctatgggccatccaggtcagaactctcttgacctcaccctgcaacgggtcctccaaggaccatgagccttgggggaggcgggaaccaggtctgattcaactccgtatgaccaggtgcagcacaatgtagggctcaatctgagttggaatatgacaccaagaggaacatcccaagtccccgagtcaggggtctgcgccccggtggacagtggggtctgagagcgaccacctaccgaggctcctcttctcggcgtgggggggtctgcagctggatgggacccaggacgacgtccaccttttcctggtaggagcccacatccctcttcgacctcaacacacagcctcggtagcagcgggaagaggggtcatacgctctgcacaccaccattttacaacgcaggtacacggaggggaagcggttcaggaagtggaaggccctgaaccggaagcgggcaatgcgaagagacggcgaggagtagggtccgtaggtgtcatccctcacgcatccactccggattagatcataagtcaaagacgtgaagtcattggagtatggtgatgccacgcaggtgtccacaaacaaggtcagtacagcatcagaatggaggatttcagcctgaacgtacaagtcc

SEQ ID NO: 132862 - DNA, 1409 bp, Homo Sapiens
tttgcatgtagctgaccagcctaccagatcttttatgcagttcgacatacaaggtgacaccaaggtaagacaaatgaagttccagtttgggtgcctccatctccctcccctggatcctgatccagtgactgccaaaaccagaaagaactggggtagggtgcttgatcatggggaacgctgttgtggttcgtccggcagatgggaaaagggaaaggtttcacttcttcacaatttgaatgacatcctcatcctccaacgtatggtctttacccactttctgaggattgtgtttcacagagagaccccagaccagagcatatttaaattctttgataagatttttgtgaatcttcatgcagaaatcctccactgtggtcctggagtaaggaagcaccactggggatgtgtaatctggtaactggcctttgggtttggtgtaaattctcactagtttcagatagtcccagatcttttccaataggtcatcaaaattccagcggtgatgggcagagatgggtacacagtgaggcaccttatagatgatatccaattcctcaatggagatttggtcaatcttatttaacacatagatacaggggatataaactctgtttccttccaccacatcaatgaggtcatcagctgtagcatcactacgtagagtcacatcggcattatgaatcttgtattcagccagaatgctcttcacagtttcagcatccagctcactctgggggcaagtggctgtgagattaatgcctcccttgtccttcttcttaaagccaatgttggggggtttgctgttcaagcgaatgccaaagccttccagctcattttcaattatcttcttatgtcccaaaggtttcaggacatccagaacaatcaagatcaagttacaggttcgggccactgcaatgacttgacgacctctacctttcccatccttggcaccttcaatgatacctgggagatccaggagctggatcttggcacctttgtatctgatgacaccaggcacagtggtcagagtagtgaattcataggctgccacctcagaatatacccctgccaggttactaagcagtgttgacttccccacagatggaaaaccaacaaatccaattcgagcatcacctgtcttggccacatcaaaaccttctcctggacctccaccaccaccaccctttggagtaatgagttctcgacgaagcttagcaagacgagccttaagcagccctaagtggtgtgctgtggccttgttcttttgagtccgagccatctctgcttctatctccgcgatcttagctaaggtgctgctcatcgtggcgagtaccctgtggcctccacactgtctcccttcacacacccgcgggcaaactgccaccgccaccaggcgctactgcagcacg

SEQ ID NO: 132863 - DNA, 703 bp, Homo Sapiens
  misc_feature (86)..(95): n is a, c, g, or t
gagtgaggcagggtcgtgcaaagtcggatcctgtctttaatttttgatattttattcatcatggacttttgcattaattaaaaacnnnnnnnnnnaccacattggattaaaatattatcatgcaatttgctggcattccggtaaactctgcatctgaaatgcctcactggcctcattcgtccaggccctgtgccagccgaaagtcagtctcagccccgacctttccttctaggagctgtggagacagaccaggatggcaatggccaaagggacagatgagtaacggagtgaaatcctaacatcctctgaggccagatcctcagctgccacctcctctgtgaaaccactgagagctccgttggatttttgagtttcctgtccaagtgctgtgctaagcactcagtcctcgcagcaacccctgaggcaggtatcccattgttcagaggagaagccagcttggagagcctgatttacctgattatgccacccagaggtgtcagaggcggagtctgtctgccctcccgactcccaggccactcccctatctttggcctcactcccagcattcgcttggttctggcttgcggcattctcctacctgtgacagctggggccgccccaccactgttccatccataaagctccccgctgtcctgcgcactggagggactcagtcagtcaccggtgtgtgggaagcactctc

SEQ ID NO: 132864 - DNA, 833 bp, Homo Sapiens
ggggggaaattccccagcgccgttgttccttgccccaggattttccctatgggaaacccagttatgggcccctgtttcccttttccctttctgtggccccgcggcccccaaaccgaattgtctaggaaaagctttttcaagggccggaggcggcccgaacaggaattccacgggggtgcttgggggaagcgaaccggttctttttctattttaagggctgagggggtttctatttagtctacatgtgtccgtctgagcaccgtgagaagtcccctcctgaagatttctttttgcacggctggctcagcactgcgggtagctcggcattaacaaaagcgaaaacggtggtcagaccttcacagggtcccaccctcacgacgacactggtctacgtactccagacaggcctcagttcttcttgctgtccttctgaggctcactttttgtggtccctaggttgttccacacctctgtgtacattaaggtcccaatgaagacaaacaaggtgcccagccagtgccacagggtgaaggggttctggaagtacaggatggaaaagatgaggctcacaaatttgcgtagggtcacgacgagcgtgacggtgagggaggcgcattctgtggtgaggataaacacaccccggatgcacacgtactgagtgatgatgttcatgaggaggtagaaccacatgatgggcagggtcactccgatgacgggaatttcatataactcagacttattgaatagaactgcatggtcataaatatcagaagccaagaagacgaaacccggaagtggaagggcgtgattataaaacaaagcctccttggacc

SEQ ID NO: 132865 - DNA, 454 bp, Homo Sapiens
tttaatattctagaactgttcttttttctattttagggctgaggggtttctatttagtctacatgtgtcagtctgagcaacgtgagaagtcccctcctgaagatttccttttgcacggctggctcagcactgcgggtagctcggcattaacaaaagcgaaacggtggtcagaccttcacagggtcccaccctcacgacgacactggtctacgtactccagacaggcctcagttcttcttgctgtccttctgaggctcactttttgtggtccctaggttgttccacacctctgtgtacattaaggtcccaatgaagacaaacaaggtgcccagccagtgccacagggtgaaggggttctggaggagtggagtcaaggtagttttctgtagactgtacttgtgggatcagtgagagaaccttctggcatggtccctggtttaacttctcatattct

SEQ ID NO: 132866 - DNA, 210 bp, Homo Sapiens
tttgcatgtacaaagctattggtttattcagctgccaagctggggaaaggcttcctttcgaagtgaatagcaaaaatgcattcatgagcaaggcacttttatacacacacagagagaaaaaggaacgtattatgaacacatgaacataaacatattttaatattcagacctcttccctacctcctcccacctccacttaaacaaacaaac

SEQ ID NO: 132867 - DNA, 647 bp, Homo Sapiens
ttttttcattcattcaacaaatatttattgagtgcctactatgtgccaggcaccatcatcaagcgttgggaatagatacagcagagaagacagacaaggtacctgctctcatggagcttacattctagtgtacactctagcttacatttcagtagtaagtaacatcatactatcaaaattaataaaagcaccagaatgaaaacagaccttattacctaaactgttaaaaagaaactacataacattcaaaactgtataatgacttttaacagataaaataactttttacatgctgttaaaacagatttttagctatcagttaactcaactttcatcgaatatgctacaaggtgggaaagaacataacccacattcacatgcaaacatcctttgatacttctagtcaagtcagtaattcccaagtgatccattaatttttagaaaaatgtacctttttcctggccagtttctactagtattcaaatcaaagtacgttgtaattcctccttaacacacattttatacatgttatggccaatagaggaaacctgtttgatgtttaacctccctcaaatcagagaaccatttagaatttcagactacatgaaatgctagctctaattgttaaataggttaacttcctgcca

SEQ ID NO: 132868 - DNA, 1107 bp, Homo Sapiens
  misc_feature (41)..(59): n is a, c, g, or t
  misc_feature (657)..(1002): n is a, c, g, or t
  misc_feature (1018)..(1018): n is a, c, g, or t
acctcacctaaagggaataagcttgcggccgccgctcaggnnnnnnnnnnnnnnnnnnnaaaacaacagaaatttattgtctcacagctgtggaggccggaaatctgaaaccggggggtcagcaagcagggccgtgcccccctgtgaaggctttagggaaggatcctgtcctgcctctccgggcagctggtggttttctggcagtccttgggttccttggcttgtggatgcgtccctcactctgatctccgactccttcacacggctgccttctccctgcgtgtctgtgttcatgtggccatctccttagaaggacaccagtcatggtgggttaggggccaccccagtgacctcatggtgactaattaatctgcaacgactgtgtttccaaacaaggtcacattctgaggtgcttcaagttaggacttcagcctatcttggggtcctcagccctaaccagggcacccactgcctccggcatcagctcctgctgggcaggcgcccggcctggtgctctgctcccctgcttagccggtgtgctgcccagcatgacaagggagatgggtctgcgtgcatctcagctgcagaaaggaagcccctcacctccctttcagttgctgctgggtcatcaccgtcactcctcgtgccgaattcttnnnnnnnnnnnnnnnnnnnnnnnnnnnnnnnnnnnnnnnnnnnnnnnnnnnnnnnnnnnnnnnnnnnnnnnnnnnnnnnnnnnnnnnnnnnnnnnnnnnnnnnnnnnnnnnnnnnnnnnnnnnnnnnnnnnnnnnnnnnnnnnnnnnnnnnnnnnnnnnnnnnnnnnnnnnnnnnnnnnnnnnnnnnnnnnnnnnnnnnnnnnnnnnnnnnnnnnnnnnnnnnnnnnnnnnnnnnnnnnnnnnnnnnnnnnnnnnnnnnnnnnnnnnnnnnnnnnnnnnnnnnnnnnnnnnnnnnnnnnnnnnnnnnnnnnnnnnnnnnnnnnnnnnnnnnnnnnnnnnnnnnnnngataccggatccaccnatcagggatacgcggaagacattttgcaaagcagcaaagggcagacttaaagcggctgtttggttttctaagcccgccctaaaaaacaa

SEQ ID NO: 132869 - DNA, 1494 bp, Homo Sapiens
  misc_feature (576)..(617): n is a, c, g, or t
  misc_feature (894)..(954): n is a, c, g, or t
  misc_feature (992)..(1010): n is a, c, g, or t
  misc_feature (1019)..(1147): n is a, c, g, or t
  misc_feature (1381)..(1415): n is a, c, g, or t
tttaggtagaaaaggaggattttattgagtgcactcagacccagtggattaacatccagagactgggccaaggacaaagacagcatttaacttttacatacacttctaaagagggtgggctaacttgaaacaagcctacagtggcacaaagtgtagtgatgtgaaagcaaggatacagaaacagaacaaaagcagttaatcatactatgacaggtttataactcagacttacatatgactcttactatgtggcccagatggctgttacctaggcttgctctagtgccttgcatgggcttatcttataaccttcactatggtgcctaggtggctgcaatccaggcctgctcaggcatctcatgaccttcaatgtgctgcttaaatgaaaaacaggaatcataagagaaaggaaaatttgtttctcttctccctatgttgagggaatgctgggagagtctccagagcacattctttccagccctggcttcttaaatagtgttatcaaaacttttcctggatgtgggctgtgcctgttactgcctctaggataagtcagcctaatacaggaaaccttgnnnnnnnnnnnnnnnnnnnnnnnnnnnnnnnnnnnnnnnnnncaccttgaggcagaaaattagcagatatcaggacctaaactcgacacttggaccaaatcattctaataaacatatatgaaactcttcaatctgaaacctacatagtatatatatctttctcatcaccatgtgtcacatactctaaaattgaccacgcaatcagaaacacgacgatcctcagcaaattcaataatcccgaaatcataccaaatgctcacttagaccacaacttgataaagataaagatataatacagggctgggcacgatggctcatnnnnnnnnnnnnnnnnnnnnnnnnnnnnnnnnnnnnnnnnnnnnnnnnnnnnnnnnnnnnnactatcctggctaacacagtgaaaccctttctctactnnnnnnnnnnnnnnnnnnntttagctgnnnnnnnnnnnnnnnnnnnnnnnnnnnnnnnnnnnnnnnnnnnnnnnnnnnnnnnnnnnnnnnnnnnnnnnnnnnnnnnnnnnnnnnnnnnnnnnnnnnnnnnnnnnnnnnnnnnnnnnnnnnnnnnnnagactccatcatttctaggcttccagggggtcctggagtcttagctgtgtatctcccaatatctgcgggtcacagggccacacaggctgggcctctaagaacaaaggacacagaaatgaagacgagacctggagctctggctgcagcaagagccaaacgccccgccatattccggaaaccgtccccggccgtaatggccgaattcccgggcatatgtccggtaccgtcgactgnnnnnnnnnnnnnnnnnnnnnnnnnnnnnnnnnnncgccgcttcctcgctcactcgactcgctgcgctcgtcgttcgaaaaagggagctagcgccctatagtgagtcgatacag

SEQ ID NO: 132870 - DNA, 1047 bp, Homo Sapiens
  misc_feature (199)..(200): n is a, c, g, or t
  misc_feature (203)..(219): n is a, c, g, or t
  misc_feature (236)..(237): n is a, c, g, or t
  misc_feature (240)..(240): n is a, c, g, or t
  misc_feature (244)..(337): n is a, c, g, or t
aactgcaagggtttagggcccaaatttaatttccagggcccctcttgtactgccttgtgataaaaaaccccttatttgtccctcggggggcccttctgggttttattatgcaagacttggtttccctccccgcgtttttctattgcccaaaatacaagcgttttccctgtgccctggtggtcctgggggccccccaacnntcnnnnnnnnnnnnnnnnngggtccgggggcgctannganatgnnnnnnnnnnnnnnnnnnnnnnnnnnnnnnnnnnnnnnnnnnnnnnnnnnnnnnnnnnnnnnnnnnnnnnnnnnnnnnnnnnnnnnnnnnnnnncaagaggtaataggtgtttattaaaaactttttcacccagaggcagttaacatttataacttaaaacccagcccactacaaaaagggatgggagcaataaaaactgtgcaacattgaccaaaggacccagacagacgaggcccgggaagggcagcccaggggactggggtctctcctctcccgaggcccagagcagctgcattgtgggaagccgggatgcccccagcccctggcggggccctgtgcaccggcctctccggttggggcagggacccccgaaaggccatcagtagtagtgtgtgctcatcgcgcagcctggacgctcagccactcactctgctccgccattgctgaggctgcaccccacggcggctcgatgtgaacgccagttgccgctctctcatcactgagcagagcgcgctccatcaccaggccgggctgcttctcctcgccatcactctgagtccctgagttcctggctcggctcggggccttcttggggcccgcaccgttaccagggcggtggttcttggtttctgctgaatccaccagacaccggggctccaccagccacttggtggagagagagaagcgctccactccgagggtgagatcaggtagaagccttggccatatttggtgaagacgcaggaggcgatgccactgacgtcctcccggcggatgcagctgtagcgcacctggggcttgag

SEQ ID NO: 132871 - DNA, 1526 bp, Homo Sapiens
caagaggtaataggtgtttattaaaaactttttcacccagaggcagttaacatttataacttaaaacccagcccactacaaaaagggatgggagcaataaaaactgtgcaacattgaccaaaggacccagacagacgaggcccgggaagggcagcccaggggactggggtctctcctctcccgaggcccagagcagctgcattgtggaagccgggatgcccccagcccctggcggggccctgtgcaccggcctctccggttggggcagggacccccgaaaggccatcagtagtagtgtgtgctcatcgcgcagcctggacgctcagccactcacctctccgccattgctgaggctgcaccccacggcggctcgatgtgaacgccagttgccgctcccgcggtctccctccagtgtgctctggatttccttcaggactctctcatcactgagcagagcgcgctccatcaccaggccgggctgcttctcctcgccatcactctgagtccctgagttcctggctcggctcggggccttcttggggcccgcaccgttaccagggcggtggttcttggtttctgctgaatccaccagacaccggggctccaccagccacttggtggagagagagaagcgctcaaactccgagggtgagatcaggtagaagccttggccatatttggtgaagacgcaggaggcgatgccactgacgtcctcccggcggatgcagctgtagcgcacctggggcttgagcaggggcagcgagaccacctggatgtcgcccaggttggtaaggactgccaggtggtgctccccgtagtcctcggctcgacgactgccgaagtgggccacgctgacccgccgcactcttgagccctccagggccgtcagcttcaacttcagcttggcactcaccttgggcagcgtgaacaccttgaactgctcctctgatacgacgagcagctggtggcttccctgcatgtcagggctcttcgacagatcatgggccacttcgaggggctcgggaaggggtacgctgtgtccgtcgagcaccaggatgcccaccaccggcgcccggtgcatcagctggatctccttggcctgctctgcccgcacaggctcatccattctccgctcggcgggaggcacacgcagggagaaggcatagatggtgcccccattggtgccagcccacagcgaggggcagtgccgggagctgtccttcaggtaggtgtcagcaaagtacagggtccggacgaagcctgtgaaggagtcctctgccgagcgagcctcgatcttgcgctgcacaggcgccagctccatgttctggaggcctggccgctcagccttggcactcccctcctgtgcctctcctggggggccagctgggtgccgcttccggctggacacccggctccgacgcatccggcggaatgactgacgcaagacttcttgaggacttgacgcgggagagtgggccctccaaggccagcctcgtgccgattcaaaccagcctcgtacctagctt

SEQ ID NO: 132872 - DNA, 457 bp, Homo Sapiens
  misc_feature (94)..(94): n is a, c, g, or t
aattttaataatatattttatttaaatcactatatccaaaatattatcatttcaacctgcaagcaatatcaaagattattgagttattccacanttttttttcatgctaagtcttggaaagccagtgtacattttacattcaattcagaaggctcccttcttcatacttggtggccacattggctcatggctgccatactgaacggtgcacgtagagactcaggtgactgaaagaggtggacaaggttgatgaaggccgcaacgaagtaggaagaaagtgcagcaggttttggcatgtgaggagacacttcagtgatccaaagtacaatgatgttaggtcaggccgccagctcatattgccaaaattgcagctttgtagatgattattaagatgggcccaagaaaacagtataacattcagcatttcagcagaagtcttttcctatttccacagtca

SEQ ID NO: 132873 - DNA, 859 bp, Homo Sapiens
  misc_feature (432)..(476): n is a, c, g, or t
aaaggacaggaaagtctttaattgaactaatgaacttccaaagcctctgacattctgagagaacctggatttttatttccaaagacaaaccacacaagctgtaacttgcagataaaaacttatatggaatttcaaattgcatgaagtttaaaacttcatgaagtttcacattaaggagcggaggcttctctctctcgtctcatagaaacaaatcctgaaaatactcatcaaattcttcttcctgtgatttttcatctgtctctggtagtggacccttccaaagttcagattctgaagcactttcttcctcatcagagtttctaagtagagaatcttcagatttctttgaagatgaatgtcctttatcttttttcttggaggcctcttctgcagaagataatctggattttttatgtgatgactcttcacagnnnnnnnnnnnnnnnnnnnnnnnnnnnnnnnnnnnnnnnnnnnnnctcctgtgatggaaatttaatttaatggaacattcttggcataaccttaatttaacaagtgcatttctcttctcaccatgctcaatataaccaaaattaacttcccaactctttaagccttcttttttatcacaatatttatttccacagaaaaattgaccttttcctgaaattacttctttttctactcgccacctaaatccaaacttattttctttatatttactgagatctgctatgcagtattccttaaataatttatcatagtatttcttagcaagtctcttctcccaagtcatgtccatttcgtcctcctcattccataggaatctatgatttctcgtataacatccaagtctgtcttgtcattttcccccaaacct

SEQ ID NO: 132874 - DNA, 654 bp, Homo Sapiens
gacttgatttcttttctcctgtgatggaaatttaattttaatggaacatttcttggcataaccttaatttaaccaagtgcatttgctcttctcaccatgctcaatataatccaaatttagcttcccagctctttaagccttcttttttatcagcaatatttatttccacagataaattgaccttttcctgaaattacttctttttctactcgccacctaaatccaaactgataataaaaaaattacatttatgccaatgtaaatttaaattatacagaaatctaaacatggagccaacaatgacattcaccaacctaaaaaataaatgtaattcccatcatgacagatttttctcttcttataggatttgaagaaaatacattgaacaatcaccaatttatctgttaagaaccatctactttaagatagcttaaaagttataggtgccaggccacaagatacctaagttaacaaataatatatcctgttctgtaagactgacaagaaaaaaagaggttatggtatagtaaagaggtagtatattctagtacaaaaaagtacagcctttggagtcagattatttacatttgcattttagctctaccccggccgtaatggccgaattcccgggcatatgtccggtaccgtcgactg

SEQ ID NO: 132875 - DNA, 1028 bp, Homo Sapiens
  misc_feature (47)..(47): n is a, c, g, or t
  misc_feature (98)..(98): n is a, c, g, or t
  misc_feature (186)..(186): n is a, c, g, or t
  misc_feature (215)..(215): n is a, c, g, or t
  misc_feature (803)..(803): n is a, c, g, or t
  misc_feature (825)..(825): n is a, c, g, or t
gaggattgatgatgagctaaagtgcttctaggaggaggcttagtggntagcaatcctccctctatagatacaggtagacaaaggagcttggaagtagngagcaggtcaagggtcaagatggctcaaggacagggagaaggcagacctaggcctgtttcagtatcaatactgagtgaagatggaagngacaaaagggaggcagaggtctgagaggngacagagttgatcaagatgacagcctggaaatgttaagacagggatttggatgaatctataatgtagtaaccactttctgtttaacatgctttatagagcattaggcacaacagcacatgcggttagatacaactgtttttagaagattctgaaagaaaataggaattgacacagtaagaaggaaagagaagatggagtgggtaaaatccagatcttatagccagggactttgatggagtgatggtgaagaaactgagaacttgcaggttaaaaacgcaatgtacagcaataagaaatcaacgttatagtccatgtccctcttttatatgggtgataatttcaaagtactatagccagagtcccaggaaggttctagtcacccttgtaccccaaaagccagtctttccttaggctctgagctcctcaggctagcgctggtcccagtctgcacatctcagaccataccctcttcctatacaggaggtggggcaggctttcagccctcaggtccagtgtggggagcggcaggagcaggagggctgggatcctccagctgcacatcatgcaggtgcactgtgggggtggtngggggtctttgcccacaccctnggtttgggtcggcttggtcagggtggtgcctgcgtacgtgcttgaccacctggaacttttgcttggccttgtagttgcagaggcggcaaaagaaggggtggcggtcggtgtgggtgagggcatgatggcgcaggccagcagcccagcggaaagcacggtggcacacattgcacacatagggttttggcctcactgtgcttgcg

SEQ ID NO: 132876 - DNA, 658 bp, Homo Sapiens
ttttactggtttcaacttcaaaacactaccgtctggtttctgatctgtggactttgctaaagtagtttcatcccaatgtacaggaaatacaggaaattataatcagcccacacatcaaaaatgatagtatacccgttagcttcttcaatactaacatatatagcttcatggtagcatgtataaaaatgttcagcagtaccaactgccaaaccagtgtcagtggatagtacagtcagtcctaaagaggcagcaccccattaaaagaaagttgcatctattttgctcagttgtagccaagtgaacccatgctaccaatttcagatagaattgttttaagcttatttaagaaaaacaacagcctattatcaaaaagtaaattactgtttgaggctacttcaacctgaatggagtctttcagtgttggtgctgggttttcatgctagaggttaaaattttaatctacttaagtaaaaatttttttgcatacccaattaaagacataaggcatacactgacattcaacatattccaaacaatatggcaaccatctgactttttagtcacacagttaacgtcatctttacaaacacccaaccagttcagtcaatttggcaattttggaggaaaaggtcagtatgatggtttcattcctcgtgcc

SEQ ID NO: 132877 - DNA, 815 bp, Homo Sapiens
  misc_feature (630)..(681): n is a, c, g, or t
ggaccacaatttattcaaagtttatcagcaaaatttaatgacatttcaggttaaaattaaaatgagtataagaagttatagccaaatatttatttgtattagcaattcaataaacaaacagaagctccatcacttttaagtagtattcatttagaggagtaataattggatgggaaggtggtgagcttagtagctcttacatggtgttctccaatctacaaaaacttttttccccttcaaacaacacataataataaagctaacaattatatagtgtttgccaagtaccagatactcatcaacatactttacagatttgaactaatttcaaccacacaataaccatgtgaggtagatgccatcataaactccattttgttaatgaggggcctgacacagagggcttaggaacttgtccaaagccacacaaataaaatgaagcagaggtgggatttaacccatgcacattgacttcagagtatacacacaaataaaaagctgttttgtttctcctgcatagcaaagtaataaacagtactatcaggtgggaatgggtaaaatttacatttgaataggggtttcgttatttcaaagttttggaaacaattgcaacaaacattgtactggcannnnnnnnnnnnnnnnnnnnnnnnnnnnnnnnnnnnnnnnnnnnnnnnnnnnagagatgggaccttgctatgttgcctaggctggcagatttgcactcttgggctaagtgaccctcctacttcagccgccccagcagctgggattatagtagtgcgcaccctgcctggcttaattcagttttctta

SEQ ID NO: 132878 - DNA, 761 bp, Homo Sapiens
  misc_feature (302)..(317): n is a, c, g, or t
  misc_feature (403)..(436): n is a, c, g, or t
gtcttatactaaaataagaaatcagccccatcttggcacagttctcatgcagaatattgcacccagtgtgaactaacgctagaagcttcaaactgtataaatttaaatgtatttgcatattataaaaataaagataaacatatacatattttacactagttatggaacagcaatgaacgtcagtcgatccctctttcacatttaacagaactgaaatctgagtgctctaaatactgccacctgtactgtaactatggcttatatgtgcacggaaaacaaaatccctgagaagccattcgacnnnnnnnnnnnnnnnncttttcttcaagtagcgcgctccttggaggatcacagttctgaggttcaggttgtaaaacatttgctccatgttctcgtccatgcnnnnnnnnnnnnnnnnnnnnnnnnnnnnnnnnnngtcatccaaaaagcaccctgcaagcacgcgttgtcactcaagttcacagaacacgctggggtgagtgcagagggtctgccaggtgcaaaagatggtccaggtgttcagatgctctcttttctccatggaaattccacagccacaaacgtcactggtttctgtgcttttcaccaacattcttcccttaaaaattggtgctcctaaagtcacagtttgggtacagtaaaaatgatggcataaggaaaagaagcactatcttttccacttaattttccaagaaagtatgaagatacttggaacaggggctgatcacagtcggcgtggg

SEQ ID NO: 132879 - DNA, 532 bp, Homo Sapiens
acaagggggatctgtggtttgcgggccttgttttactgagatattcactttattgcagtggtctgaaacggaacccacaataactacaaggtatgctggtaaataccttatttttaacaaaaagtgaaaatgatttccctgttatttactaacaaatagaccagacatttgcatcagacagtgagcataaacttctctgatcacctctcaagagacatctcccatttctcttttgactctcctcaagatttcctgtaagaccaaactttatcttccatatgtctcacaggtcagtgttcataataaccatcagttatacaacagcaatttaatgaatctcagagtgaagacaaattgccggtttctgagtagagggccaggataggtcacctggatactcattgaaactaatgattctcaacttctcctgccttcaactcaccagaggaatattagacatccacttgttagtggttctctatgggggatagtagaggaaagccaaatttgggcattaatagaacaaatctta

SEQ ID NO: 132880 - DNA, 943 bp, Homo Sapiens
  misc_feature (253)..(746): n is a, c, g, or t
cccaggctagtctctaatgactggcctcaaatgattctcctgccttggctcccaaaatgctgaaatgacaggcatgactatatcctttagtcattcatatctttagcagagtgatttgaatcagcttattgaaataatagctaccaactgctgagctcaactccatggtctcttctgcatagggctgttataagactgtgaaaacacagtgttgtatgtaacacgctagcacaggcctcgtgccgaattcttnnnnnnnnnnnnnnnnnnnnnnnnnnnnnnnnnnnnnnnnnnnnnnnnnnnnnnnnnnnnnnnnnnnnnnnnnnnnnnnnnnnnnnnnnnnnnnnnnnnnnnnnnnnnnnnnnnnnnnnnnnnnnnnnnnnnnnnnnnnnnnnnnnnnnnnnnnnnnnnnnnnnnnnnnnnnnnnnnnnnnnnnnnnnnnnnnnnnnnnnnnnnnnnnnnnnnnnnnnnnnnnnnnnnnnnnnnnnnnnnnnnnnnnnnnnnnnnnnnnnnnnnnnnnnnnnnnnnnnnnnnnnnnnnnnnnnnnnnnnnnnnnnnnnnnnnnnnnnnnnnnnnnnnnnnnnnnnnnnnnnnnnnnnnnnnnnnnnnnnnnnnnnnnnnnnnnnnnnnnnnnnnnnnnnnnnnnnnnnnnnnnnnnnnnnnnnnnnnnnnnnnnnnnnnnnnnnnnnnnnnnnnnnnnnnnnnnnnnnnnnnnnnnnnnnnnnnnnnnnnnnnnnnnnnnnnnngtcagatgtggcgaaccgaaggacataagaacaggcgttcccctgaaagtcctcgtgcgcctctgatcgacctgcgctacggaactgtcgcttctcctcggagcgtggctctcaagtcgctgtagaccattcgtgagtctcccaatggtgttgaacccgtcaccaccggctacggatagctgtcacggagacatacc

SEQ ID NO: 132881 - DNA, 748 bp, Homo Sapiens
  misc_feature (30)..(31): n is a, c, g, or t
tgcttgtgcatttgttccattctctgtcanntacgccaagaacctggacaacttgtagtcaagaccgtccactggtaacaccctgagcacggtatttgtgatgacatcaaggaagaacacactgtggaattagacactggctccccaagtgaggagttgagcagtgctagagaggtaaagaaacagacaatcttacagaaggaagaagagaggattcagccaactaaaaccccttcatcttctcaagaacccccaatgaaggaaacttggggggagatgagggcaaaggatcaccaaataatgcttcatcctccatgaatcctgaagtgaggcttagtagcccccagggaagcccaaagactcatccagtgttgatggtcagtcagtggggaccccagttggaccagaaactggaggagagaaagataggccagaaaaagaggaagaagatgactttgatgacctcacccaaaatgaggaagatgaaatgtcatcagcttctgaggaatctgtgctttctgtcccagaactccaggtgagagctagagaatactctcaagtattttgtggactcagtaatatgtttaacttattgatatgccacctgcttgcttgctgcactatggatagtcctaaaatcatttgtatttgatttgtgaatgcattatgggacatgattgtggagttgaggtgaaatgagatggaaaggatgaaattttacttattatattaaactcgtttacacatt

SEQ ID NO: 132882 - DNA, 652 bp, Homo Sapiens
gattgaaatttgttggatttatttctttctaaagtttgtacatttacatgtatcatatacatattttaaatccttcactattttgcgtgatttctattacataaaaaccatttaaatgcaataaattttgttgccgtaaaacaacaaaatatccccaacttataaaaacacaggaacaattatattcataaacatttacacaataaatgtactctatatatcacagcttctatacatatcagatgactcacttgtctacaaggtttagatttacttgaacaacagtgaaatagggtaatatttatatacaactattttaataaaaaataaagcaattgtaaaatgtaaacttaattgtcaaaatattctttaaacactttaacaatatccacacaaattactgttcctttcaaaagaagaccaccacaaacgccatcgttttctagaagacggcatttccagaatctggtaggtggtgatgaggaacaggtttccagtacgtgttatagtaccgccagcttacccaaaactgctaatgccgacagtttcgccattgaaaaggagcaggctgctattttgtcactaattactttcacaatttgcaggggacatatggcaccaggactgcaatagaactgaaatgattggtgga

SEQ ID NO: 132883 - DNA, 1065 bp, Homo Sapiens
  misc_feature (41)..(71): n is a, c, g, or t
  misc_feature (698)..(767): n is a, c, g, or t
  misc_feature (789)..(789): n is a, c, g, or t
  misc_feature (1004)..(1004): n is a, c, g, or t
ccctcactaaagggaataagcttgcggccgcctgctcaggnnnnnnnnnnnnnnnnnnnnnnnnnnnnnnnacttgggtaatttgccaggcatttattgattgaataaatattgtactatattcagtgtatcaatgaatgcttttggttgcaaggaacagaaatgactttaacagtaagaaaattacatctcataactagaagtcaagagacaaaagagctcaacaatgttgtaagatccaggtgctttccgtccctctgctgtgacccctcagtgttggatttccttgtgctgcaggtagcaagacagaagcagaatgtccgaggcatcatgtttaggcaggacaatgttctgagacatttttttcccctcctgtggctttctcttagggaagaggacactttttctagattgcccctgcagactcacattttattgagctgaatttggtcacatgtctatccctaaactaatccctggccaggggaatgggatatgcctttggactactcaggcccaacatggggtctaaaggtggggtcaagcttccctgaggcaaaggcctgatgggtgaagggctgatcacccttccaaacaaaatttgggctttgttaactaggaagaaaaatgggagactagaagaaacctgtaggcaatcacacagggaccactccattcagcaaatgaaggtctagaannnnnnnnnnnnnnnnnnnnnnnnnnnnnnnnnnnnnnnnnnnnnnnnnnnnnnnnnnnnnnnnnnnnnnctcaaagtgtaatgtgcatatnaattgcctggggatcttgttaaaatcatattctgcattttgcacaagctcccaagatatatagccactgctggcttatgggacacactttgagtaggaatgatacagaccttcaatttatgactcagatctcccaagtgatcctgggttggagacttgggtcaatgtgggtgacatcaaccatgtcaagatgggattcattcatccatcactcantaagattcatagaaccaagctttggtgctacggtgaaacaaaggggtcacagctataggga

SEQ ID NO: 132884 - DNA, 775 bp, Homo Sapiens
  misc_feature (21)..(21): n is a, c, g, or t
ataggcgactgcccctgtctntcagaatcaaatgaaatcgtcttctgtgtcagctgaatacgagctcccttgacctgaagcccatttaattttcagttccacgtgtttcctccctggcaagaaaattaaggaaagggaagtattatccctaagtttagttccattcttgtatttctttattctgacctcttaaaaatgtcaaaaatccctattatgaaaggtaaaatatagcactgtgtcaagagtatatactaaatgatttaattgggccattgagtgctgttttttccatttttaaaattcaaaagtagtaaatattcaactctgtatagcataaaggaataaaaacaactgaaaatttttgcccatagcatcatcacccagtcctaatccctactaatattttggtgcatttaatgctagaattttttattgtacctacacacatttgcaaaaatgacctttccctatagcactattattactgaagcagctctgtcacttttaatgctgttttaactttttaaaagtgaatagtagctatatttgagctgtagaatgtatttaaaatattctctagtgttttaagtgtatttaaaaatatgtaagaaatctaatttaaaaaaacatgcgaaattctattcagatgttatttttctcaagttcattttccttttgaactaaaagcaaagaaatgttggccaatagtcattcttttcatggcctcagcttggtaatctaataagggagcttctcagatacatatttcactatg

SEQ ID NO: 132885 - DNA, 1269 bp, Homo Sapiens
  misc_feature (425)..(453): n is a, c, g, or t
  misc_feature (1122)..(1122): n is a, c, g, or t
  misc_feature (1229)..(1229): n is a, c, g, or t
tttgagcacataaggcttttaatgtttgtgacattctcatctcaccggtaaaataatgtgacgtgtactggaaatagaaagatgggtggagaccatcctctcctagcaccctcaacccaaaacccaagcagcaccagcagcccctgcccaaacattctgtttctccaaaagcctcccatgatgggcatggcatcaccacactggaattcttcttaggttctttattagtttttcagcacagttaactctttctacgttgactagagttttgttttacattttatcatctcatgacagcagccaccagaatacacaaaattaggctctttactttgtgcggagaagaaaataataaacattaaaagttcaccttgaccaaagagacaacctccagaagaacaccacacatgggaggacccgatgtnnnnnnnnnnnnnnnnnnnnnnnnnnnnntataatgtatagatatttatagatacatctggaaacagcaaaaaacaaaattccaagatttgcagtgttatctacagtaagagggatgaattctaccagctttcaaacagtcacattcagtattcagaagaagcacatgagggggtagaactgggcagaaactaacacgccaccaggctagtcatggcttaagattatagaaggggggtgatgtgtgtagaggaaatacgcatataggtgtcctctcagcctcagaacacccgccacaacccttcccccgtccacagccctgcatgttttcactgctctctcccgttttggggtttgtgattattgatttagggtctgagacaaatggctctggtttctgggccgcaagatgctatggggtaaggtgagtggatggaaagcatacaacgcagtcctgggcttcaggggacagcaggaggctggggtgtaggggaagcctttctcttctacctgacccttgttcatgtccagaaccttcagcccccagtaagccccagcccaggcggctatggggtgtgggactgtagaagcctcgctgccttgggccagttgactaaataaactctctcttccttagtgatgcgtccggggcacactggcacagcctggccagagctctgcctgaaacaccacactgcntactgatggcgttgccctctggggaacctgggggcaaaaaaggggtctccaggaactcagctacccctgcctctggccacctgcgggctcccaagggcagtccaacngaagttctcaggggcacacacaccacacatgggctctctc

SEQ ID NO: 132886 - DNA, 703 bp, Homo Sapiens
  misc_feature (692)..(692): n is a, c, g, or t
gattgaaaaaaatatgaaatttaattttagacatggcaagttcaattacatcacttcatatcacagtagaaaatataatttgttctaccatgggaaatagtataatggaatagatcacaatagtagtataataaaatagaatatccaagtgcaaaaacaattttcaagtaagtacacacactgtttgaaggtactttattaagatcaaagatttttcattacatttatttataaatccttcctagtcaaaataaaataataaaaatctgtatctttagaaagaacatagttttgtaagtctgagaaggttatgtttgtcagtttcaaattattacagtttagatacattcaatcattacacaataccaggaaggtcagccttaaagataccaagaacttccatattggtcagtaaaataagggtaaaaaattaaattttactttcacctttttatgtttgattgactacagtcaataataggagtacagaatttactttttggtcttgatttttaaatatatgaattttaaaaagtgaacgttcctcttctcttacatagtggctccaacttagggagctggcttctggagggaggagtgctattctccttgctggagaaggaggctgggggaagaaagtacagaattcaggggctttttgctgccgttgtcaatgaactctcggagttggncctgccttatt

SEQ ID NO: 132887 - DNA, 253 bp, Homo Sapiens
tttctgtccaaagagtgaggattacatacgtagtctccgacctgcaagacgatgagatggtttaattatctgccttttctccccccacccccacccagcagcttcctgtcggacagactgaagcctggctgggctagtgacggtaaaaatcactgacagcaccagcaaacactgtctgtggtttcaaaaccatggagggaatgcaagggacgggtcagtaaataaatgaactcagcaaagctgcttcttcctc

SEQ ID NO: 132888 - DNA, 335 bp, Homo Sapiens
ttttttactgagcaaatataatacacagtctttatgcttgtgtttgaacacaatggtcaggggagtttgtcctgctgcatttttgcattccaggcacagcacactgtagttgacaaaggccttcagaatcaacagttggcctgcttctgcggctgcatgaatggggcatttagagacatctgcatgaagggcttcatggcaccatgctcgataggggtgaacaccgactgcctcgtggggccgcgcaccctgcttcagggcccattcagtgagttcaatgtacccacaaaaagcagcaatgtacagggctacccttttctgatacttgagtactg

SEQ ID NO: 132889 - DNA, 2088 bp, Homo Sapiens
ttttgaaagaacatgtattgaggtaccttttattggtataagaacgtaagttccagattaaccatgtcattgtttcattttcaccatggattttttttcacaaactcctttgaaattaaacagacttatatgtaaatgtctttctacattaaaactacttcccaacccacaaagaccccacttactactaatttctggggaatttcgtttactcgttttatctaatattaaaaaatcaacattttgccagcagttaaaaagacaaccttaaagttctcaaattactttccaccaaacccggaaaagaaaaccacccatatccaaaactttaaagcaataaaaatttctattttccaaaaaagtatttacagactgaaattcaaactctacattgccatcaatgtaattatacaagtgcatacaaagccctggaaaagaggaagtatttcattacaaaatatttatgatcaagaaaatattgcttgcctttaaataaagtggcagaaaataaatatgcttaaagatggccattttcacaagtaaacaaaaaagtacacatgtaagaaacaaagtgaaaatgcttgagcttcaaaatgactctagcagtgtttgcacaaatttgttttaaagcgaggtcttctgaagacttcctctgtttagttataaaaatacaaaaagaggctttagagaaggatttcaccaagccgaatgtgcgatgcacacagccatcagaccaagactgcactagcaacttccacctattgttgtgagcaaaaccgtacaccaaataatctaaaaaaattttcctgtttccgacaaagaaattcccaataactaagtgatgcagatcaaaactgactcgatctaatggccaccaaggagcagttctagatctaaggggacacttgagagccaaggggtcaaatccaatctcatgtgttttacacaagcccgaactcactttcagtctgtgtgaattacatctacctggacctccatttttgtcttttaaatccattttttcgctgtgccaagtatattacacatctgattctgtttccctatatcctctctctcttccctatgggcttttattggtctctgaagtccctggagatcttcagtgccagctccaactctgtgtcccagaccatgtcgggccagctctcagctttccttctgtcttctctacactcccttgaaatcccaacagacaaataccaatacagcagaaggtgaacaatgtagccaaaataaacactttctagttaaagtctttaaatagaagttttatcttagaggattcttcactgaaagctcatcagtcaagtcctaagaccatggatctgacaaaaacccatgttaaaacagcaacccgtaaaacagtctgctgcctatattagaaattacccagtaattgtgtcaaaaagctgttaacacaaaaaatgtacatattaaacaagcaaatccttccaaatgtatcatcaaccccactgtaaaagattgcacatgatagtcttcattttgtctgtaaggggaacaacaacaacaaaaaaacccagtcttcagatgcttgattcagtcgaacctggaagtgccacagccgaggcaggcactcgctctagttcaatgccatcaatgcccaatggcacaagctgggtgctgagggcatgacaagtgatggggaatcccaaatgtcacatctcagtcacaaatttctgccgtcagaggggactgggttgcatgtacaacacgggtggggagcccacactacttgaaggacttcggaaatgcgtgtcaaaggagcttggtgtgatcccaatcacggtatcattctggggcacttcgcctttcagaaagtcatcatcttcatcttccactatgtcctttttcatgggtttcttgaactcctgtagctcttcagcactcatgtcttcccacacctgataaataggatcaatgaatttctttgacctcttcagcacacagggatcaaaggggaagaaggtgtccagcgggtttgtgcagatctgcactgagtctcctccagcggtactcctaatgactggcagcatctggcgattgttc

SEQ ID NO: 132890 - DNA, 973 bp, Homo Sapiens
ttttgatgaggtgattaaaaacactcctttattgagtcttaaaaaataaacaccttaaagggacagcgtgaagctgagaagtagcatcccaacagcttgtgtccttgggagctgcagtcttctctgaaggaagctgcttctgttccacagacacagggcaaggggtgctatgtatgctttgtacatgtatcaagggtccctcctgggggtggcagagctcagttactctcgccatcactgctgatgatgccacgcatatgtgaccagtctgggggtgcgggacggggccgctcttcatctgagtccagggtccgtcggtacagctcccctgggggtgctgcttctcctaaagggttccaggctgtacgtctgcgtggccggcccgagccactgatgatgttcgcaacatccaaggaggccacctcagctgcctcctccctctgctccttcagggcccgacacttccctagggaaggggtacccttcatgcctagcgcttccagttctgcccggaggatactcaggcgctccttgtgtgagcaacaggagcccaacagcttcttgtagtttcgatgggcaccacaggcccgaatgtagcgcttcagcctcatcacagccgggtggtcctctccacggcgacctgagccagcccgactctgaattgaagcggaacctttttctctccgggtcgctacaaggggtgggaggcctcttgcccttcttggtaaggtccagtttgtcttccctggaagcggcttcatccacctgcatcttcagcagctcctcctccaccagccgcttcagtgcctgcttctcctcgggctccaggtggctgcggcccgagtgagctaagtacctccgccgcacgatggaatgcgtaagcgtgctgaggtccgggcggcctcggaagaagctacgggtgaactcctgcatctcctcctcgtgccgattaacacccagcctcgtacctagc

SEQ ID NO: 132891 - DNA, 1386 bp, Homo Sapiens
gactgcgcccgccggccatggctttggccgcgggtccacccggttctctgggggtccgcacgtgcccgagggtcggcgcccgcctgccgggatccaacgcccccgggacgccgggcgccgctctttgccttcccgcgcgttggggtttcccggctccttccctgtctttctgccttacagccctcctcctcccgtgctgactttcgccgcgcattgctctggttccggggttcgccaatccccggttgtccctcatcctcgttcgttgtcgttcctcctccaccttcctcctctctctgctctttcttctgggctaggatctcctcttcactctcctgttcactttccttcaggcttttagttcctttatttccctccaccttctttgctgtcctctgaacgggttctgcctcgctctcctcactttcttccctggcctgcttcctactgactgaggccttgcctggtgcctgcttctttaccacaggtttcttcctagtcttccccttgtaccccttttcctcctcctcactgctctcctctcccctctgtgcgggcaggtccctctgccgttcctcatcactgctctcctcaactgcctttgaggctcgccttggattctcctctttggctgggctgacttctgctgccaccccattctttgctgggggtccaaagtagtctgggctggaggcttcagagccggactccgactctgaattgaagcggaacctttttctctccgggtcgctacaaggggtgggaggcctcttgcccttcttggtaaggtccagtttgtcttccctggaagcggcttcatccacctgcatcttcagcagctcctcctccaccagccgcttcagtgcctgcttctcctcgggctccaggtggctgcggcccgagtgagctaagtacctccgccgcacgatggaatgcgtaagcgtgctgaggtccgggcggcctcggaagaagctacgggtgaactcctgcatctccttctcccgcgccattttgctcaacccgggattgacggctcccgcctttttttcttctcggcctccgtcagcgcgtttgacagcggctcgcgcacgcgcagtgctgcggcaacgtggggcgagggacgttggcccttggccgcggaccgcgtgggccgagaactttgccagacgagacttgttttctctgggcagttggagggtctcgcggctcctacccttttttggaacggatcattttaaaagttctcgttagaaaccaattcggcgccggcaccctttgggtgaaacctaatcagcccgcgacgctgcctttctcactggtcacgggcaacagctaggctgctgttatttcgcaaggcagaagagaaaaggcatcctcgcgagcaga

SEQ ID NO: 132892 - DNA, 1408 bp, Homo Sapiens
  misc_feature (77)..(217): n is a, c, g, or t
  misc_feature (690)..(771): n is a, c, g, or t
tctagaggatcgccgctgctccctcttcagcctctgagtactgggactacaggtgcacacctggatgattttaaaannnnnnnnnnnnnnnnnnnnnnnnnnnnnnnnnnnnnnnnnnnnnnnnnnnnnnnnnnnnnnnnnnnnnnnnnnnnnnnnnnnnnnnnnnnnnnnnnnnnnnnnnnnnnnnnnnnnnnnnnnnnnnnnnnnnnnnnnnnnnacatgttagctgggaagtagatgccctcaagaatggtggagcatatgagctgtccctctaggtcagtcccatggccacccagctccagccctgtctctaggtgtgtgaatcccttttgcacaacagagagcctggggaggtggaaggtcttggtgacaccttgtggagttattcacactggctgtgggtgacagagccagaggtgggagcacagagctctcacagcacagaggagtaaggagttgaagctgcagaaacaatgctgaggcctgaggtggaggaaaaggggtacaaggggaagactaggaagaaacctgtggtacagaagcaggcaccaggcaaggcctcagtcagtaggacgcaggccagggaagacagtgaggagagcgaggcagaacccgttcagaggacagcaaagaaggtggagggaaataaaggaactaaaagcctgaaggaaagtgaacaggagagtnnnnnnnnnnnnnnnnnnnnnnnnnnnnnnnnnnnnnnnnnnnnnnnnnnnnnnnnnnnnnnnnnnnnnnnnnnnnnnnnnngggattggaaacccagaaccaggagcaatggccggagaaagtcagctagggaggagaggagctgtaagcagaaaagccaagaagagctccaggaaaggcaggacacgaagctcctcttcctcctcagatggaagtccagaggccaaaggagggaaggctggctcaggtcgccgtggagaggaccacccggctgtgatgaggctgaagcgctacattcgggcctgtggtgcccatcgaaactacaagaagctgttgggctcctgttgctcacacaaggagcgcctgagtatcctccgggcagaactggaagcgctaggcatgaagggtaccccttccctagggaagtgtcgggccctgaaggagcagagggaggaggcagctgaggtggcctccttgggatgtttgcgaacatcatcagtggctcgggccggccacgcaggacgtacagcctggaaccctttaggagaagcagaccccagggagctggaccgacggaccctggactcagatgaagagcggcccgtcccgacccagatggtccatatgcgtggatcatcagcagtatggcagattactgagtctgcacccagggggacctgtactgttcaaggtatagacctggctgtgttgggaagac

SEQ ID NO: 132893 - DNA, 757 bp, Homo Sapiens
  misc_feature (641)..(651): n is a, c, g, or t
ccggaccccagccccccagaacccggccagggaaggtcagcggccctcccacagggcagtcggggggtcccaccgccatctgggctgcggtcccagcctcctaactggactccctgcccgcagcctctcccagatccagctcctccgcacggcagccagagcgcgcgctcttgagtttccggggcaggcggggccgtttctcccgcttgggcctcaggggactgggctcgggcagctgcagggccaggtagtcagaagggaatggggggtagcgggaggaggccatcgagctcaggtatggggaggggaccccggaggcctgaaggggaaaccctgttgaaggaggcagggagaggctggagggagagggggcgccccccagcggagggcttctcttcctcttaggggccggtgtgtcagacaacttgggtgtcccctccgtctcgctgttatctgatgatgcagtggcatctgagtccgaagagtcttcatccacgttctcgtactgcagaagtcggtctaggaggaaactcttgtcccgggacaccttcagtaatttcctttgcgctttcctcagctcctcctggaagcactcgtgctcgtagatgaggaacttgagcttccgcttcagattccggtannnnnnnnnnngtagtccacttcgccgtccgccggcccgttcatgaccggcccgggagtggcgcccagagtctgccctcccgctaccccaagcagtggctgccgtgccgctcccccc

SEQ ID NO: 132894 - DNA, 1370 bp, Homo Sapiens
cggggataaatccttttgtggcttcaggtggctgcggcccgagtgagctaagtacctccgccgcacgatggaatgcgtaagcgtgctgcagggacatggtgtcaggacggagtcccgacccacaccgcgccctttccaaccccatcgtccaaccccctgggcacctgcaggtccgggcggcctcggaagaagctacgggtgaactcctgcatctccttctcccgcgccattttgctcaacccgggattgacggctcccgcctttttttcttctcggcctccgtcagcgcgtttgacagcggctcgcgcacgcgcagtgctgcggcaacgtggggcgagggaccgttggcccttggccgcggaccgcgtgggccgagaactttgccagacgagagttgttttctctgggcagttggagggtctcgcggctcctacccttttttggaacggatcattttaaaagttctcgttagaaaccaattcggcgccggcaccctttgggtgaaacctaatcagcccgcgacgctgcctttctcactggtcacgggcaacagctaggctgctgttatttcgcaaggcagaagagaaaaggcatcctcgcgagcagatgaggaacctcggggataaatccttttgtggcttcaagtgtctaagtacattagagtcaggaacggcgctttccagcgtccgccattttgtggcgtcaccgcgtcgctgctacgccactgcttggggtagcgggagggcagactctgggcgccactcccgggccggtcatgaacgggccggcggacggcgaagtggactacaagaaaaaaataccggaatctgaagcggaagctcaagttcctcatctacgagcacgagtgcttccaggaggagctgaggaaagcgcaaaggaaattactgaaggtgtcccgggacaagagtttcctcctagaccgacttctgcagtacgagaacgtggatgaagactcttcggactcagatgccactgcatcatcagataacagcgagacggaggggacacccaagttgtctgacacaccggcccctaagaggaagagaagccctccgctggggggcgccccctctccctccagcctctccctgcctccttcaacagggtttccccttcaggcctccggggtcccctccctatacctgagctcgctggcctcctcccgctaccccccattcccttctgactacctggccctgcagctgcccgagcccagtcccctgaggcccaagcgggagaaacggccccgcctgccccggaaactcaagatggcggtgggaccccccgactgccctgtgggagggccgctgaccttccctggccggggttctggggctggggtcgggaca

SEQ ID NO: 132895 - DNA, 1079 bp, Homo Sapiens
  misc_feature (93)..(93): n is a, c, g, or t
  misc_feature (171)..(171): n is a, c, g, or t
  misc_feature (212)..(217): n is a, c, g, or t
  misc_feature (220)..(221): n is a, c, g, or t
  misc_feature (237)..(237): n is a, c, g, or t
  misc_feature (241)..(241): n is a, c, g, or t
  misc_feature (973)..(981): n is a, c, g, or t
ggggggcacgcacagggcgggagaagagaggggcccaaaagagaacggggcgcgacagacacgggggagagcggacacacagagagcaagganccccagccaggagcaaaggccacggcggcgcgcaaaagagggaaccggcgcccggagagaccgagaaccacgcccggnccgacggcccaccccccggggcgggaagggggggccagggnnnnnnccnnacccccagccccccangaanccccgcccaggaaggtcagcggccctcccacagggcagtcggggggtcccaccgccatcttgagtttccggggcaggcggggccgtttctcccgcttgggcctcaggggactgggctcgggcagctgcagggccaggtagtcagaagggaatggggggtagcgggaggaggccagctgcgggcgggagcggggatggagatgggaggcggaatggaccggggtgagggtgggggaagaaatgcaaacagaaggaggatggaaaaaccaaagagatggtgatgagtgcggctcccggggctcccgagcacagaagggccgggcagcagcaggatgctgtcctgggctttgctctcctcagtcaggcctggccccgttccgagctcaggtatggggaggggaccccggaggcctgaaggggaaaccctgttgaaggaggcagggagaggctggagggagagggggcgccccccagcggagggcttctcttcctcttaggggccggtgtgtcagacaacttgggtgtcccctccgtctcgctgttatctgatgatgcagtggcatctgagtccgaagagtcttcatccacgttctcgtactgcagaagtcggtctaggaggaaactcttgtcccgggacaccttcagtaatttcctttgcgctttcctcagctcctcctggaagcactcgtgctcgtagatgaggaacttgagcttccgcttcagattccggtannnnnnnnngtagtccacattcgccgtccgccggcccgttcatgaccggcccgggagtggcgcccagagtctgccctcccgctaccccaagcagggctccatccgga

SEQ ID NO: 132896 - DNA, 1421 bp, Homo Sapiens
  misc_feature (73)..(73): n is a, c, g, or t
  misc_feature (108)..(108): n is a, c, g, or t
  misc_feature (117)..(117): n is a, c, g, or t
  misc_feature (319)..(319): n is a, c, g, or t
ccgggttacccacctgggcttataaaagcattcttcaaccagggtgggattccaggaaaaaggtccacagcantttaccaagaaaaccaactgagggaaaaccatccntggagtttntcatggttaccaaattttctgggatctgaagccacttgttttaaaaagatgtccccttggaagatttgtcaatttttgttaatacaatcacataaggtaatgcaaatttcttcacacatttctatggcaatattgtctgttttttgaattccaacaacgctatccactaataaaaatgttctcttcaagttccttcgttctnttaggataggtctctaccatgtcaacaaaatcttcaggtgctctaaagccataacctggcatgtccaccactgtaaaatgttttccaactttgaaaaaattcattttctttgtgtgtcctggttttttggagactctgacttcaacctcaggggccagtgaaaataaagccttgattagagatgattttccaacattgcttctgcctataaaacacacctctggccgcggaaggtccggggcgtggtcgatacggacggcggagctgacgtagtcgatgcggttccgttcagtggccgtgaagatgttgtccgccctggctatgtcctccgggcttgggtcaaagatacgcaggtgaaggtcttgcctcccgtagggggcgaggaaccgctctacttcctgcagcgggtacagcagcttcctcagctgctgcttcggcagccgcagcacctcagcaaaagcttgggacgtgctattatagcggctcagtcgctctagcaccgcaggcatttcaaagagtcttcccgctcccagccgcagcccgggcgccgccattctcccttcccagaagaccggcagagagattttactcctgtggcctgggttgcgcgtgcgtgacttcccgctgccgcgacgcctgctgggagttgttgtctcctctggcctcgctcgttccggtctaagtgttttgccttcagtgcgcgggaggagggtggaggcaggcggtgacctgcggggaacagctcactgggtttctttaacaccgtgggcttaacgattatgtcttactggaaggatgtttaacggtttgcagaggtgaaagacctatctggccatgtggcctttgagtctcaagcgaaggactaaagtgtgaagctccgatgcattccaggaacgtttgattttcacagtttttggttatcttattaactgttgacgtttgtcgtaagtccgcagcactaggataaacacttttgcaaaaaagaaaagggctgatgagaaatgtgattgtaatagcacctcgttttcgtggaagggactgtttgtatttccgccttcactataggtgcaggaaatgtcattaaattttagagatttcttat

SEQ ID NO: 132897 - DNA, 840 bp, Homo Sapiens
cttggtgacaatgcagggaacccgtgctgagctctctgcacacagccccagtcgggcagcaggaaaccgaagacatgaacaaggtcttcccccagggagagaatggctacactgctgctgaatccaaagcccaccctggaggggaagcaggcggcggccacctctgctgctcacgtcgcggggcctgcctctctgcctctctgctgctcctcctggcaactgtggcggccctcatcgccttggtcaccattcttggactcccatcatgcaccccaggagcccaagcttgtataacactgacaaacaggacaggcttcttgtgccatgaccagaggagctgcattccagccagtggggtctgtgatggcgttcgcacctgtacccacggcgaggacgaggatgatagcttgtgccgagatgtgccccagagcctcccccacttccttgtggcgcactgtggagacccggcctcctggatctactccagaccaaaaatgtgatggcactaacaactgcggggactgttcagatgaagtgagcccagtgactgtgtgcccaccctgcggccctgggtggtggcgctgtccttcaaccttcttcaagtactgcgactgtataccgaggcatctctgccgcgaccatgtacagcactgctccgactggtccgatgagtatgcctgtcccggaccctgagtgggccactcaggccagcatggaaggctggctggaatggcactgataacccttcacatgaaaatcaaatcctagcgcacaagggcaggaagcagcctttgaaatgggatctacacatcatttctgaataggaattttctctcctcc

SEQ ID NO: 132898 - DNA, 756 bp, Homo Sapiens
agttcgacggagactcgcgtcgtctcgcgagagtccaagttaaagaacatggcgacgtctaatctgttaaagaataaaggttctcttcagtttgaagacaaatgggattttatgcgcccgattgttttgaagcttttacgccaggaatctgttacaaaacagcagtggtttgatctgttttcggatgtgcatgcagtctgtctttgggatgataaaggcccagcaaaaattcatcaggctttaaaagaagatattcttgagtttattaagcaggcacaggcacgagtactgagccatcaagatgatacggctttgctaaaagcatatattgttgaatggcgaaagttctttacacaatgtgatattttaccaaaacctttttgtcaactagagattactttaatgggtaaacagggcagcaataaaaaatcaaatgtggaagacagtattgttcgaaagcttatgcttgatacatggaatgagtcaatcttttcaaacataaaagacagactccaagatagtgcaatgaagctggtacatgctgagagattgggagaagcttttgattctcagctggttattggagtaagagaatcctatgttaacctttgttctaatcctgaggataaacttcaaatttatagggacaattttgagaaggcatacttggattcaacagagagattttatagaacacaagcaccctcgtatttacaacaaaatggtgtacagaattatatgaaatatgcagatgct

SEQ ID NO: 132899 - DNA, 537 bp, Homo Sapiens
tccctcccaacccctggtagatgttgaaatctcttaatcaactgatgtcttctatttatttttgtggatttataactttagactttacagtcgttttttggagttaggagggagaggagctaaacacatgtgcttaatccaccatattgaattacagtctgaaagtgtcatttagaaatcttgccgtttctagcactcttcttccttcctgcagatgcaggctgccatctgggatcatttctcttaaaccccgggaacttccttagtattttctgcagttcaggtctattgccaacagattctctcagcttttgtttgtctgaaaaatgtctatatttggccttcatttttctggtttttaaactttgtactttgaactaattttaagcttacagaaaaactgcaatagcaccaacaactctcaagtactcttttcagctggtaacatttaattgttaacatttggccacatttgcttaatcaatctctctgtctatgtatatgtaaatatacttagaccactacacacaccacatc

SEQ ID NO: 132900 - DNA, 2879 bp, Homo Sapiens
  misc_feature (337)..(337): n is a, c, g, or t
  misc_feature (684)..(712): n is a, c, g, or t
  misc_feature (719)..(719): n is a, c, g, or t
ggggcggagcgttaaaggtatgtaattgtcagcaatagggggctcgtggacgtctgtattattgtgggcctgtgtcgggtccgtcgttgtgtgtgttcatcgagtgagttggtgcttcgctggtggcgggtctcttcgcgggcgtctcagagatgtggtcggaggggcttttatgagggcagtgagggtgtgttttgccattgtttttgtgttgcgaggattggtgccgttagagtcttgatgtttcacgccgccgcgcggtgttactgggtagagtaaggtggagtgaggaacacaagagggacccaagacaggcacataaagattgtaaaagaanaaagtcgggggatcttacaggccatgtggagtactcgccccattgtttgtaataatagattttcccccttatattttatcccctttgaggggagtggcccctgtgggggggtttgtggcgtcgtaaagacaggtttcggggttttggacgagcggggcggggtgttgcccatttgggttggagtatgtttttaatgccccccagggggcagggagccagagggtcctcccaacggattggccggcctggtatgcatgcgtccactttcaactatgtggtggccgtggttcccacagagaattggtttagaatagcttttgtgaggggatgagggcgggtggtcatgnnnnnnnnnnnnnnnnnnnnnnnnnnnnnggttttnttccttatttcctttattttaatgtgtcaaaaaaacacttaaagatattcttgtaaatacatataagctgtgtgtcaacattcagtactatgcaaatcatttttcaatatgacaaaatgaaaaacttacacactttagggtagcgcttaatacttatctttgaaatctattgctgatgctaggtctaaagagcaatgactcaaccagaaaaaatagtaaaggctgccttttcctttttaaagtgcttattagctttatatccaaaaacaatggtttttacaaatacataatactgaaaggtgctcaaaaagtcaccacttacagaattgaacatgtcattttctaactctgcacatgtaaacttgttttatctgcattaatgaagattgcttcaaatggctctcaatcatatgcttcaaatcaagacagtgctaagttccagcagcataaacagtgacagcagaacaaaccccagcacattttcagtggatcacagcagatcagagaaagtgtaacagcttttgagtatgttatacatccaagagccttatatctcactccacataaacagtaaacataaaagaaaaaagaaacactttgtctccctatagagcattttatagtataggaagggattcaaattctctttttaacaaaattcttgtttttatatagaggagattttatattcttaatgtttacaacaaagcctatttccaccaaaaaagcaagaagaaattaataaatgaaatcctgaactctaaaaacctaagaaataaaactgtgaacaattctgaaacggagtgttttttctaaaggctaatacaaacataccaaaatagaaatttctgaggcccgaactatgtgatttcatttcaatcgtatcactttcctctggattgaaataatttagaaacaataagggccgatcttaatctcactattttctgcatgagactatcgttccgattcatcccctcaatacacaccactgtccaacagtcttacagtgagcatcctctcaggtccctttctgctcgctgaaccttaagctggttttacccctcctgtctctcttctccaaaatcctctatatatcttaagaagaaaatattcctttaaaaaatgacaatttaaatacagtgtgataatgctacatttgatttaaagtagtaataaattataaattgccaaataacttaatgtaattcacgatgcaaatccttggtataaaaataatccatattgccctgaatataataaagcaatccagtgatttttaaattacttatgaaataaaggcaaaaataagatgtaaaatactatttataaaagtcaggtaagaaaccagtttcccataaatctttttacaaagataaatgtaatgtggtttactacttttaaaaattgtcagggaggtttgcaatcagtgttttcaaaaatgactctagggaaactagagactgaattatatattattgtgatgtacaacatattaactatatatataacaataatactgcaatggggggtaattaagctacttcctaacaagtacatttctttttcaaagtctttactgtaactgattagtttttaaatgttagttttcaaaaacttttctacttgagatatttatgttagtaagaagataccagaagtctagaatagtaatcaaatgcctataaaataaaataatgattgttcttgcatgttctgttattgtgacaaatacacattaaaatagataacattgctatgcctggaaattaaaaatatccaaatctgttagaaagaagtggaaaaggaaagaaaaatcgaaaattcttatttaaaaatggatctgaagtccttgtatttcttaagagcttgacttgtcaaatcacagtttatcttctttctgaaaccaagttgtgtcttccaccattcattcacgtgatatgtcaattctccattttgtaggtctcagtttgaattttcctgaatatttgcaaaactggtactggacttgagacgtttgggcagaatgagtttgcgtttcttttgctctgagtgaagaaagctactaaggtagaagacaacaggtagaaagagaatgaacacagaaacagcaattacaggcactgtgtcactgcaagggactgaacagttgaaagatcc

SEQ ID NO: 132901 - DNA, 983 bp, Homo Sapiens
ggtatgcactctatgaagaattggaggcaaaggatcctgagaggacaagacaggtgtatcaagcctctttggaactaattcctcacaaaaagttcacatttgccaaaatgtggatactgtatgcacagtttgaaatacgacagaagaatctgtcattagccagaagagcattgggaacttccataggcaaatgtccaaagaacaaattatttaaagtttacatagaattggagctacagcttcgagaatttgacagatgccggaagctttatgaaaagttcctggaatttggacctgaaaattgtacctcatggattaaattcgctgaattagagacaatccttggtgatattgacagagcacgggcaatctatgaattagccatcagtcagccacgtttagacatgccagaggtgctttggaaatcatatattgattttgaaattgagcaggaagaaacagaaagaacacgaaacctttaccggcggttgcttcaacggacgcagcatgtcaaggtatggatcagctttgctcagtttgagttgtcttcaggaaaagaaggaagtttgactaaatgcagacaaatttatgaagaagctaacaaaaccatgcgaaactgtgaagaaaaggaagagagacttatgctgctggaattttggcgaagttttgaagaagaatttggaacagcttcagataaggagagagtagaccaactcatgccagagaaagtcaagaagagaagaaaggtccagactgatgatgggtctgatgcagggtgggaagaatactttgattacatttttccagaagatggtgccaaccaacctaacctcaaacttctggccatggccaaactgtggaagaaacagcagcaggaaaagggggatggtgagccccatccagatgaggacgtcgatgagagtgaatcctgatctttttttcatagacaaatgttttgttatttttataaattaattgtttgg

SEQ ID NO: 132902 - DNA, 2166 bp, Homo Sapiens
  misc_feature (2055)..(2089): n is a, c, g, or t
ttttgaaggagaaaggctttaataatattaaaaataggcaaggtaatgcttttcatagtatagtaagatttgcctaataccatcttatttctttgattaaaagttacttagcttcagcatgcgtgtacattcaaaatacaaaattaaagcatgagttgtcattaatttgcagaattctatgattgaagcctctaaatgaattgtgcaggagagggagtttgtaaacaactgactacagacattcacattgggtcatctttaaaaagctggactctgcttttggatgcttctcggaggcgagttggattttggactgaagtactgtcgttccattcctttttttgaggtgttatgagtggggctataacatcgccatcctgcggcttggtgaaatttctgtctgcacaccactgaacaaaatattgtcttgcggcatacaaactctttctgtccaccttcttacaatatactcgaatcagctgctctgcaaatttctctggcagaagttgtgaaacctggtttttagtaatcctgattgctctgttgggggcagtcttacaatagaagctaacatgatcaattggattcttttcttgcattccataatccatgttgataacatccactataaaatcttcagccttcagtttcacgtctagcaatactttgggtttagcactggcaacctcttttggaagagattcatagtcctcccttttaatctttatttgtcctgttggctgcgtctcacccacatacttgaatagattacggtattcaatttgttttaaaatctctcgtgcgtctttcaatttgggatcagtagagtataaaatctccagaaaaatgttatctgtcagcttagtataggcttccatgtcgtcaattgctgtagaaatgccgatacttttttcctccagcacctgtaaatctctatgtagtcatctgctttgaggaaacgcatctgtaatcattgtatcaataatgttgccaactttgtgttgataagctctacggtgtaaagagttgcgagtgtggaacatgtcatacagatttccaacttccttatctctagcacaaatacgcaactcattgtctacttcacagacacgggcaaacttaataaagcgcttgtaatcaaaattattttggattccaagatgatggcagtcctggcaaaataatcccatttgtccacatcaatgccatttcttttattagatactatctcataaaggaagcttttgttttcaggacgccctttatatggccacaatgaatcttcgacaggtgattcaagtggtcctacaatttgttcctttaataaagcaaatatcttcttcagggatgagaccatattgtttccatgacaggcttaattccattagaattaataaggtgctcaaacatcataactgagccttgttcatgcgtccatttcacctccgggcgagcaagtggaataaatcgtccatcaaacatgtgagaaaatggcccatgaccgagatcatgacaaagtccagcaatctgaacacagagaacatctcgttcacttatctgcagctctggttgtttttcacccagtgcgtgaactagacatcctgctagataccccacccctagactatgctcaaatcgattgtgtgaagctcctggaaaaacatagtaaccacctcccagctgtttgatgtatcgaagacgttgaaattgaggtgtatcaatgattcggacgaggagagggtggagctcaatgtggccatggataggatcattaattaccttcattgtatcaacgtggatttgaaccaatcgctggatataactaagcagcttcttcctctcccccaaggaacttactccaagattttcaaaacgagactcatcaagacaaggcagtaatgcgcctgtgatttcattttctcggatgttcttcagcagcaccggctcttcaaagccaccgcgcctgaggaaggagcacacctgctccggaccccatgtcttgtacccggccgtaatggccgaattcccgggcatatgtccggtaccgtcgactgnnnnnnnnnnnnnnnnnnnnnnnnnnnnnnnnnnncggccgcttcctcgctcactgacttcgctgcgctcgtcgttcgcaaaaaccgcgctagcgcccataggtgatcatca

SEQ ID NO: 132903 - DNA, 708 bp, Homo Sapiens
  misc_feature (668)..(668): n is a, c, g, or t
catatggaatagggttctgctgcttattcttggcttaatattacttgttcatgctatgcctctgaaatgtggcaaaagtccctgatacatgagctatgaggctgtcctcagggttcagctatgatagagactcagctggcttaggcttcatccactgccaatgaagtcaaatttataacagccaccttgacagtcgaagctaggccaagttaaaataattaattccagagaacttcaaagtgcattaatcagttaataatggagcaatctaaacttaaatagtcgtgagaaaaaaaggaaaccctgttaaaaattttaggggtgaaaatattgcagatgagggttatcaatccagttcatgacaatgtaaagaatggaaatgactactccaacatatgtcagagaaatgataactttgaagacttttaattcacagagaatatattcctgtggttactggatgttatcttcctttctttttagccagtaccacagctctccctctcaaatgaaaatctgatgtcaaaagctgtttcactgacctctatttggactagaaagcactctagtctttctagtcttaaactccttaacaataattaaatataactgaagttgttggattatgataaaactataaagcatcaattatatagcggaacatatanaaatcaccagagacatctttagatgaattcaattaaatta

SEQ ID NO: 132904 - DNA, 473 bp, Homo Sapiens
  misc_feature (207)..(215): n is a, c, g, or t
ggcacgaggggatttcataaaatgattttaatagaaaagtacaagatatgaacaaaaataaataatctttatctcatttctagcccagcaaattgtacactggatataaaaatggtctaagatgcaattttcctccattccttttttgcttttaaaatactgagacagcattttaattcaatattctaggttcaaactgatacattnnnnnnnnntcataccaacctttaatcattctacatccattttttaaagttagctaacaagattatgtttcactaaaataaaatatccaatcatcagattaaagtgtaaagtttgtgtgaacagggaaattagatcatttctctaagttttaattcctatgtttctgaatgtttcttgaattaaaaattcatttcatcatcttactttcaaaacacggcatctctctttcaccattccacagagagagaaaagactagaaatacttt

SEQ ID NO: 132905 - DNA, 658 bp, Homo Sapiens
  misc_feature (165)..(175): n is a, c, g, or t
  misc_feature (548)..(556): n is a, c, g, or t
  misc_feature (618)..(618): n is a, c, g, or t
agttaagcaaagaaaactttatttctgctacacgtaacaacatattgctctaaggaacaactactatattcgttttagcattaatgtatggattcaaaaatacatgtcagcaatccctgcttcccagacaaaacaatgctgtacacagactatcaggtatatggnnnnnnnnnnngctgtcaactgtccacagggaatgcgtccagtcacattttcagtcagtcagctgaggattatgtcattatttagtctttgttctcaagaatcagtaagttctttgccgtttgttagattcttctcttggcgaatctgccagcataactttaagtctcaccccattcagaatctttccatgtagagtggcaatggcatcattagcacttattctatcggcatacttggcataccccacattttttcctgacacaaggtaaacttcgatcaggttaccaaaacgacagaatatatcttctaatacgtctaaaggtaaaggatgaggattaaacacaataaaaagtctttctttcacaggagtttcagcaggagcnnnnnnnnngcatgatggaagtacaacatctgtctggatttgaggcaactgtgatccagagcttcctccanattgcataaattgttgctgacttgggttattcctcgtgcc

SEQ ID NO: 132906 - DNA, 513 bp, Homo Sapiens
gggtaaagaaacctttaatgaggattcaaggttaataaggaagacgcagagggccagcactcagccccaacctcctcacgtgtacatggctccatggaggttctccagtcggtgttgctgctgctgttttcgagccttatctcgtctgtgctcctcataagtgtcgtcatcagtgggcagctcatagcggcacaagggacaggaatttgtcttgcttagccagggcagaatgcagctggaatggaaaaggtgatggcaaggcatctcaatggcagtctcctcctccagcctgagagcctctgatgactgtcctggggaggttctcaaccacagtcttggcagctggtggaggcaggtggtggtcccaatctactaccaaccccaagtcttcaaagtccatcctattgaaaagtgaccttgcgagctccagcagcatgttggttcgcgtctcctgctcagggtccgacggctcgcagtcgtgttcatcgaaataggacgccatggctgcccccc

SEQ ID NO: 132907 - DNA, 620 bp, Homo Sapiens
cgacattttttatggcggtaggtaggggcttttgggggggtaaagaaacctttaatgaggattcaaggttaataaggaagacgcagagggccagcactcagccccaacctcctcacgtgtacatggctccatggaggttctccagtcggtgttgctgctgctgttttcgagccttatctcgtctgtgctcctcataagtgtcgtcatcagtgggcagctcatagcggcacaagggacaggaatttgtcttgcttagccagggcagaatgcagctggaatggaaaaggtgatggcaaggcatctcaatggcagtctcctcctcctcaaattccaaaagacacacggggcacttgagctcagcctgagagcctctgatgactgtcctggggaggttctcaaccacagtcttggcagctggtggaggcaggtggtggtcccaatctactaccaaccccaagtcttcaaagtccatcctattgaaaagtgaccttgcgagctccagcagcatgttggttcgcgtctcctgctcagggtccgacggctcgcagtcgtgttcatcgaaataggacgccatggctgcccagccttctgacacagccctcggaccctgctcgataccc

SEQ ID NO: 132908 - DNA, 842 bp, Homo Sapiens
  misc_feature (1)..(1): n is a, c, g, or t
  misc_feature (727)..(727): n is a, c, g, or t
  misc_feature (735)..(735): n is a, c, g, or t
  misc_feature (828)..(828): n is a, c, g, or t
ngcttctatatttatagtttgacatttaaaatttagtcacacttagagttcaactttactactctactactgaaaatatagagtgtatgaaggatttcctccaattacatgattctaaattgtcatatataaaacactttattataacattctttaatgaagatataaactcatcaagtaaattacaaaggaaacaaaaataacaaggacaaaattacatagtttgatacctcatgagacataattaaattcttctcaaagtttagctgaacaactaactatacagtaatattttcaaaaacctgtttgttttatacaaaagaatataccctaacacagtagagtctcataatgccttggcgaacaccaatttgatgctttaagattttaatgtattgttaacaaattttcaaactcaggcaagtttagaaatgtcttcatattgaattccttcaactctgcgtccttttaaagggccagtttcaatgacgatagtagctgaaaaagtcttctcattgatggattctagggtaccttcatttcctctgtagcctccatttaaaactagaattctttttcctggtgctggaattactgtctctaaatgagtctggtcaagtttcagcttgtctccagaatcaatcatcttcacaacagctgtatatttgtcaattacttccttaacaatagcctttttcttatgatatttctctcgcagtttcttgtntataattntcacaataatttcaggctgtagccagtagtctggttcgggcagtcttttctttcctcttcatctccatgatttcatccagtgcagatttcttnttctttctttcttt

SEQ ID NO: 132909 - DNA, 145 bp, Homo Sapiens; identical to SEQ ID NO: 119575

SEQ ID NO: 132910 - DNA, 568 bp, Homo Sapiens
tttttctcttaaaaagatttattatcaaaaagtttgctccctttaaatactgagccaattcatcaatgcagctccattctttttaggattattagggcccaaataatttcagactaaaacaagaaataaaaaaactggactataggttcagtaacatattcacagacatgtcagtgtgcactcaggaacactggtttcatttcttgattggaatgcttatcaccataaaatcttctgctagagtcacttcttggagatctaacactgattcagcttgcttttttagttctgcaatgccatctgtttctccttctctggccaaggcaactggtttgtacctctgactgaagtgagtcagaaccagcctctttgcacggcacaactttgcaaatgttgctgccatctgtggtgtgctgtggccatgctcctttgctttgtccatctgggcatcatccagggttgcttcgtggatcaacaggtctgcttcaaagcacagttttactcctccatcacccacaaccccagagcagtcacccaatatgcagatttttcttccaaccctcgtgcc

SEQ ID NO: 132911 - DNA, 490 bp, Homo Sapiens
gaaaagaacttgacaggttttattttaataagacatagtgaagaggaaatggcttaaaagatatcatcaatcttttatttaactaagcactgcccttcattttgaaggaaatgatacaatttcaaatcggaacttccttctcaagaagtgatataagaatgtaacattgatttaacatacaaccttcaacaaaaataaagtttatacaactcactgggaaataaaatgcatgtggaatttatcctgtttgtcaacataattcttcatgagtcacaagtattatagccaagaacaaaacaacaaaaagctgaatcagttgatagttactctgatttaaaaaacatttcacaaataagatgtagctttccaaacaaatccattcgatgaccattatcacaactatattttattctaatttataaaacaaaaaatggttagacaagcacatgatatcaagagtcttcaacacagtggattccattttattaag

SEQ ID NO: 132912 - DNA, 1217 bp, Homo Sapiens
  misc_feature (991)..(1006): n is a, c, g, or t
ttttttttagccacaaactctcggcatttgagaccgttgatttttaatattttcttaaaaaaatacaaaggaaattaactctgtaggtcaatacaactcagggaaagagggaaaaatggaatttcagagcaaaggttgtttaggttatcacattcccacactcctaatacccacaaaacaagaatttcactccatgacacagaggaacattgaatggtagctcagaaatgttgatagctgaggtactgaaactaacaaaaggattttggttgtccttgattattctgtcctgtgatgaataaaatctacactaaaggacaggtaaggaaaacttatagcagaaaaaagactagatgtaccaaacacagcagtacaaaccactccttggcagacatgtgcttctaaaagaatggggcagtaatcaggtagctgaactactaggctactgtcactcccagcccatccccaaataaatagtgtggaagtgtaatagtgtagtagtatttgatccaacaaagaaaggctttcacccccattcaaggcaaacattgccatggctagatgagccctggcaggtaataagatgactgtaaaatcacaggttcttctagtttatccccagttatactgaactcccacattgatgtcatcttctctcatcccaacatttgttcactcttttatgctgtctccagtgcgaaagacctcggggaaataaaaagatccttcaaataatatacccttctcagtcttccaggttatgtaatacttcagtgctgttctaggttcactcacaatcaaattcagtttaattcacttaattctaacttcaattctgatatacaaatcctgacctccaaaagaagtgtcagatgagtctctctctcccttgtccccaaagttttgtggggctctcccttttgtttccctctagaatggaactgtgttgcccctagctacctgtatatgagaaaatgtagttgttcctggnnnnnnnnnnnnnnnngacttggattttaccaagtttacttaaactggtatctttccaatcatctaggctggatattgcccatatctagtaggctatactcaccttagttctttgcaacatatgaggcacaacgtacatatagtacaccaagcatgtggtaagttagaaatgacaggaaagtgctccccaaagcagtgggagaggcaatgtggtctctcacatccat

SEQ ID NO: 132913 - DNA, 1075 bp, Homo Sapiens
gcaatttcatagtttttattcagtggacttaaagccaagaaaccatcccaataattatttacaatttaataactgaatgattatcagatcgtgttatactgcaaaactgttcttacaccatgaatgctgatgctgtgaactttggatgttaaactggtaaaagctggaggcttcaaatggcatatgcaaatgtaaccaaagcctgaggactatgaagaaagaggagtttctaccactcggcatttatagtttttatatgcattgcagaagcatggggaattaagtgatctctgaaaaaaatgctttaaaaaactgagtatacatatagcctataaggtaaaaatccaagttacaagtgtattaaacactggcaactatgttatcagagggaatactgaattatatatatacataaactgtcattaaactgtgattacatgatacttcctaccacagcttattagactgtacaacagaagatattcctgtggctctctaaggctccaggtttaaaagaatttagtattttccccttggctcaaagtctaatcagtatcattctataacataaatcagaagctacgctttttgcttttaaggaaataagaaacataattgcaaccattacagctccaacatacactgcaaaaatgatatgtacaagcagttgccattgcatttgaaaacatgcattttctgaataagcttcacttagtaccaaggatgcctttcaagtcagcttctacattctgaatagagtacataatgggatttaagtaaatctttagaagtcccggagtttgccttttctaacattttcatatcaggtgaaaacaattttttcatgttggtaaatacaatcacccatatgagcaaatgtctatagaacagcgcattcttctgtagacatttgctcatgttggtaaatacaatcacccatatgagcaaatgtctacagaagaatgcgctgttctatatgtctgtaaggaatctgcacttaactggaaactacagggtccatcagaaagttaaatttaaaaaagatcagccatagccaagttcttcgtagattatg

SEQ ID NO: 132914 - DNA, 574 bp, Homo Sapiens
aaagcaatagcaaaaaattttaatttatttgatttgcatgctacagagatttagctaaactttgttcatttggctagcaatattctttttgtacctgtaacacttaagattctgatatacaaaattgtaataatatactgataattcaaacttgagaactaaatattacattctttttaccctgtgcgaataaattctaccttttaaaaatagtatttataatattaaaattcatatttgtccatatggttttgtgatcaagttattaaaatgttttgtcactgtgaatcatttgggttagtacaaatatgacaagattattaaaagctgcctataaatacataacactattgctgacttttaaagtgtagaaaaaggattatattaaaataagttcatctctcatgttagaaatgaggaaattttgtgaaatacaacaaccaaaagcatcttggtcacaactgctaactaccagcctgagacagattttattctttaatacttgtctgaaactttttgtattacaaaaagtcaacagctaatctgatgaaagacttataaagctgtaaatatt

SEQ ID NO: 132915 - DNA, 1406 bp, Homo Sapiens
acacttttggagaagtgattgagaatagaaaggtatgaaaaagataaaggtttctcaccaacgaaaccacaaaaaaaggtggtaccagtcaaaggtagacttgggcttttattttggggtgagggtaccccaaatgggttgtgccattttcacataaaaattggaatgataatgaacaagtgaaagtgaaatcagtttccctcctttgttcaataaacatggttagagcacctgtgtgcaagatagtgggacaggtgctgaggggaaaggtaaagctgtttaagctgtggccctgagctgaaggagcaatctagcagtgccatcaggccctgcacactgcagagcacagtgtcccaggggccaggtggagggaaggatcacttccggctgcagcatcagggaaggcactctgcagtctcccctccaggttctcagcgtgcctctatgcctgtgtgactgctcagcctgccccattccaggcacttgctcatcttccttatctttctctgtagcatgagaaatggaagtttgagaggataggatcctacctcacaggtacctaataaatgtgtgtggaattgacatatagtggaagtgtcactttatcttagtgcagcaaggtggaaagagctttggaaaggagaggaaagatggtggttgtgagggtaaggtgttttcatcagaaggcgggagcaagggtataccaaccaaaaagtcagtttagtatgtggcttagctcagagcacacgagggtaccaacacagccaaagactgtaagaaggtagctgaagtcctctgccaaataggattgaaaagctaaaatctttctctgtttctttcttaagtaacaactggtctattcaagctcaaccagagcatataagagaaaaaactgactaacgagggggtcttaaagagctttgaaggacagtttctagaaagtagaaagatcactgagtaaattactgcacctcctctaccccacaaaaaaaagggtgaggatgaatgtaaaagtgtagagcaagctttcagacaacttcaagtttgtttttggcgcttccgtttgtaagcaatcaagatggtgagagacgctatcccaaagaagaaagtctgtaggaaccagagtagctgagcccgaccacttgtgatgcctttatgcttgcacaatactatggcatacaaggactctcccacatgaatcagccaggcaagccagtacccattgcaaaggagggtgtgatggtggtccaccaagtactgagtgaaggggcccaggggcccaaggttctgataagggatactctgaggccagaagacaacccatgtgtagtagccaaagctgagggtgatgactgtgaaccagaacagactgcctcgctgaaagtagatcgcgccggctgccgtag

SEQ ID NO: 132916 - DNA, 456 bp, Homo Sapiens
ggcacgaggggcaggtgttctttatgtgacaaaggaggagaccgaaatgcaaagaaaagtgacttgcttaagatgacaccgtttatacgaggtggagcctgaattcgattccagcctgtgttactcctgaactcaagagtttagatttgtgctagatttccttataatagaaaccagagaagagaagggtgaaaggggcattccagccagaagcagcagtatgtgaaagttctgtgggagaggatggtgtagctgaggaactacaagtggtttagactggctggagcttaaagttcaaaggtcagagagggaggcagaagggaagcaccagtcaggtgaggaagagctctgtggaggagaaaggagcaactgacagtcttctagcagagaagtcacatgctcaaaactgtgttttagaatagtccttctcagtggcagtgtagacactggaatgta

SEQ ID NO: 132917 - DNA, 1077 bp, Homo Sapiens
  misc_feature (523)..(941): n is a, c, g, or t
  misc_feature (945)..(945): n is a, c, g, or t
  misc_feature (953)..(954): n is a, c, g, or t
  misc_feature (981)..(981): n is a, c, g, or t
  misc_feature (1006)..(1006): n is a, c, g, or t
tttttttatagggatcacttttatttcaaacaattaaatacaaaccaatattttaccccttcatagatgaaatcacatcttttcaggatatgagtataaagtaacaagcctagggcagagcttgtactgacaaagtcctgaaactacaatgagaggaaacacattgctctacttcgggataagtcatgaccgagactcaatttcagagacgctctatgaacagaggtgcttgaagccacagtggcagaagggaaagatggggaagtgtgccgaagagcctccaggcatgacagacagtcccctgaccaagcacaagtaacaggccctttgggtctctgcttctcactggaaaatgatgaagcctagatctgatgactcctagtgccaacatttaacaaagttcgaaagttatgcaggacttcacacatgtacggaatggctgtatcacagaatattatgcgttagaaagttcacggtcactatacctagctctaaaatttttcagcctcgtgccgaattcttnnnnnnnnnnnnnnnnnnnnnnnnnnnnnnnnnnnnnnnnnnnnnnnnnnnnnnnnnnnnnnnnnnnnnnnnnnnnnnnnnnnnnnnnnnnnnnnnnnnnnnnnnnnnnnnnnnnnnnnnnnnnnnnnnnnnnnnnnnnnnnnnnnnnnnnnnnnnnnnnnnnnnnnnnnnnnnnnnnnnnnnnnnnnnnnnnnnnnnnnnnnnnnnnnnnnnnnnnnnnnnnnnnnnnnnnnnnnnnnnnnnnnnnnnnnnnnnnnnnnnnnnnnnnnnnnnnnnnnnnnnnnnnnnnnnnnnnnnnnnnnnnnnnnnnnnnnnnnnnnnnnnnnnnnnnnnnnnnnnnnnnnnnnnnnnnnnnnnnnnnnnnnnnnnnnnnnnnnnnnnnnnnnnnnnnnnnnnnnnnnnnnnnnnnnnnnnnnnnngcangatcgtannaagggcgcgtgctggcgttttccatangctcgccccctgacgagatcacaanatcgcgctcagtcaaaggtggggacccgacaggacaaaagaacaggcgttcccctgggagtcctcctggtc

SEQ ID NO: 132918 - DNA, 1226 bp, Homo Sapiens
tttagtaccaaatgactctggcgcgacccggaaacgcagttacaaatgagaataatttaaattctccgataattacagtatttacaacagcaggggagggagtcacctagtgcccctcttccaggctggacagatgcccactcacctcacgaccggtaggggccccaggcctctaggcagttatggattctcctggcatgagcaggtagaggtggtgggatggcctgttttacgcagtgtcctaactttggcccaccaccccgccctacaatgctgtgaggtctctggagctttttctgacctgtgggccctccctctccttgcgctgaactgccattggcccttggagtgttctgtacagtccagctgcacttagggcaggagggacctcccccacccagcttcccctgagactggccccaagaccagaaatgagtcagtgcagaggccggtgccactccaggacagtgagcaaaggggaggagagaagtcacagggcactataggttgggctgtgttgagcagtatcaatcactatcgctggtctcactgctctgctcgccttgcaccttgctgcggtgctgcagagccctgtggtaggcgatctgtactgacttgcggatgttggacttgcggccctccagcatcttctccttgtctaggtcctggttcacacccagaggaaccagcttggtcctgggcagccactgccaggttcgtttgttgtcaaagaagaggacgaggtagagatgctctcgggcttcctgggtcatctgctccccaagtttcagcacctccagtgggggcacagggatgggaaccccatggtggaacataccttctcggggcatctttggatcaatgatcagagctgggtatgatggatagcctcggcatttggcccacacgaggtccagagcatccagcggggagtcctcatcctctgacagccagccagctccccggcccagactcttccttaccatgctgtggcccacgccgcggccagtgcccacggagtaggcctcattctcagtgcctgaggtatcctcactgctgtcctctgggaaagtgccccgagagaaggagggtttgccccggccttgttttgagggcgttgtgctggtccggtctgaagcagcgctgctactgctactgctgctggactcagagtctgagctgctccggggaaggctgcagtcattacggtataccagaaactcttc

SEQ ID NO: 132919 - DNA, 478 bp, Homo Sapiens
  misc_feature (406)..(416): n is a, c, g, or t
atcagctctggaaacaaagtttttaattaaaataaacaaagtttgctttccaaagcttcctcttggtttgatttccattcatctgctagctataatgactggtacattcctgaatctggtttgttctgtttccaggcatatgagaaagttgtgtccacagctatcagatggttgccggcatgtgaaaagggaagaaatttaacttagagttggtaagcaaaatagccccagacaagcattcttatttggtctcaggaccctttgacagtgctaatttatagaagaccccaaaaaacttttatgagctaatcaatatttaccaaattaaaagttgaaattgagaatggtttacaatatatactaattcatttaaaaataagactcattgtattaacatactttattnnnnnnnnnnncactacattttccaaaacaaagctaactgaatgaaagaagagtgcagttttacttttttttc

SEQ ID NO: 132920 - DNA, 558 bp, Homo Sapiens
tgactgtgaacatgctaaagggcatcgaattatatactttagtaagtgaactatatggtactgaggcaggatagatagtcaaggagatgaccacgtccttgggacatggcaaccacactgtcaacagcacaatgagccctgtaaccatgttcattgggacatagcaaccgcaccaacaacacaacaaacctcagcactcacattgtaatcaagctcatccaagcagaactaccttcactggggactttcccctgtagagagcatgtgcattttcactttgcttgtcctcagaatgaccctttgctcattataatagtaaaaaacacacccctgggtagagatttaagacggcaatgagacatgcaatgtatgaacaagcatgtacagcaactgctcatgtgcacccagaggaccacccagaacatgattactaggaacacacctcttcccacccacttatgaataatcacgtaagactctcataaagggagttccctcagagccagtctttgctgactcactcttgatcagccactctgacttatctttcagagtgta

SEQ ID NO: 132921 - DNA, 1077 bp, Homo Sapiens
  misc_feature (43)..(61): n is a, c, g, or t
  misc_feature (773)..(773): n is a, c, g, or t
  misc_feature (787)..(787): n is a, c, g, or t
  misc_feature (790)..(790): n is a, c, g, or t
  misc_feature (873)..(873): n is a, c, g, or t
  misc_feature (906)..(906): n is a, c, g, or t
  misc_feature (916)..(916): n is a, c, g, or t
  misc_feature (930)..(930): n is a, c, g, or t
  misc_feature (961)..(961): n is a, c, g, or t
  misc_feature (994)..(994): n is a, c, g, or t
  misc_feature (1012)..(1012): n is a, c, g, or t
accctcaactaaagggaataagcttgcggccgcctgctcaggnnnnnnnnnnnnnnnnnnnatttatattctccctttattaaataagaggtagcatactctattaactattctacaccttgtttttttcacttaacaatatatcctaaagatcattttatgaaagtatacaaatttcctacccctgttggagctgcttagtattccacggggtgaatgcactgtagtaggttcaaccactcctgagttggtggacatctgagtcgtttccagtctttaactattataggcaatgcttcggtgaacatgtcttttcatgtttgtgccattgtatctttagttttgtatcagttagcttttgctatgtatagcacactgcctcagaacttaatggcataaagctacaatcattcattagctcaagattctgtaggtcagcaattttggcagagctcagtgctgtccttctgttgttctcactcatgtgactgaagtcagctggcaactcagctggagctggatagtctaagacagactcatccatgtgtctggtgtaagcatgctgtgagccaaggtttctcaagtgacctctcatcctccagcaggctagctagtgatcatttatatggtctcatggcagtctcagggctccaagcacttcaagagagagcaagctcaatgcccaagcacttttcaatcttctgtggccatcaagtttgctattgtcattttgatcatgcaggacacatggacaagcccactgtcagtagaanagaagaggactaancanagacgtgcaaacatatttccctgcttcccatggatgggtatacaccgtctatttgcaatcatctacatggagagacatcctanacgtgggcgtatggttggatattgtctctcgantctcatgttnaatatatcccgctnttggagacgggctaggggacgtgttggtcangtatgatcctcgtgatgttgggacttcccatancatggttaatagactggntgctaaagcgggactcctgctctcccgcaggtaaagctgtccctccctcacagacaaagtctggg

SEQ ID NO: 132922 - DNA, 1116 bp, Homo Sapiens
  misc_feature (811)..(834): n is a, c, g, or t
  misc_feature (997)..(1031): n is a, c, g, or t
  misc_feature (1035)..(1073): n is a, c, g, or t
ttttttttgtcaagaaatttattaacctttataaacactattttcactcaatcattcataaaaaatgatttgtgattaaatctgtaataaaaccatataacgttcatcaatgcattcaataagaccagtttcttccatggaacataataaaccactttaaaacagcagttttcattcatgtcatataaggctgtcaaactaaaagtattccttataatgagttgttacccaagaaatccatctcacttcccgtgatgtggagcctggtgatgtgccctctaagagttgggtctgaaagaagactctgcccctttatggccacctccccagtctctctcaaacaagtttcacaacaggaaaatatttatgagcagagaaatcaaattcaggaggaactttagattcctttttgtgtcctcctgccaataacttcataaccacaaagttgggtttggcaacctttaaaattctattaacctcatggtccgggttaggaatattttccaatatcatttttgcctgttgaaagtgcttactagctgccacatacagttcaggagactgaggaggagggctatatttattgaggtcagacatttccttgaactgtaagtagtgcactggcgtcggggtcatcacactgttgaatggagcaaacctgtgttcataccgaacttgttcgctatcaagctcaaacttcggtttacgtactttgccgtccatgtcaaatgctaccatggttttaaacattccagcacacatgttctgatatgctaggctcattgtgatctctcggctcaatgggcgaacnnnnnnnnnnnnnnnnnnnnnnnnactactacggcctttctgctgctcttccattatcctttcctctgccatttgagagccatcggcacgactcaatgttgacatcaaccatgcgtaaaggaattcagagagataccccggccgtaatggccgaattcccgggcatatgtccggtaccgtcgactgnnnnnnnnnnnnnnnnnnnnnnnnnnnnnnnnnnncggnnnnnnnnnnnnnnnnnnnnnnnnnnnnnnnnnnnnnnnataaagccgacgtagcgccctatagtgagtcgatacattcctt

SEQ ID NO: 132923 - DNA, 777 bp, Homo Sapiens
  misc_feature (281)..(299): n is a, c, g, or t
  misc_feature (672)..(672): n is a, c, g, or t
  misc_feature (676)..(676): n is a, c, g, or t
  misc_feature (698)..(728): n is a, c, g, or t
aaggtttttccttttatttgaggaggaaagaatcagtaatcacaattaaataagcttcttttataaactagacaggcctttttgaaacagaatgcttttagttagcctgggaaaatgcataaattatactatcaattagactattcttgtacagtgtcgtatctgtgtggtctttccaaaagctattagacttcattctccaaaagctatcagacttcattttgggagtacgtgtcctttcccccttttcttttgctcagaagactaatagtacctggtcnnnnnnnnnnnnnnnnnnngagacagagtcttgctctatcatccagtgctggaatcagttgtaaaacaatttaaagtagcaaatacttaacacatggctaatgagatttgtctggttccatagtgaacctttgtttaaattaaaagaattatctaaataaaaaaagaaggataataatagtattagttgtaatactgaaaagtcttttagaaaacatcttatacatgacttcccttattaaggacatctttctgaaatatgcagcctcacagtgaccttttgcaaacatgatccgttaactgaggactgaattttgggatggacatggtcaggattccaagtcaatactgcagcgcgacgattcacacagtaacgatactaaactggttaanacanaagcagtcactatgaatacagnnnnnnnnnnnnnnnnnnnnnnnnnnnnnnntgatatttgtgaatttcagatagctttttactagatttgtagttagctt

SEQ ID NO: 132924 - DNA, 540 bp, Homo Sapiens
ttttttccaaaaacgagccagatgctttaatgggctgcctccagggcccatcggctcatcagaatcccttaaatgaggcccagagcttgccagcctttggttgagctcagcactccacaggcaggtggctcacagcaggcctggctgatgggctctggcttggggagtagcagggtcctcagtccagatcttcagagaccttctaggactgagctgccactcagcctacctgcaccagtccctgagtcccagcagctgcttagcttctagaaaacataagtttcctgggataatgccaggggtgggggaggcagttcagggaagcactgatgtcaattcaggacaggcctggggcctcctggggtggcggcagcagcaggcccagaacaaggacgccagctccaggctgcatccctgcaccagtagcggggattgggagcagggagtgcaggctccctcagggagctccaggctggagtagggccaacccaaccccaaatgctggggggtgactcctgaaagtgtgagtcacatccactg

SEQ ID NO: 132925 - DNA, 228 bp, Homo Sapiens
  misc_feature (210)..(210): n is a, c, g, or t
cgtagaagaatactgcttctattttgaaaaaagagttttttttctttctatggggttgcagggatggtgtacaacaggtcctagcatgtatagctgcatagatttcttcacctgatctttgtgtggaagatcagaatgaatgcagttgtgtgtctatattttcccctctcaaaatcttttagaatttttttggaggtgtttgttttcctncgttccgaaattcttggc

SEQ ID NO: 132926 - DNA, 1761 bp, Homo Sapiens
  misc_feature (120)..(722): n is a, c, g, or t
  misc_feature (755)..(770): n is a, c, g, or t
  misc_feature (788)..(802): n is a, c, g, or t
  misc_feature (1009)..(1026): n is a, c, g, or t
  misc_feature (1068)..(1665): n is a, c, g, or t
ctagtaccgataggccagcgtcggcttacggggttctgcaccagccagctgagcgacgacctacaccgacttagatcctacagcgtagtatgagaagcgcacgcttcccgagggagaaannnnnnnnnnnnnnnnnnnnnnnnnnnnnnnnnnnnnnnnnnnnnnnnnnnnnnnnnnnnnnnnnnnnnnnnnnnnnnnnnnnnnnnnnnnnnnnnnnnnnnnnnnnnnnnnnnnnnnnnnnnnnnnnnnnnnnnnnnnnnnnnnnnnnnnnnnnnnnnnnnnnnnnnnnnnnnnnnnnnnnnnnnnnnnnnnnnnnnnnnnnnnnnnnnnnnnnnnnnnnnnnnnnnnnnnnnnnnnnnnnnnnnnnnnnnnnnnnnnnnnnnnnnnnnnnnnnnnnnnnnnnnnnnnnnnnnnnnnnnnnnnnnnnnnnnnnnnnnnnnnnnnnnnnnnnnnnnnnnnnnnnnnnnnnnnnnnnnnnnnnnnnnnnnnnnnnnnnnnnnnnnnnnnnnnnnnnnnnnnnnnnnnnnnnnnnnnnnnnnnnnnnnnnnnnnnnnnnnnnnnnnnnnnnnnnnnnnnnnnnnnnnnnnnnnnnnnnnnnnnnnnnnnnnnnnnnnnnnnnnnnnnnnnnnnnnnnnnnnnnnnnnnnnnnnnnnnnnnnnnnnnnnnnnnnnnnnnnnnnnnnnnnnnnnnnnnnnnnnnnnnnnnnnnnnnnnnnnnnnnnnaagaattcggcacgagggccgcggctgtcggcnnnnnnnnnnnnnnnnaaaaaattacgtcagttnnnnnnnnnnnnnnnctgcagtcttatggtttagaaaacttgtttagctccatagaggaaagaatgttaaactttgtattttaaaacatgattctctgaggttaaacttggttttcaaatgttatttttacttgtattttgcttttggtacggccagaaatcgagcttgttttttcatagttcctgatattttcagaaaaatcaaaataaatttgttccctnnnnnnnnnnnnnnnnnngcctacagccgcggccgctccaaccctcgtgccgaattcttnnnnnnnnnnnnnnnnnnnnnnnnnnnnnnnnnnnnnnnnnnnnnnnnnnnnnnnnnnnnnnnnnnnnnnnnnnnnnnnnnnnnnnnnnnnnnnnnnnnnnnnnnnnnnnnnnnnnnnnnnnnnnnnnnnnnnnnnnnnnnnnnnnnnnnnnnnnnnnnnnnnnnnnnnnnnnnnnnnnnnnnnnnnnnnnnnnnnnnnnnnnnnnnnnnnnnnnnnnnnnnnnnnnnnnnnnnnnnnnnnnnnnnnnnnnnnnnnnnnnnnnnnnnnnnnnnnnnnnnnnnnnnnnnnnnnnnnnnnnnnnnnnnnnnnnnnnnnnnnnnnnnnnnnnnnnnnnnnnnnnnnnnnnnnnnnnnnnnnnnnnnnnnnnnnnnnnnnnnnnnnnnnnnnnnnnnnnnnnnnnnnnnnnnnnnnnnnnnnnnnnnnnnnnnnnnnnnnnnnnnnnnnnnnnnnnnnnnnnnnnnnnnnnnnnnnnnnnnnnnnnnnnnnnnnnnnnnnnnnnnnnnnnnnnnnnnnnnnnnnnnnnnnnnnnnnnnnnnnnnnnnnnnnnnnnnnnnnnnnnnnnnnnnnnnnnnnnnnnnnnnnnnnnnnnnnnnnnnnggaaactggtcgcctttctccttggggaagggggggccttccagaggcacccgtaggttctcaattcgggtaggccgttcgctcacacggggtggg

SEQ ID NO: 132927 - DNA, 582 bp, Homo Sapiens
  misc_feature (178)..(297): n is a, c, g, or t
ctcagtaaatatttatttatttattaaacttattgagacagggtctcgctgtgtcacccatgctggcgtgcagtgctacagtcatggctcactgtggcctgacctcctgggctcaagcgatcctcctgtcttacttagccttccgagtagctgggactacagtcatgcaccaccatgnnnnnnnnnnnnnnnnnnnnnnnnnnnnnnnnnnnnnnnnnnnnnnnnnnnnnnnnnnnnnnnnnnnnnnnnnnnnnnnnnnnnnnnnnnnnnnnnnnnnnnnnnnnnnnnnnnnnnnnngtgcaagccaccacacctggccagtaaatatttctgaaatgagtgaatgagtggggactcagaactcttaactcaggtcattcttctctctcagaatgatgaagaaccaaagaatgatgtggttctactgagtgactggcctgagactctataccgggagtctcaccatccacagaacaagctttttgtctgcttctactactccatcaaggtcaactattttgtctccttaaactggatggaaccctgtggaaaaatgcaggtaaagccacctcgcctcgtgcc

SEQ ID NO: 132928 - DNA, 863 bp, Homo Sapiens
  misc_feature (46)..(46): n is a, c, g, or t
tcatgcagtggttccaggattacacagtctctcagctgtagggcanaaaccatgaaccatacagcacttaattttctgcttattaatgcaaacacatggaacaaatacctaatttcagttcaaactcatttcccttttattaaagtccaagttaccattacatggcttggtactcaataaaggaaaacttgttcaaataaggtaatatgttatcatcagtatttccaggtaactgttcacactcaagtagcaatgtcaataaatccttggggaagcccatccatgcggtttacactttgtcaaggcccagttcctccggagtggagattcccagttcatttaaagttggtctaagttcctggatgacataggggtagatttccttatgaggtcctgctttgtccttaacaacctctaggatacgaactgtactagcaaaatcatttaaccgtctgcatgcccgcaaagcagcatcaatgattttgggctctggaaccatatcataggtaacaagtgtgtttatccctttacgcaattcccaggcatctatatctggcttgttgaagtatgttacccagcgagcatcaaactcctcatctgtctcctgtgacccatgggaatagcagcgaactgactggatagccacggcggggccgggggtccgggcggagtgcaggaggcctcgagggtcggcccgggtggttgcggccacagcgcagcggcggagagcggcgcccagcatgacggcgatggcggcgcgcgggctgaggacagagagaagccggtgtaagctcgcgggttgctccggagcgggcgcggacgcgtgggtcgacgatatcccgggaattccggaccggtccagc

SEQ ID NO: 132929 - DNA, 1666 bp, Homo Sapiens
  misc_feature (173)..(184): n is a, c, g, or t
attaggggaagaattcccaagcctacttgttccaggagcccgagatttttcctaaggaaaaccagctaaggggccaagttccactttaccttagggggccccgcgggggccaaaagaaatggtcttagaaaatcttcttgaggggccgagggcgcccgaacaagaagttatannnnnnnnnnnnagaaagaagggggtttttaatattgtttattagcacagtaacaaatgcagacttaagtagtccacaacatagaaccaatccactgagcaactcctattccacgccttacagttagttaacagcttaaggtatttcactacaggttttcacaagtcctgattcagaccttttttaaacaaagtagattggcatataaaataaaacgcactactcatctcttatatggtgttttatagccacgtgtccattttatatatatgagatgacaatctctaaaaactctgttaaatatcaatgttcccttccaagaagggaaaacaaattccaattttgttttaaacaaaaagtatgtagtcttagagggactttacataaatggccatatgtgtaacctgtaccaaattaagctgttttaaatttacagactacaagcaactgaacccaaatgtctaaatgtacattcttttctgtactacatttcagctaatattgcagaactaatgacaattttaaaagttgctattaccaattctgtctactgtagcaagataccttaagttacaacaaaatcttaggaaataagactgaataatatctgttatagaaataccctactctttaccaactcccaccctccctgaccccttcaaaatcataagcagctctcttctgtgacagacaaataatgtaagaattgtgaaaccccaatttatgtagcgtatctcttggtccactgtctggccattctgtcatgttctgctctgttggtcatatactgagtggcaatacttcccaccaaggggtcggcaggattacagtctgtaagaagtgagcagatagaaaggaggactttagaaatggttagtgctggactccaattatctttcaatatgtccaagcaaataacaccttgactgttaatattacaatgatagattcttgtccgaaatgtaacctttggaggcttgaagggatattctggtgtaaaagtgatatcgagaaagaatacaccaccctcatacacggatcctggaggccctagaatggttgatctccattcatagatgttatcgcctttgggaccagcactgcaattaggtggagggtctaaagtgatgtccgccagctccttctgaattctcttggcgctggtggagaggagtttggagtttttgctcatgctgactttactctccttcttcttgggggtgtttgtttctttctcggtttgctggttggaagacgaagatgaggaggagctggtgctggccctcgaatcgtcatccgacatagcgaaccccccaccccaccccgcaaacagcccctgcagggggagagaaacaaaacagaaacgcacaatccatgcagccagtgtaaataaggaactcgggtgctgtcaggagggcattgaccaggggcgcacgcggccgcccaccgccctccactcgcttttcaaagtctgcaggcccattaaggcttttg

SEQ ID NO: 132930 - DNA, 473 bp, Homo Sapiens
ccaaagttttttgtggaaggttggctcaagttggtatgtgggtttatataaccaaaacattctaattttccgcaactaaaatgaggtagctaatggctttctaattctataaggacacctttcagtttggctctgtccccagaaaagtatagtgcctttatcttttatttctttctatcctgaaggctaagtggaggtcaacttaaagaatgtggggtcaaggttgacattactcgagccccttgaggcctaaatattgccttagctcagtttgcagaagtcattggtctgatctccatggagcttaaggagaagaaacaaaacccagttctatattctctgcactagagtatattcactctgtagtctctgtacgtagaaacagcttgtattaatatattttatctcattcttgacagcaggaagaaagaattttttaaaaaaagctgatttgtaaagtgagagtctaagta

SEQ ID NO: 132931 - DNA, 408 bp, Homo Sapiens
aaaaaacaaaagctttattctctagttattattcagctccaattctaactgatttgaaaataaataatttaaaaaattttcttcctagaaagtaaaatatggcaccataatccaattgggcctcatattttaaatcctgcagaaagcaaacatggacggcagatagatgataataataggccattactctcaacgcagagaaggtggttggcgtttcttttctccacgttcattcctggaccatttttggtctccttcctatcaaatgttgtctatacgatgtgaaggactttgaaagcagccacagcctgtttttccctttcgtgtctgttctgcagtatttccagcagtgagatttcaggtaaactttcttctttcccagcataggttggattttttcctcgtgcc

SEQ ID NO: 132932 - DNA, 570 bp, Homo Sapiens
ggcacgaggggagaaaactactgtttcagtgttcaagcagtgattccctcccgaacagttaaccggaagagtacagacagcccggtagagtgtatgggccaggagaaaggggaattcagagaaatattctacatcattggagctgtggtatttgtggtcatcatccttgtcatcatcctggctatatctctacacaagtgtagaaaggcaggagtggggcagagctggaaggagaactccccactgaatgtttcataaaggaagcactgttggagctactgcaaatgctatattgcactgtgaccgagaacttttaagaggatagaatacatggaaacgcaaatgagtatttcggagcatgaagaccctggagttcaaaaaactcttgatatgacctgttattaccattagcattctggttttgacatcagcattagtcactttgaaatgtaacgaatggtactacaaccaattccaagttttaatttttaacaccatggcacctttttgcacataacaatgctttagattatatattccgcactcaaggggtaaccaggtcgtccaagc

SEQ ID NO: 132933 - DNA, 1132 bp, Homo Sapiens
  misc_feature (1057)..(1091): n is a, c, g, or t
cttgtttgcgtgggcgccccggttaacccctgaggtgccggaatatatgaatctaaagcatgttatgtgcaaaaggtgccatggtggtaaaaaattagaactgggaattgggttgttagtaccattcgggtacatgtcagaagtgactaatggctgatgtcaaaccagaatgcctaatggtaataacagggtcatatcaagagtttttttgaactccagggttttccaatgctccgaaatactcatttgcgtttccatggtattcttatcctcttaacagttctcggtcacagtgccatatagcatttgcagtagctccaacagtgcttcctttatgaaacattcagtggggagttctccttccagctctgccccactcctgcctttctacacttgtgtagagatatagccaggatgatgacaaggatgatgaccacatataccacagctccaatgatgtagaatatttctttcctgaacttgaagatttccaataataaagtgtataaattaagtccttgccaaaacatcccggaggcttaggaaagtgttgttccttctgactaaagtccgttcatcttctacggtcacattcacttttgttcccacctgttcaaaactctgaattgttggctgtccgaggtttgtctccaggtaaggtgtgaactctggggagttctcatacagaggctccccagcagaaccggtgctctccacattcctgccgggtaggagaagacccgtgccaagtacgtctgcttcacatccttcacaatctcgtcggtgaggtcacactctgtgtctgttgtgtaaaagcatttgcttttccaatctcctgacttagtgcttatttgaacagtgtagacttgattgacgggtttgggttcccactccgaaattgtcttgaaattagttgatttccaagttaaattatatgctgccacagtatttgtagtgcctgaagcgccggccacctgggcgaagacccagccgagcaggagcgtcccccggccgtaatggccgaattcccgggcatatgtccggtaccgtcgactgnnnnnnnnnnnnnnnnnnnnnnnnnnnnnnnnnnncggccgcttcctcgctcacataactccgctgcgctcgtcgt

SEQ ID NO: 132934 - DNA, 780 bp, Homo Sapiens
  misc_feature (94)..(94): n is a, c, g, or t
tgtagagatatagccaggatgatgacaaggatgatgaccacaaataccacagctccaatgatgtagaatatttctttcctgaacttgaagattnccaataataaagtgtataaattaagtccttgccaaaaacatcccggcaggcttaggaaagtgttgttccttctgagtaaggtcggttcatcttctacggtgtcattgagttttgttgccacctgttcacaactctgaattgttggctgtccgaggtttgtctccagcgtaaggtgtgacctctggtgagttctcatacagaggctccccagcagatccggtgctctccacattccctgccgggtagtagaagacccgtgccaagtacgtctgcttcacatccttcacaatctcgtcggtgaggtcacactctgtgtctgttgtgtaaaagcatttgcttttccaatctcctgacttagtgcttatttgaccagtgtagacttgattgacgggtttgggttcccactccaaaattgtcttgaaattagttgatttccaagttaaattatatgctgccacagtattatgtagtgcctgaagcgccggccacttgggcgaagacccagccgagcaggagcgtccgagcgacggcggtctcggggcgcgggacccggggccaggcaggggtctccatgtctaccagttggcggcgagatcgagcgggttccgtggcgcccgtggggctggggaggttgggctgaaggcgccctgggccggccagagggagtgcgaggggtgcggggagct

SEQ ID NO: 132935 - DNA, 777 bp, Homo Sapiens
ttcttgacattttggggcttttacttcaatttgaagcagatggttgagcacagacgtgaacagctttggccatttgagcacaaggaaggggcgggccttggctttgaacacgcaggccccatcctccacatactggcccagtcccctggtcccttccttctctgcccctgcacaccctgtaacagaccaccgccctccaagtggggcgccatcttgcccagtaggacggctccagccaacccagcctctactccttcctcaggccacgtgcaggctgaacaagagaaaaactctttttctgtccatggcagggcctgcccatggtgctggctgcctgggacgggggcccatgggggtgggtcacagtgaggagaggctggctggggaagcaaagacccataggtagctgccctggggcaagtccctggtgtaggggagggagtaatattgcttctctccctgcttactcccttctggtgatgcttagggcccaaggagcctggacccaagggacactgagaactggggccagtggcctgggcagccaatgaaggggagagagtgggcagggatctcaggtcccactcccagccccgcccaggcaccccagcctccctctcacagcccctaaggcttgtcttgcactcagccagcacaaggcccagtggagagagagcaccaggtcagagggccaagatgacccccaggggtcatcaaatgcccatccattccatgagttcctagcagaaccaatcccgggaattccggaccggtcca

SEQ ID NO: 132936 - DNA, 1479 bp, Homo Sapiens
tttgacaacttgctcttttaatgtggaatggatgaccctccaatatttccccagagcaccccatgctcttctatcagggaacttattaaaatcatgtaacatgtttcttggtgacaagatttaggtcttttgtttctgtaacacatgccagatacttagcccggtatctggcatgtggcatgcccagtaaatgtttgccgaataagtgaatccatgtctcttgcttgccgctatttgcccactgaatccatgaagtgagttttcataatggataccactgaaaattcaaccctgaaaagaatgtcttcggttgtgggccctaaaattaggtgaattcagctttgggtctatttcatccattctggaaggtccttgggtcactgatctgaggcattcttgatgtggttaggacttcccagcattattttttttagatcttgtccctctgggccagggcctcagtgtattggtcgggcttgacctggtctcctggtacatcttcccagtttttggtgactcccttcagtttctctgagagctccaggttacactccttctctgcttccaccagagctgccatccgcgcagcttcattctttgctagcctggattcctcctgcagaagctgcatcttattctccaagagctcataaacatgctccgtctcctgctgtcgctcctcaaactggcgtcggagctcagcttcattctgactgttgagattctccacatcagcccatgttttatccagatgctgtttcttgtcctggagttctcgtttcaagctctccacttcaaccttcagctcagtgttccgcttgtagatgtcctcccggctggcctcatacttctgttgcatgcgctcctccaggaagtagatgcgcagcttgaggctgaagttctccttcttcaggtcattgaggtgcttctcaaagtctcgaagagcctgggtctgtacctgagggggtttctcaaatgctctcaaggaatatgtctgcacaaacgggaccttttcaccacttctccagatctgtgactgcactggagggcctcgatctttagtgtcactaagaaaagctgctgtgtgactcgttctgggtaccatctccccatcatcctctgcaaaataatctctcgtccaggtctgctccattttccaggctctttccttagtctcaggacgctcctcacccgggaggggaagcagcctgggaaaatgagaagccttgcccacgaatctccagcgcaaaaggcagcagctttttcctccccagctcctttctgcgtcggcggcgaagagagagctctgctccctgcttttttagaaaatggatttgacgtggccgaacctgcggctagccgtgcgacccgcacaagggagggactgttctcagtaggaggctggactcagagcggcgcggcgcccggggctgtttcgtgagctggagccagcggctgcccgggcggcgggcgcgatcc

SEQ ID NO: 132937 - DNA, 942 bp, Homo Sapiens
cttctaaattccctccgggtcctccccctttcctttcctcttccccccctttcttcaagtttttttgttagtctttccactcggatgttgagggtcctctgcaggtctctgatctgagcatccactaggctcctgagaggaagtggcatggcctgcactttctcctcctgttgcagtatctgactttgtatcagaagtgggtggtatctcacaaagctctgcatttctggactgagagttttcacaagtgttgttaggttcaaatgacgcagatggagtagacactgaactttctgactgactgccatttgctactgatgtttcactttttagcaaatgcatctgtcggaccttgtgaattcttgtaacaagttcatctgcagaaacacttcctgctattacttccaagggaattccactgtctccaataaagaaactggatggaacacacactacaggatagatttgtgaaaactgtaggcaggcttcacttttggtatcgattttaatagcaacaaaactgtttgaagatgcttctgtaactttatcatcttcccaacttgcagccatctgtgtagactgttcatcatcacctgccacgaacaccacgaagaccgcgccgctccttttggccgtcgcgatggcggccggaatggcgccctggaaccacagcatcgctcccttcgggcccaggcgctcgctcggtgtgtagtctccgcagtcccgaagccggctccgccctccgtcttcgtccggctctgcggcccccgcaaccttggctggttcggcccccacctccggctccgcacaagcgcgcacgcccgtcagcggcacccggagacgcgcgctagcgcgcgcgagaacacctcacgtcacagtcgcaacccgtcggtgtccgtgccccaggaccttctctcgttggcgagtcgatggtgcggccgc

SEQ ID NO: 132938 - DNA, 1040 bp, Homo Sapiens
  misc_feature (390)..(390): n is a, c, g, or t
  misc_feature (958)..(977): n is a, c, g, or t
  misc_feature (1008)..(1008): n is a, c, g, or t
gatttcgcccttggaatgcctagcagatcgccgggcccatctttgatttgtggagttcaaacccagcggacgctggggaataccaagcagcccttgtgtcagcacacagagaaccacgttaacgcagaataccgggcaatgggccggcgcatgaagaatggcacaagattccaaactgtcccaatatggagatgctgtctttccccttcccaatccatacctattgtcatgcaccaaagggggacctgagactctaagcagggcaagcccatttctttggcattttctctcccccgagtctagctgataatcagcttagacacacagcaggctatgtgctgtgaacaacaggcatcctgggttattttacaaactcatggatagtcattntgaaaccacctttgcaaaattgtgactgaaacagtgaaagagagctaacttaaccagctccatcttgtttctaacctccaagctgtctttgttcattcctgggcgtaggctgaactaactttgggagaaacttagtttgtagttatagtttaaacaaagactgtgacagccctttcccaatgcagacctccttcttgtctggggactagactaacattagccacaggattagaaattacggtttaggagtcacgcagctggaggctacaagattctgaccctccctaaactgcttctaagatcagtgcttgagacatgttgcagaccccgcacttgctggatcagctgacgccacacagatggataaactgcctcgtctgatcttgtggcccccacccgggaactgacgaagcgcaagaagacagcttcgactccctgtgagttcatccctgaccaaccagcactcctggctcactggcttccccctaccaagttatgcttaaaaattctgctccccgaattctcgaggagactgatttgagtgataataaaactccagtctcccgcnnnnnnnnnnnnnnnnnnnncctgagcggcggccgcaagcttattcccttntagtgagggttaattttggctaggcactgccc

SEQ ID NO: 132939 - DNA, 218 bp, Homo Sapiens
gaattataaaaattttatttaccatcatcattgcccagctgtacatctgctgcatacgctgcctgtctgtagtcagtgtgtgaaattgtaacctgctaagggcatttcagacaacagtttcacagacactttaaattagaggcagcaggatgtgatatgttagtagcactcatatgtattctgaggagtgtttccaaagggcatgtcctatcactgag

SEQ ID NO: 132940 - DNA, 771 bp, Homo Sapiens
gaaccaatcaatcactggagacacacagactccacctgtatcaaacgaggataccagccacccagacagccccagtcccagctccatccatcctgcaatccctcctccacagcacagcacagcccagacgctgcctctgggaaggaagcctgaggccagagttgctgagcctctgggaaaatctggaaatttggtttccccaagatagactccacctcctctggaaagatgctgtgctcctgacagggctttgtctccctgggaaggaatccatgtcttgggaaggctctgcatcccaggaaaggctccacacctgcaggagggactccttggtcctgagggactctgtgcctgcataggctccagtccttaagaaggactccatgatgcagggggactccaggccctcaggaagttctccatgtcctgggaagggctccaggtccctggaagagttttgtgtccttgagaaagactccatgtcctcaagaaatacagcctgtctccttctaagagggctccacacccccagaaagaactctaggaagcattcatatcccctcagggccaggcccaaagcccctctcagctggcacagatgctgctgacagtggcccctcctgggcccacgaggcccagctcctcctgctcgttgatgcatagctggtaaccacagccccgggcccgggctccagatgggaccccgtggtcagtcttggcacgagggggcagcaggaagccacactgcccgcaatgagcatatgccaatgc

SEQ ID NO: 132941 - DNA, 1665 bp, Homo Sapiens
  misc_feature (140)..(161): n is a, c, g, or t
  misc_feature (163)..(167): n is a, c, g, or t
  misc_feature (172)..(172): n is a, c, g, or t
  misc_feature (176)..(213): n is a, c, g, or t
attcccagcccctttttccttgccccggggtctttctagggaaccaggtatgggcccagttcccttttcctttcgggggccgccgcgcccaaaagaatggtttagaaagcttttcggggggccgaggcggccgaccatgnnnnnnnnnnnnnnnnnnnnnntnnnnngggtntttnnnnnnnnnnnnnnnnnnnnnnnnnnnnnnnnnnnnnntttttccgcaggtctgaaatggactttaattggcttttgtctctagaattacccacccgttcctgcgctctacggttctccatgccccctccagtttgggggtctaaaccgaacaggagaggtgcaggggaccaggaggtgtcctggcacaaaggttcgggggtctccctggcaaggggtcccagggcctggagcccgaggcccagccaaaagcacacagcatcaaaacatgtttttagtgggaagctccaggccctgcccctccccgggggcctcgaggtcggggagcaggtgggcgtctgtctgcctccaggtcatggcagtgcaggcggtgagctgggggccggcaggggcgcggacagtgcggcgtggtcgaacagagggttgcgcacctccatttccccggtcggggccaggcccgggcactcgtacaccgtgaagtctccgtcctcattctcctcatccgaggaggccgtgtccagctccttgggtggctctttatgccgctccaggcacagcatctgttgccgttggtgctggtagtggtacatctccgcgctctgtgccagccgctggtccccaggcgagatccggggagctgcaggtgagccaggggccttcgcagtggcgtagtcggccttctgagtcaggcggatctcacgctgcagcctgcaccagcagagggaggctacggagagggcggctgcaccggccacacagaacgccaggatcagcacaagggcgaggccgtcgccttgccctccccggggctccaggggcgacatgtgcaccgggtcggatgacacaggggagcccagggaggtgtggggcgtgggcgtgggggttcctggagtggaggggaggcccagctccagcccctgcccccgtgccgagaagcccagggtggcaggctccgggagccgctgtcggtccttgggtaggggcggagttgagtgtccagactccttccgggcaagctcctgggccaggaagtcaatctcatcttccagtctgggctggggccggcccccgcctggaggccggcgcatcctgggcacacagagcccttgctggtcctcctggaagggctgaaggcagggcccacaggcatgtgcaccaggaggacaccttgcccgcctcttcagggcacagtccaggctcccgggacaggcggctacatccgggtggccggcggcggctccacgcagggcggcgccgaggacgaggccggagagcagcagccgcagcagccgcaggtgccgcggggagggcggaggcagcggcgtcgccatccttcagcgccgccgccggggcagcatggcaccgcgaggccaggggctcggcgcgggctccgggctccgcgtcgggagcagcggaggcagcgggggaggacgcaggaggaagaagaggcggcggacgcggggtcgacgatatcccgggaattccggaccg

SEQ ID NO: 132942 - DNA, 711 bp, Homo Sapiens
ggagagggtaagtaatttactcaaggtcacagagcataaccacttattactaagtgattcttgttagggtcaaaccttggagcagaactttgaaccctgtaagtctgactcctgagcaggtgttcttgtccatcctgtttgtaactgcattgtgggactcccttcccctacccccacctcaggaaggggagtggcattgtgcctctccactcaccgactctggtggaaggccatttgtccctgaaagggggatggaggctggctgcaggctgcctgcagagccagaccccaagcactgaggacacatcagtgtccagtggtccagtgatcagggagcattgagaagaaaaacaggcgagggtggtcataggggcccctcctggattgagtaccaggcctcaccccacccttggtttcccagactccacataaacccccagaaggggtccgattcctcctgtgtggctaagactgagtttctcgctagccttggcgaagcaagggagagggcagagttacatttaaggtgactcattaaaacaaaggagcctgggagctcctgcacttggcttctgccacagccgcatcacgtgtccctggcttgtctaccctgctgcgctcgagctcctggaggttggatccctccaagggtgagccagcactttgtccacagcagtcagtcaatatttgctgaattaatctggggcccag

SEQ ID NO: 132943 - DNA, 603 bp, Homo Sapiens
ggcacgaggtttttttgtaaacattagtccaactttattataaaattacttgtttgaagttttaagctagtcaaagcactaaaattacatgagttgcataccaaagcaaacaacaaaatatacatatcactatttaatctctatacaatccaacaagtatgaagagcacaacatacatttattcacataaccaagaaaaacatgtttcatctactattaaaatgtgccagtaacaagttgaagtccaacattatttaccaggtggtaaaatctttgacacccagattaagaagtaataaaatgtatattcccagcatttatattctgacccaaaacagttatttaatttggaacaatgatggtatacaggtgaagctagcaatagttttaacaaaaagtacactctatatttaacaagtcctcttatttgggttctaaactcagagtaggcacaaaacaaaagcagatttctcaagtccaaaagtgtgcaaacaagaaacatttatcacataacaaaatatatctacatatgtatgtattaactttcaggtatttttcgttttagctatatagattattagaagtaactttctgcctctaggg

SEQ ID NO: 132944 - DNA, 1181 bp, Homo Sapiens
  misc_feature (608)..(608): n is a, c, g, or t
  misc_feature (619)..(669): n is a, c, g, or t
aaaacaaaggccatgtttacttgctccgaaatgagacccaggtaacgctctttacagccattcagcaaacactttctgagccctcactgaaaacggggtcctgtggggagtgtttccagatacctcatcttacacaacatcctgacgagacagtggctgttaactgaggtgaagacacggcagcacagagaggttgactgtgtgccctgcgtcacacagctaggaagcaggggaggagccaggatttgaacccaggtttgtctgaccaagtcatgtgtctctccacactccagctctcgtctgcacagcctagaacattcctctcctgccttcgcctgacttctcctactctgtcaagtcacaggttcaatgagacttataggggcctttgctgcccctctaaccaggacggtccctggctagacgctcttgttgtttttctctgcagcacttggtgccactgcaatgaagtaattctttgatgatagcgttgtgtcctctctgcgccccgctgggctgtaagcttctggggcactcatggctgttcttgctcactcacggctccagggtccagctgggtgcctggcacacaggaggtgtgcacgacntgggtgaacannnnnnnnnnnnnnnnnnnnnnnnnnnnnnnnnnnnnnnnnnnnnnnnnnngaagggaggaagagacggatgagtgctgacgctgtgtgcaggcagaagcttccttgcccacaccccgccacttgccccacacgccctgaaggatacgatggtgtcgagcagcagcacgcccaggctgcccacaagccagggcaggtggtgcagcaggtagctgccctcgctctggccctcctcggggtttttgagcagcacgctcagcccatacagcgtgttccccagcatcaccagcgcgaacagagagtaggagatcccctgggtggacttccggaggaagttggtgcggatctgaggcagccgggaaagcaggtacaacacgctggagatggagccgatgacgaagccaatgacttcctgccgggtgaagggcttgctgcccgactccacggacaggagcgcccgcccccggaaggcttccctaggggcagccacgggcccagcagcactcagcagcggtgtggcgcacgccatccccatgaggaacaacagcacggagttgatggggg

SEQ ID NO: 132945 - DNA, 1080 bp, Homo Sapiens
ggccttcttcaaagaaataagctttgtaggaactttgagattcatgtcaaaacaactgctgtctcccgaaatcccggagcatcctcgtcccggagccgaggacctgggcaggccagagggcagaagctgcaggctgcaaactggtgtgcaacatccctgaggatgtgtttgtgttttactcacagagaacaagtactggcaagtgacaaaaaaagaacatgttttgcaaacaatcagtgtgacctgaaacccagggtaaaggctgaagtcagcatttgttcactgcagcacgagccaggctctgcaatgcttgttaaatggagtgctctggagaagagaacggcttctcagtttcccccaatcacccagaggacctgggaagggaggggaaaaggagggccgactccccacccccaagctaggctgtatcagtttgttctgcttcactgcagagctggagccagggagcatctttgaaattagatgaatgcccaatggaaggggtcttcgaattctggagctgaaagcaactcaagatcacgacatccagtcaaatgtcttcacttggcagataaagtgaagaccagagaaccaaagctatgaaagccacaccactcacaagagttgggttaaacacccaggtccccagcctctgagcccacggctcttgtcacatcacgatgtccccagctcccctacttcaccgaaaagatctctcaatctttaaagcatatgaccccttttgacaaacaacccgcaaattttctttaatactgttggaaatgttgaaatggactgccctcctccaatttccaattctgaaactgcctattgaaaacgtttttctcccaactgcacttgcttcccaccctgccaaacagacttctgctagtctaagtaaagcctctgaagtgcttttccccaactgcactctccttactcctatctaaataaacagcacccgaacttctccttaagtccacttttttcttctgcttcacagatgggaagacttgctcttcctaaattaccattctcaccccatgcaagagctctgccgggccaccaaagatacatttt

SEQ ID NO: 132946 - DNA, 1608 bp, Homo Sapiens
  misc_feature (94)..(94): n is a, c, g, or t
  misc_feature (163)..(163): n is a, c, g, or t
  misc_feature (186)..(615): n is a, c, g, or t
  misc_feature (633)..(653): n is a, c, g, or t
tgcaacgcagtgagagactaccgatggtctcgctgattggagccccctccgagagaagcgcagttcgtacgcagtcgacagagggccgggagtncagggaacgctgatttatgtctgcggttcccctctgactggcgtgattttgtgtcgtcaggggcgagcnttggaaaacccagcaacgcgccnnnnnnnnnnnnnnnnnnnnnnnnnnnnnnnnnnnnnnnnnnnnnnnnnnnnnnnnnnnnnnnnnnnnnnnnnnnnnnnnnnnnnnnnnnnnnnnnnnnnnnnnnnnnnnnnnnnnnnnnnnnnnnnnnnnnnnnnnnnnnnnnnnnnnnnnnnnnnnnnnnnnnnnnnnnnnnnnnnnnnnnnnnnnnnnnnnnnnnnnnnnnnnnnnnnnnnnnnnnnnnnnnnnnnnnnnnnnnnnnnnnnnnnnnnnnnnnnnnnnnnnnnnnnnnnnnnnnnnnnnnnnnnnnnnnnnnnnnnnnnnnnnnnnnnnnnnnnnnnnnnnnnnnnnnnnnnnnnnnnnnnnnnnnnnnnnnnnnnnnnnnnnnnnnnnnnnnnnnnnnnnnnnnnnnnnnnnnnnnnnnnnnnnnnnnnnnnnnnnnnnnnnnnnnnaagaattcggcacgaggnnnnnnnnnnnnnnnnnnnnngtctaaatgtttttatttgaaacaaatagttgcaccaagcaagaggttactttgcccactccaaattaaaacagagcacaataggggcaaaatttatttggcaggacagttccagtatgtgaacatcttcctcctcactgtggttggggtaactttactcatatgcagctgttcttacacaaaacattaaccccaaactactagtgtcacataaaagtaagtggtcttgactttgtatgtggggcagcatgttctataaatgctgaaaggtgggagaagcacaaacacaacccactctttaaaaaaaactaaataattcaaagtagaattttctatccccccccatttctccagtaataaaaagtagtgctgggatctggcacccagatttggtttttatcctgaccatttacaaagtgttcccccatatgacttgcatcattagggttatgggtaagagttcattcactttggagagacctgtgcctattccttcctcctcttcttgccttcatgctcgtgttccttggggcggctgctatctgagggtcttttagagccaccatgctgtttggcttcttccaaaaacttgtccaaaccaaaaggatcttcctcaaactgaactggtccttctcggcctctctgtctacggtctgaaccagaaaaccccttgtcgggaacaaatctgttggtctttattctggcttctaggtcatcaccatacatgtccttgtccagatttttactgggcctataaatactctgggccatatctttaccacctctccaggcttgatcataaacattataaatttcatcttctccacctgcaaatccactgtccatacccttggattggttgaagagcctttggtcatactgaacttcattggaagtccgaggattaggaacaccgagagcaataacttcactgatatcccgattttcatttctc

SEQ ID NO: 132947 - DNA, 385 bp, Homo Sapiens
ttttttctcagttatgttaactttattaataggctgcagtctcaaaaatctttcttttcatcatcagatgtttgcggaagttttggccttctagtgtgaacctggacctttactccatctataatatgattttcctgttgtagtgcattccgaagtccttcttctgaagaaaactgaacccaacccaaacctctgtgaaagccagtctccttgtcaaaaggtaaaatgcaccttctgacatggccgaactgtgcaaagtgttctttcagctgaccagacttggtggtgagatggacagagaagttgttgagttggctgcagtctccatcctcagcaaatatcgagtgttttcataccagttactgtgctatgtggactatgatcc

SEQ ID NO: 132948 - DNA, 1775 bp, Homo Sapiens
  misc_feature (745)..(801): n is a, c, g, or t
gggagtctgaagatggcggcctcagcagcgcgaggtgctgcggcgctgcgtagaagtatcaatcagccggttgcttttgtgagaagaattccttggactgcggcgtcgagtcagctgaaagaacactttgcacagttcggccatgtcagaaggtgcattttaccttttgacaaggagactggctttcacagaggtttgggttgggttcagttttcttcagaagaaggacttcggaatgcactacaacaggaaaatcatattatagatggagtaaagtgtctcaaatctcagcccactataagaagttaaaatcagaactgtttcatcttgtctcaagtttcaacatacaacttccaatttttttgtcatcatgctggcatttacatccaaatgtaaagtatgttaattttcgtttccctgaggataggtattcacatcaacacacacaatatgctgttcctaaacttgtaccttggattggttgaagagcctttggtcatactgaacttcattggaagtccgaggatttaggaacacccgagaggcataacttcactgatatcccgattttcatttctctgaaggtttcgacctcttaatccaggagctgccctggaaagattccggtcatgctgtctctcttttcgcctgtcatgccggatttcatccctctcacgtgcctccccatcctctttttccacatgagttttgatcccagctcttctttcctggctttctgggccannnnnnnnnnnnnnnnnnnnnnnnnnnnnnnnnnnnnnnnnnnnnnnnnnnnnnnnncttgggcacgcatttccacagcttcacgagccttccgatcagcaatgtagagggcttctgccaatttggcgaaattttcatttatgtgtactgtctgtagtcctcttccatcagcagccagacgtttgtctaatggaattgtataaccctttgcatttttccagttagaaatacaaggaggaatcttccactcttgttgttcctttacagtcatctttcggctaggagaatgcatgacaggcgcaggaggagaaggtggtccccggggaattttcttattaatcttgaaccttggaggctccattggatctttctgcatttctaccatccgaataaccctctgtttagctccagagttgaatgccactccttgctgagatggtgtgtatcggatatactgagcaggagccaatttgtcagctgctcgaactggcatggctgcggcgaccttctgtgatacagatttttctaaggctactcttgtcttttctgttatctctttaatagcttcttcatcgggcctttgcaggtctggatcatctgcattcataacctcctttggaaccaggtcagtgtatttgctataaatgaccttgtcttttgactgtccttgtcgagcaattgcatcatatttaatttttccttcagaatccacctgaatggccagcgcattcgacatttttttctttcgtcccatatccagtggatactgggccacatggatctctggaaaagcacctccatctccaaaatcctctaataaccgaggtatccagcctttccggtatccgtacgggggaggttctcttcgggaggagaccagtgaggtctgccgtgatctctgggatcttgccttttcttcagcctcaagctggtcctgagatagctgagtaggtgcaggtaaaaagctggtgagcgccatcttcttccgccctcgtgccgaattcgccacccagcctcgcttacctagcctt

SEQ ID NO: 132949 - DNA, 860 bp, Homo Sapiens
aatttgtaataaccccctttggcattttttcccagttaggaaaatcccagggagggaattcttcccactcttggttgttccctttaccagtcatctttcgggctagggagaaatgcatgacagggcgcaggaggagaagggtggtcccccggggaattttcttattaatcttgaaccttggagggctccattggatctttctgcatttctaccatccgaataaccctctgtttagctccagagttgaatgccactccttgctgagatggtgtgtatcggatatactgagcaggagccaatttgtcagctgctcgaactggcatggctgcggcgaccttctgtgatacagatttttctaaggctactcttgtcttttctgttatctctttaatagcttcttcatcgggcctttgcaggtctggatcatctgcattcataacctcctttggaaccaggtcagtgtatttgctataaatgaccttgtcttttgactgtccttgtcgagcaattgcatcatatttaatttttccttcagaatccacctgaatggccagcgcattcgacatttttttctttcgtcccatatccagtggatactgggccacatggatctctggaaaagcacctccatctccaaaatcctctaataaccgaggtatccagcctttccggtatccgtacgggggaggttctcttcgggaggagaccagtgaggtctgccgtgatctctgggatcttgccttttcttcagcctcaagctggtcctgagatagctgagtaggtgcaggtaaaaagctggtgagcgccatcttcttccgcttcttccagcgcgagcgacagcaccgctggccctcgtgccg

SEQ ID NO: 132950 - DNA, 871 bp, Homo Sapiens
ggcagtaactctaacggttttaaggtagcgaggcctgggtggcgaattcggcacgagggatggcgctcaccagctttttacctgcacctactcagctatctcaggaccagcttgaggctgaagaaaaggcaagatcccagagatcacggcagacctcactggtctcctcccgaagagaacctcccccgtacggataccggaaaggctggatacctcggttattagaggattttggagatggaggtgcttttccagagatccatgtggcccagtatccactggatatgggacgaaagaaaaaaatgtcgaatgcgctggccattcaggtggattctgaaggaaaaattaaatatgatgcaattgctcgacaaggacagtcaaaagacaaggtcatttatagcaaatacactgacctggttccaaaggaggttatgaatgcagatgatccagacctgcaaaggcccgatgaagaagctattacacagagataacagaaaagacaagagtagccttagaaaaatctgtatcacagaaggtcgccgcagccatgccagttcgagcagctgacaaattggctcctgctcagtatatccgatacacaccatctcagcaaggagtggcattcaactctggagctaaacagagggttattcggatggtagaaatgcagcaaagatccaatggagcctccaagggttcaagattaataagacaattccccgggtgaccacttctcctcctgcgcctggccatgcattctcctagaccgaaagatgactcgtcaaaggaacaacaagagtggaagactccacgtgggtattactaaacttgggaacaaagtgcacaagggttatacaattaccattagacc

SEQ ID NO: 132951 - DNA, 443 bp, Homo Sapiens
cgacatgttttattttctcctttttcttgttggttttctcagttatgttaactttattaataggctgcagtctcaaaaatctttcttttcatcatcagatgtttgcggaagttttggccttctagtgtgaacctggacctttactccatctataatatgattttcctgttgtagtgcattccgaagtccttcttctgaagaaaactgaacccaacccaaacctctgtgaaagccagtctccttgtcaaaaggtaaaatgcaccttctgacatggccgaactgtgcaaagtgttctttcagctgactcgacgccgcagtccaaggaattcttctcacaaaagcaaccggctgattgatacttctacgcagcgccgcagcacctcgcgctgctgaggccgccatcttcagactaaagcaccttctcgagccgaggtcgcggcccc

SEQ ID NO: 132952 - DNA, 742 bp, Homo Sapiens
  misc_feature (624)..(624): n is a, c, g, or t
  misc_feature (641)..(641): n is a, c, g, or t
tttttagagaatattattttaatggtatcaaaaacaaaactttttttggccgatttagtacttgctggaataaagttgcaaaatgttactcagtaactgacttagcttctaatcaagccagaatgacacacagtctgtatattaattaagtatatacaaatacatccaatgttaacatgcacagacatagaaacaaggatactacaaaaccgaaatcaccatctctactgatgaaaaatgaactgaaaacaaaacatccatccagtagtccagaatatcttatttttgaaaaggttttgaatattgctctttccaagaattcaaataaactccaaatggttaaatttgactgttttctcaacatgaaaaaaaggaagcagacatattcctatggctataggaacataccttttactcagtgatatcaaattaaaaggtctgacataatttcactcttctcaggtaaaaagggctcttcatattctagtggttaagaataaatcccttcaagttcttatgcatttgagtgtcataccacctacagcaacatacgctcaagtacctttaacgatacagtcataaagcatgagtttaattttcctgagaactaaattagacctacanaataaacaggctatganaatgacctgagttcataggaatctctaagttagagatatttagctttgctaagattcatcaaaagcttttatagcagggttcttagtgagtcacatactgg

SEQ ID NO: 132953 - DNA, 841 bp, Homo Sapiens
tttttaaaaaagctttattgaaatgcaatttaccataaaatttacccacgtaaggtgtaagatttaatggtttttgtgtatttacagaattgtacaaccatcaccagaatcaattttagaacattttcaccaaccccaaaagaaaatctactgtttagatatcaccctccaatcctccccaacccctggctagcactaatctgctgtttctctatatatttgcccattttggatatttcacagaaatgggatcataataatatgtggtcttttgtgactggcatcttccagttagtataatgttttccggtttcatctatatagcagcacacagcagtacttcattctttttcttttttaaaattgaagtaaaattcatataaaattcaccattttaaagtgtataatttagtggccgttagtacattcacaacgttgtacaattatcatcattatcaattccagaatgttttcattaccccaaaaagaaaccctgtacccttaagcagtcattccttctcttctcccccttaactcctgatatcactaatttgttttctgtctctatagatttgcctgttctggacatttcatataaatgggctcatacagtagtgcctttttctgtcttatcttcctttactcagcctaatgttttcagagttcatctatgttgtagcatgtattggtacttcattcctctttatggccaaataatactctattgcatggatataccacattttgtttatccattcatccattgatagccatttggatttacacattttggttattatgtaatgctgctataaacatttgtgtataagtttttgtttgg

SEQ ID NO: 132954 - DNA, 1130 bp, Homo Sapiens
  misc_feature (179)..(212): n is a, c, g, or t
ccaaaagattcccaaggttagcagttttccccagtcccggagcgttgtaaaaacgacggcccagtggcctagcttataatacgacctcactataaggggaccactttgtaccaaagaaagctgggtacgcgtaagcttgggcccctcgaggggattactctagagcgggccgccctttnnnnnnnnnnnnnnnnnnnnnnnnnnnnnnnnnntcatttccaagaggcgagtttattgggggaggggctggtcaagtcatcagtgcaacactgcatccccgctcagggcaggtcagtccagtgtgtgggccgcgggggtcacaggcatagcagcaggagggggagtgagctacccccacggggccacccccagcccagtccaggggtgggagggagggggtgacccctgtcgaggtcctcaggcatctgtggctgagccgggcggctcctggggcagacagcgtcgttgccggagaatcgacttctcctcctccatctcggaggcagtgctggggcttgcgccctcgggggaccccccttcatccctcgagcagtcgggtccggcgtcctcctcatactctgtcagacaatctgactcctctccgtcagcacagccatcagagacatagctcgtggggggctcaatccgggacacaatctctgccaagtcagtgaagccagagcttgggaaggcaagcacgtctgcacggcggctctcattaaggtctgtagaccgccggtctgtgagcattttctcaatgacgttgccacggctccagcctccaaacaccgccttcccgtactggtagcccacatcatagatctggtcgaacttcccaaagtccatggtcttgaagcagtcgatgggcgggcgcaggtactcgcagtaggagctggacttgacacctctagctgccgcacacaggacacgtagggcaggcgggactggatttcagccatgtctggaaccttttaccttgtcagcccagggattcatccgctttcacagcagccacccagccggacaggctgtccccgttaggtgcttgaggcccggccttatcctggcttcccacgttcaatggccgatggaccgtttttgggcaccccatgctggcgggagcacccccc

SEQ ID NO: 132955 - DNA, 1154 bp, Homo Sapiens
  misc_feature (1138)..(1138): n is a, c, g, or t
ggcctgggtggcgaattcggcacgaggccaggacgtcctggcgcccggggaaggctcggcgggacggatttgcggtgcgcagccagtgccgttcgtccctcaggtgcttggcgtgatgatcggggccggagcggcgacctcatcggcgtggtggaggcactgacccggcagccgcgagccacgacggtgcacgcggtgcgcgacacggagctggccaagcttcccgagggcaccttgggtcacatcaaacgccggtacccgcaggtcgtgacccgccttatccacctactgagccagaaaattctagggaatttgcagcagctgcaaggacccttcccaggctctgggttgggtgtgcccccacactcggaactcaccaacccagccagcaacctggcaactgtggcaatcctgcctgtgtgtgctgaggtccccatggtggccttcacgctggagctgcagcacgccctgcaggccatcggtccgacgctactccttaacagtgacatcatccgggcacgcctgggggcctccgcactggatagcatccaagagttccggctgtccagggtggctggcccagcaggaggatgcacaccgtatcgtactctaccagacggacgcctcgctgacgccctggaccgtgcgctgcctgcgacaggccgactgctctcctcattgtggggcctggggggacccaggagcctacccctcggccagctggagcagatgctggagaacacggctgtgcgcgcccttaagcagctagtcctgctccaccgagaggagggcgcgggccccacgcgcacccgtggagtggcttaatatgcgcagctgggtgctcggggcacctgcacctgcgctgtccgcgccgcctcttttcgcgccgcagccctgccaagctctggcttcactgacttggcagagattgtgtcccggattgagccccccacgagctatgtctctgatggctgtgctgacggagaggagtcagattgtctgacagagtatgaggaggacgccggacccgactgctcgagggatgaaggggggtcccccgagggcgcaagccccagcactgcctccgagatggacggaggcagaagtcgaagttctccggggcaacagaacgcgtggntctggggccccaaagg

SEQ ID NO: 132956 - DNA, 1673 bp, Homo Sapiens
  misc_feature (20)..(20): n is a, c, g, or t
  misc_feature (34)..(34): n is a, c, g, or t
  misc_feature (39)..(39): n is a, c, g, or t
ctccacggtgccgcgtgggnccgcgccctccttntgggnggagcaggactagctgctaaagggcgcgcacagccgtgttctccagcatctgctccagctggccgagggtaggctcctggtcccccaggcccacaatgaggatgcagtcggcctgtcgcaggcagcgcacggtccagggcgtcagcgaggcgtccgtctggtagagtacgatacggtgtgcatcctcctgctgggccagccaccctgacagccggaactcttggatgctatccagtgcggaggcccccaggcgtgcccggatgatgtcactgttaaggagtagcgtcggaccgatggcctgcagggcgtgctgcagctccagcgtgaaggccaccatggggacctcagcacacacaggcaggattgccacagttgccaggttgctggctgggttggtgagttccgagtgtgggggcacacccaacccagagcctgggaagggtccttgcagctgctgcaaattccctagaattttctggctcagtaggtggataaggcgggtcacgacctgcgggtaccggcgtttgatgtgacccaaggtgccctcgggaagcttggccagctccgtgtcgcgcaccgcgtgcaccgtcgtggctcgcggctgccgggtcagtgcctccaccacgccgatgaggtcgccgcggccgtactcgcccaccagctccttcttgccactgcctcgctggatcacgctacgcagccgcccattgagcacgatgtaagtgcagtcggagcggtcgccctgcctgtacagcgcgcgtcccgcctccactgcagtccagtcgatggcgaagtccatctggcgcacgaagggcgacatcctggctgccaccgtgtgcgccgcactcagcaccacactgggctgtgcgcgcatgatctcatagaagtcggacttggagatccgcaggaaggtgcagtcgcgttgggctcgcagtgtgaagatgagaggttcgccagtgagcaccgccagctgccccaccagttccccgggctgcgctacgtacaggcacacgtcctccgccttgtcgatcatgcgctggtacacgtgcaggcgagccccagagcacagaagtgcaggctcacgtcctggtctccctggcgggcaatgatggtgccagcatttggcgtggtgcagcaagactctgctgttcaggagggaggggtcctcaatcacgcatcagcttggccagctcactgcttttgctgcctcagaagatgctcgctaggctctggcggccactggtagggcccgaaagggcagccaccagtggccgactcatcctcacagtagctgtattcacaggcgcctgccggctgctcacgaggctcctgagtggggtgccgagcggggactgccagggaccccccggaggcctcttcctgcaggacacggagatccggccacgctcataggccatgtcgaagtcggagcggggccaccctgcaagcctgagatgtccctggcatggagacgcagcggctcagcagagggccgagggggtttccagggatgtgggccttcacagggtccccctgtagtccaggcagcgggccccgctgggatcgggtgccgcctggcctcgtgccgaattcgccacccaggcctcgctaccttagaaccgttatagttactg

SEQ ID NO: 132957 - DNA, 1378 bp, Homo Sapiens
  misc_feature (140)..(140): n is a, c, g, or t
cccttccctccatttttgggaggccagtgctgggggctttgcccccctcggggggaccccccctttcatcccctcgagcagtcggggttcgggcgtcctccctcatactctgtcagacccaatctgactcctttccgtcnagcacagccatcagagacatagctcgtggggggctcaatcccgggacacaatctctgccaagtcagtgaagccagagcttgggaaggcaagcacgtctgcacggcggctctcattaaggtctgtagaccgccggttctgtgagcattttctcaatgacgttgccacggctccagcctccaaacaccgccttcccgtactggtagcccacatcatagatctggtcgaacttcccaaagtccatggtcttgaagcagtcgatgggcgggcgcaggtactcgcagtaggagctggacttgacaacctctagctgccgcacacaggacacgtaggccaggcgggactggatttcagccatgtctggaacctttaccttgtcagcccagggattcagccgcttccacagcagccaccagccggacaggctgtccccgtaggtgctgaggtccgtctcatcctggctccccacgtcaatggcgatgaccgttttggcacccatgctgcgggcgatgtccgctggcagattgttgatgtagccgccatccatgagtaggtgcccgtccttggggtcgcacagcgggggcaggtagcccgacagcgtcatgctggcgcgcacgtaccgccacagggagccatctttgtggactcgcatggctgaggcggtgatatctgtggtcacgttgaagtaaggcagccacaggtcctcaatctgcttatcctggaagacccgatggatgctgcggttaaaggcagacccagtgaacatggaggtgactgggtacgtgaggtccaacacaggttccagcaccgaagtcatgctcttggcccactcccgggcccgctgcttcgtgcggctggcgctgcgctcctccgcgtacaacgctccgatgaaagagccaatggacgtgccgcccaccaggtccacggggacccccgcctcctctaatgcctttagtactccgatgtgcgagcagcccctggccccgcccccgcctagcacaagggcaatggtgttccccgtgagcaccctcgccaagcgggagaagtcgctgtgccggtccgcgcgcctggagaaaaccttctcgtagagctcatgcagcttggcagggctgcggcgcgaaaagaggcggcgcggacagcgcaggtgcaggtgccccgagcaccagctgcgcatatttagccactccacggtgcgcgtggggccctcgtgccgaaatcgccacccaggcctcgctacctt

SEQ ID NO: 132958 - DNA, 561 bp, Homo Sapiens
gaaaggactgttcttaaacttgaactggaggtgaaagaggatgaaatgatagatttctgagtaattgttaaaggcttttcaccgctttttaatttgcttccctggaaatcatccttgggagggaggcaagagaaatgtaactgattttctagaggaggacaggaacaaaggtaagttcccccacccccacaaggccacacaggtgggtaccataatagtatcctgttagcaattctgcttacgctgggcagcctatgcttcagtacatagagcccagccggctggatcacctagaaatttggagagaggagccacagtgctatgccaaggctagagagggcagtgacagaaattctccataattcaccagtctcatctgtcattcgaccaggaacaagaaactaagaaaccaaacaacaaagtgagcctggccctgctgtagcttgataaatggggaatcaaattaatctgtgtaatctttcagtatccaaaactgcaggcatacttaacacatgcttagatgtccataccctagattattatcagccatttcctcgtgcc

SEQ ID NO: 132959 - DNA, 810 bp, Homo Sapiens
  misc_feature (133)..(133): n is a, c, g, or t
  misc_feature (180)..(180): n is a, c, g, or t
  misc_feature (486)..(517): n is a, c, g, or t
gagatggcagtcagtccagccaaggcagcacccgtaccgatgaggcatgtggtcactgtgtcagcaggccccatgtcctccagccacaccctgcccagcagacaggcagccccaccaagtttccccaagctcncaccacaaaagggaggcccagaggggtgagaggcttggccggtactntgtgaaaggtgacagcatgaagctcatctctgtatgaaacctctgcctcggcccctcagtcagggtgctgccctcagagcctggtactcggtggccctggtcaggcctggtggctcagctgcaggctgggtggccgcagggctggcctgtccatggtgaatggagcgcattcatgtctacaaccccgccccacagctctgctctcggcgtgaaaaagctgaattcacggttcggatgaacactcccagcttttctacagtgggctgacttgagcttctcagtctgtaacagaactgaggacttgcnnnnnnnnnnnnnnnnnnnnnnnnnnnnnnnngacagaccggccccggccccacccttcccagcaatgcggctgcatccccatgcctctgtgcctctgccagcccctcctgcaatgccttcccttcccctcagcccccagaggtccagtcaaaacgtcctgctcctgtatcacccctcgccccctgcattcctgtggtgtgtcacctgtcagagttgtagctggccagcactatctgcagcagtgccagctgctcacagtcacttgtgcctgggtgtggggactaagctgtccatgtgtatcccacatcagccctcagccccctc

SEQ ID NO: 132960 - DNA, 341 bp, Homo Sapiens
aaaagtatatttttagtgattgctctatggtttataaatacattataaaacaatctgtcttcaattatatcatattgcttcacatgcagtataagaaacttttaacagtacactctgaattccttctgcccatccctcgtgcttgttgttgtacttttaaatgtggtgtaaacacataatacactgtgacagattttgctttagatggctaacttttaaaataatttcaggtataaacatattttattttacctttgattatatcacttctgatactcttcatttctttgatagatccaaatttctgactcaatcatattccttctgcctgtagaacttcc

SEQ ID NO: 132961 - DNA, 1698 bp, Homo Sapiens
gggtagctactatgtgcaatttattcacgatacaacatatgactgcctactatgctccaggcattacacaaagttctgaggatatacaggctaattaagtgcaacaagaatacttagaattcgtacaaagcagtagactgtgctatgagagccggtaatgagggtcctaggttagaggggaaaagaagacttcccagaggacgtgatatccaagacaaggcctgatgataaacaggactggccaggtaaggaggggaagagagagccaggcagagaaaacagcatgtgtgaagacgactcacaggcaaaactactgttatgggtgcctcacatacagatcctcagtgatcatcaatccagaccaactctattctttcctttgtggttgttattccttccaatttatttagattttattgtttagtgaaaatgggcctctagtaaagtgtccagtcacaggtgaaggccaatatcagagttttaaaatgggaacagagcctaattatttgaaaaggagactcctaagatgaggagcaggtggtactaagcctgccaatggcctcagtcccttggcaacatcaagtcaaagcaaatgcctgagtacaggccttttgccagcagcaagtattttctgagagccacccaccggcccagagcagaagcaggaagagaatgaacatgtctgagtgttcccctggaaggctgggccttacaaggacaggcttctgtcagcatggtgacagtcttctgtgtagatgggggagggagagaagtcccaatgtgccacccatgggatccagcagaaactgggctctggagtattgctggccccagtggactttcatccaaggagttctttggtcttcactgccagatgcctgtccagttctgccactgtgtcatcggccatttggctgatctgtttctctattagcctaatggtgtcctctgagactgtatccttggatttcttcagcttgttcattgagttggtgcgaaccttccgtaaagagtctttggcctttgttggtgttctgtttggccagtttcaccagcatttctctgtgctctctggttacttggggaatgggtacccgaattagcgtcccttccacttctgggttcagattcattccactttctcttatagccttgatagctgcagctgtacactctgggaagctggccatattcaccgaaatcagctgtggcgacttcatggagatctggctaatctggtttaaagcaagcttcccgtcagcagttaccacagcaatcttgtcaagggatcctggtgaggtccttatattgagagtcttattgaaattatccttgagagcttctatcacagacttcatttcttcattcacctcttccaagttgattatatcctcaaccaaggcagcattaatattcactctggtttgggactgtcctttccctttggctttggctttcttggtagcaaaatggcggactggtacagctgaataggccatgtattgcctatggccatgttgtctttcatgcactgtcttcagtgtaacttctgaaacgggtctgatagaggctgcaagataattgcgaaaggtagggtggaccatgcggaagcactttaatcccaaggccatgactgaagacaatccttggaaacatccacagctatcgcccaggttactaaggaaagactcgtgcccc

SEQ ID NO: 132962 - DNA, 1286 bp, Homo Sapiens
  misc_feature (432)..(432): n is a, c, g, or t
cgcaggcaaggtatttttcttgaggagcccacccccccgggcccccagagccagaagccaggaagaagaatgaaccatgtctgagtgttccccctggagggctgggccttacaaaggacaggcttctgtcagcatggtgacagtcttctgtgtagatgggggagggagagaagtcccaatgtgccacccatgggatccagcagaaactgggctctggagtattgctggccccagtggactttcatccaagggagttctttggtcttcactgccagatgcctgtccagttctgccactgtgtcatcggccatttggctgattggggaatgggtacccgaattagcgtcccttccacttctgggttcagattcattccactttctcttatagccttgatagctgccagctgtacactctgggaagcctggccantattcaccaaaatcaagctgtggcgacttcatggagatctggctaatctggtttaaagcaagcttcccgtcagcagttaccacagcaatcttgtcaagggatcctggtgaggtccttatattgagagtcttattgaaattatccttgagagcttctatcacagacttcatttcttcattcacctcttccaagttgattatatcctcacccaaggcagcattaatattcactctggtttgggactgtcctttccctttggctttggctttcttggtagcaaaatggcggactggtacagctgaataggccatgtattgcctatggccatgttgtctttcatgcactgtcttcagtgtaacttctgaaacgggtctgatagaggctgcaagataattgcgaaaggtagggtggaccatgcggaagcactttaatcccaaggccatgactgaagacaatccttggaaacatccacttatcactccctgccatctgccatttagattcataatcacacgtattcaaaaagcatttgcggcagctctaccactgacttgtgacttgtaccaagtgatttctcctacgtagattttgtttcaaccataaaatgaaggggtcagatcaggttttcattctttccaactataaagctttccaaaatggggggaaatgcaacagtgtggtttaaaacaaaataaaggcactaaacttagagaaaactccgagtcttggttccagcacttcctaggcacgtgaccttaaatcggtcaaactctcaggacttccgtctcatcagctatcgcccaggttactaaggaaagactcgtgcgacggcggcgaccgcaatcccgagaatt

SEQ ID NO: 132963 - DNA, 1013 bp, Homo Sapiens
  misc_feature (705)..(752): n is a, c, g, or t
ggtaaagagcagggaactaactttgtctccatataaagaaacactaaaatttatgtttcttaaaggcaaattaggatcaaacagaaactcctaatatggatttcatttgcattcctactgtgcattcggtaccctactgggcactattccatcttgtgtcatttctgggagtgtgaggagattagagaaaattagcaacttctcctgggcaggagggccacagccctgaaaggtccaggaagggattccggtccacaaaaaagcctcaggaaagctgcacaatcagacaccggtttctcctcctccctgggtagtttcttccacttcctgactcatcccaggatgtcactccctggaagagggatgggatggcagagacttgagcctcaccctttgcaccgaaacctgatgtggcagttattgcctgggagtgggtgtagtggggcgtcctgggtcaccgccttacaaaccttgtgcgatcactcacctccctcctgctccaacaagtcgctgtttggcctgacattacagagcagaatcttggctgtgctgttttccttccctctgcgacccacatgtggaaaggggctagccttggtcacataggcaagtctccttggtatagagcaaagtacagcagttttgaagaatcactaacatagacccttacgctctggcacaggctacaaatgttacatgttttcnnnnnnnnnnnnnnnnnnnnnnnnnnnnnnnnnnnnnnnnnnnnnnnnacagagcaaaaattgagccctgatgtacctgattctagcacagaaacattaaagagttgccaattcatgcgcctcaggggccaggccagtgagtgcgagtgggtggggctgggactttggtgaattggaacacacaggggcagcatctatttaataccgaagatgagtgcaacccgggagggcagctccgatgttgccaggttgcccgatgttttccaaagaaaagctgaaaattcagaattgttacttgaaatctcctga

SEQ ID NO: 132964 - DNA, 665 bp, Homo Sapiens
aaaagctttttcaatgttgagtttcaactgttcctcccattttttatctgattttatcttactctttcggaattcaatctgggcatcacgttctttcataactctactaagaagaagtcccgaatgaaagtttttcactctttctgtctggtaaaattgatattgctttgcatattcaatggccttttttctttttccttgtttgtatatttcttcttccagatcaagaatttgtctttctgcctctatttcttcatcacgcttctttttggcttcaagtttctgttctttcatccctgcatatgtattagtccagtgttttaccacttcttgagatcgcaaatgcatttctttctttgcctttctttctgcacggaggcatgctgcttctcttgtcaacctgtcaaggctatcttgaatccttttccactcatcgtgtggaattatggtgacctgctggagatctactttgctaggtagaagaggcagatagagaacttgatcttcttcagagtttcttatttctgtactttccttcgcccgtccacagcgccgtccaaaccgtaccagcatctctgacgaggtgtccatggtgctcctagatctggaaaagtgactgtggcgccaagcgccgcggacgccagccggtggagttgttactcgta

SEQ ID NO: 132965 - DNA, 688 bp, Homo Sapiens
gtgtgagccaccatgcctggactcgttgttgttgttgtttttaattagtgaggagctacaagaacacatttataaaaattaagaggaaacagccccactgcatttgagaaggttaccatttccttcgaagttcctgctgttgccccttcctggtgggggagacactgtcctgtttcagtcattccgttgctttgctttatagttttattaatgtgtttgtgttggctttgcatgttttcaaatatatgaatgaaatcatgcagagtttattcttttacagtttgccttttcacttgattatgttcctgagatgtatccgggattattgtgtgtaggctgtatgggcattccttttccctgctgcctagtgatccattgaaaatacaataattgatttttctatgtggttccactggtcatttttctgcccctgtgccctttgggaatcatctcctaaactctagtctcggcccttgctcttccatgtaaccttgagaatcagcttgtcaaattccccccaaaaaccccttgagatgtagaatggaacccagctgaatctatagatcagtctggataaaatcagcacctgtgtaaaattgaattttcccattcatgagcagggtttatttctgcactcaatgttttcaataaagttgtgtaccttttcccataaagatcatgccttttt

SEQ ID NO: 132966 - DNA, 323 bp, Homo Sapiens
ggattatttctttaaattcttttaaaggtgccatcttggtggcaggtgccaccagggaagccattcctgcctgagggtgttgaaacaatatgaagcttctgtgccagtccttcagtgagctactagacagatcaaaacacacaattccagtttttggcagacaaagtccttattgccaagcctgcacaagtaagccataacagaaatgtggatcatcatcctcatgactaccatgggacatgggaataagagatgacagatgctatgcaaaatgccaaaatttaccagcctaatttttcattaaacattcccctgtttgctat

SEQ ID NO: 132967 - DNA, 929 bp, Homo Sapiens
  misc_feature (160)..(199): n is a, c, g, or t
  misc_feature (211)..(212): n is a, c, g, or t
  misc_feature (215)..(215): n is a, c, g, or t
  misc_feature (217)..(217): n is a, c, g, or t
  misc_feature (222)..(224): n is a, c, g, or t
  misc_feature (228)..(229): n is a, c, g, or t
  misc_feature (236)..(236): n is a, c, g, or t
  misc_feature (239)..(244): n is a, c, g, or t
  misc_feature (804)..(853): n is a, c, g, or t
ttggacaaggcccgggttttcacttataaggccacgggtttaacccttgggctttatcggaaaattaattacggactccccctaataggggagacccggccagattttacccacctttttccaaggaaaactggggtcaggaaaacagctatgaccaggnnnnnnnnnnnnnnnnnnnnnnnnnnnnnnnnnnnnnnnngcctcgagttgnngtngnggggnnngggnntgtgggnggnnnnnngttcaaattcagcccagttttattgcaaataaaacaagtcattcaagtgaattgtggaaattgagggtgcacgtgaaggggtggcaagggaacgggactcttgaagatggtcagtgtttccttggtttgaacttcaaagccacactgttgatgcaaaacctctgaccattgggcccaggtccatcaggaaacacgtgacctagatgagcttcacactgcttgcagacaacctctgtgcgagctgatcctaacgaggtatccagacgtctcaggatccctgtgtggctttcatcagagccagacgtaccatgagcctcggaaaacgaaggccacccagtgccagagcagtactttttctcagaactgaagagtggactgtcgcagcacacgcaatgatacattcctgcttccttgttattcaggtagatcccactgaaaggcggttccgttcccttttctcttgtgacgtagaactgctccggggttagtttcttttgccactcactcttggcaagaggcagctcacacgttgcaagagaccctgcctcccccagtcccgnnnnnnnnnnnnnnnnnnnnnnnnnnnnnnnnnnnnnnnnnnnnnnnnnnggcgcagttccgagggtcaggccccggagcaaccagaggagccgcgccatgacgcccgctccggcgccgctccccc

SEQ ID NO: 132968 - DNA, 1011 bp, Homo Sapiens
  misc_feature (300)..(300): n is a, c, g, or t
  misc_feature (918)..(938): n is a, c, g, or t
gcgccacccaagggccccgaatttgtggaatgagtccctgccgggccgggtgaccattcttttcaacaatagggataataccctccctccttttcttataaactgaaagatccctggagcccgggaaggatttcaggggcagacaagaccctgataaatgagcctggccagggaaagggccaaaccaacattcttggttactttgctttcccccacccctgttttctggggggcagagcccaattgcccaattttcttcccctaatccaaaaagtcccctggtgtgggtgggggttaaancgtgctggtgcatcctaggtcatccaagagtgagcgcccaagtcctgagaagggggcacagaactccctggagggtggagatggagcacctgccccccatggcagggtacactctccccacagccttcctccccaccatcccgtggggactctcgggatttaagcactcgtctctctgggaggcccagaccccactccatttataggcacatctccttcatttcctaggtcactgcccctttgtttacagctcctgcctcctcccttgaccacagcctggtttacaaattccatcagctcccagccccacctgccaaagtcccaggtttacaagccacgcttacttgctgtgtctgcgtggaattctctcctctgtcccctccagtctcctcattggagtgacctgaaggtgtggcttcctccactttttctcagtattactttgccttagttttccccaagagggaaggctggaactcttaactctgtaccccttgatagttatttaattctgtttctcctagtggttcacaattgaactgaattgagatggtgtcgggtggctaaggagacacctcacctctccttccccattgtgccgcctttatcaattgcctnnnnnnnnnnnnnnnnnnnnnaactttccataataaaatggagttctcttccctcgtgccgaattcgccacccaggcctcgctaccttggaccg

SEQ ID NO: 132969 - DNA, 1028 bp, Homo Sapiens
  misc_feature (934)..(954): n is a, c, g, or t
aagaggaaagaagctgctttctgcctgcagccaaagctccaaggggcgggctggccccccaagggccctgaattggggaagagttccgcccggcgggggcccattttccaccaataggggatattcctcccctccctttttataacgtgaagatcctggagccccggaagattcagggcagacagaccctgataatgagcctggcagggaagggcaaccaacatcttgtaacttgctttccccaccctgtttctgggggcagagccaattgcccaatttctaccctaatccaaagtccctggtgtgggtggggttaaacgtgctggtgcatcctaggtcatccaagagtgagcgccaagtcctgagaaggggcacagaactccctggagggtggagatggagcacctgccccccatggcagggtacactctccccacagccttcctccccaccatcccgtggggactctcgggatttaagcactcgtctctctgggaggcccagaccccactccatttataggcacatctccttcatttcctaggtcactgcccctttgtttacagctcctgcctcctcccttgaccacagcctggtttacaaattccatcagctcccagccccacctgccaaagtcccaggtttacaagccacgcttacttgctgtgtctgcgtggaattctctcctctgtcccctccagtctcctcattggagtgacctgaaggtgtggcttcctccactttttctcagtattactttgccttagttttccccaagagggaaggctggaactcttaactctgtaccccttgatagttatttaattctgtttctcctagtggttcacaattgaactgaattgagatggtgtcgggtggctaaggagacacctcacctctccttccccattgtgccgcctttatcaattgcctnnnnnnnnnnnnnnnnnnnnnaactttccataataaaatggagttctcttcccctcgtgccgaattcgccccaccccaggcctcgctaccttaga

SEQ ID NO: 132970 - DNA, 1012 bp, Homo Sapiens
  misc_feature (899)..(933): n is a, c, g, or t
gtaccacccaggtcgtataattttttcctaacctcccgcttcatggttgctcccccgacaagggcaattaccttaattgatacacaatcgatttacaacgctgattccttcagcttaaccaacaataaagcatttttaccatcacattagaattgagaatccacacgcacccaatttaaagtgataattatcttggcggaaggagcgaaggtgggggcgttacaggatgagatatgacagaagttacttgttagagtcctagtttctgaagttgggtagtaagctcattggtgctcgtgacattattaaaagaaacaaataataggggatgcgtgcatccatgaggagaaacgtggcatgaacaataggtataaattctaactctcacctccgctgtgaatgaggcaaagatctacagcacatttacttgatcacacagtctgtgaaacaaagacacgttagtggccacggtgggctgtgacaactctagtctcacctcgatgagtcaggttaaaaaggatattgacacttctcttccttaagtaattttcagctatgagtgtgaagttataggtttcttgtgagtcttgagttatttgccaattacaccagtttttgtgtgtacaaagtttcttttccccagaaaatgattcaaataaagtgtagctttgggaaggttgtttagaccaccccaaggcagtgtccgtcccaggatcccaagtacagtgcaaagtcttgaagtcctcggtttcacaagaaaagtccttgggctcctcaagtacttttgagacaaaagaacgatgcctttcatgccttcactgacatttccttgacttgcctcacaatagcccggccgtaatggccgaattcccgggcatatgtccggtaccgtcgactgnnnnnnnnnnnnnnnnnnnnnnnnnnnnnnnnnnncggccgcttcctcgctcaactactcgctgcgctcggtcgttcagcaagtagcgcgctagcgccctatagtgagtcgata

SEQ ID NO: 132971 - DNA, 248 bp, Homo Sapiens
catttctctcatgactaatgagatgaagcgcttttcatatgtttttggaccattaggatttactcttacctgaagtgtgtactcaagtgttttgtccgtttttctaattgattgtaatgagttcttcacgtaattttaaatactagtctttcgcaaacattttgtcccattctgttgcttgtctttttattctttatggtgccatttaattattattattataattttttgagacgggagtgtcatgc

SEQ ID NO: 132972 - DNA, 642 bp, Homo Sapiens
ttgacagtacacgtcacactgtatttttgtgagcaccttaatgtggtttccccagctctccatggctgactgggacctctcaagagccaggcccaggtctgtccatctccatgcccacagggtctgggccagagaaggggctgaagaaatagtttttggtgagcttctgggtcctgtgagggatcttaactccatgcccagctgagctgaactctaattctccgcatggtttggggttggtggggctcctggtgccccggacacaatggcaaatatgaaggctgcccaggacctggaggactcagcgaccctgcctctgccatttggctgtgagtttctgtaggagctcatgtggtcgccggcggaacttcttctgggtgaagtagaagaggatggggtccagcacgctgttggcactggcaaacggccgcgtgcctttgtaggccgctgcaaaggcctccaatacagtgcaggggacgcccggcgtcgagcgcactgccaggtaggctgtcttggtgatgtgaaaaggcaggaagctgatggcaaaggcagcagccaccaccacggccatgcgggccggcttgccacgccgctcctgggccacaggctctgccgggccatcctggcggcacaggcggcagg

SEQ ID NO: 132973 - DNA, 483 bp, Homo Sapiens
aatgtttatattttattttcaaggtttattgtttaatgaaatattttattcttgcatttccataaggaaagggaaagtcatgatcatcctaaaggatcacagtttttaaaaggcaaacattttccctaaggaaacagacacaagctttcctagagaatatgatgttttttaggcattaataaggtccttttttataaaggacacttttctcctagtagttttgaattcaggaacagatccaaagttagcagtatatggctgctacatttccattttcattttcgagccatcagtttatgttcagatgccatctctgtaatcgcacatttaaaacataactgtagcctcactaatggaaaagtagtatgatgaacaatcattcccaatggtgtacaatgtaagggttttagggagcaacagtatttaactggaagaaagaattgcatatttaatgtagtctaatatatacacatttgtttaaca

SEQ ID NO: 132974 - DNA, 992 bp, Homo Sapiens
aaatggcaaagaacaatcatttattggtttattttgtctctactaaacacattagtcatttatcatttaaataccggacttcattagaaaccgttgtaacactttttctccctcctgccataaaaatacagtaagtaatttgcttaaaaaaaacaacacaacactaggaacaagtgttctggtttcttctcactgaactaaagacatttctcagtgatttcagtttgtaaatcagtaagacagtgcaggctacaaatcagtgcaggctgaagactgagattcaaatgatcttccacttaaaagtgctgagctatggaacctgctctctctatacctctccatttcctaacatatatacaactgaaaccactgatttataaactattaagtagtgctgaattctgtctgctctattagtttaaatgaatgcaacttacctttagcattatattcagaaaaatacttacttaagcctcaaggtccccaataatttggagtactgaactagataaccaccctaagacacttctgacagaagtaatgcattacttagagacaggtttccaaaccctgctgttagaacctatgcatacatggaaaacactggcagtcagtcattgttcacacagttttactcttcaggcagtcctctgccattggtcagcttgaactaggccagagtctagcaggaaagtgcatggtgcaccagattcaccatctcttaagtcgccactgttttctcttctttactgaaaggctgtactgagccaggctttacccatgacaggccagcaacatgaacacttttattgtgctgttcttcaggcttctttttctgagtcagcatcttttctctggcttcatcatgtacagaaggattccatggagaaaagctaattgcataggggtcttctattttaggttggtcaaacaaacgagcagtgcacaccttaacactgtcaacaactttacttctaaaaagataaatatct

SEQ ID NO: 132975 - DNA, 685 bp, Homo Sapiens
ctagagtagcttctccatagacagagcagggctaccccataggcagagtggcccggaggattctttagactcagaatgaaaccaggtttaatgcccaactaataatcacttctgaaaaagatcatattaatgcaacatgcaatggaagagctcactctcaacacatactgcacagtagtgggcgtcctaaagctgtgtgggtcagggagtgactggcacttgcctcttctctgtttcactgtgtaaagcctttattgacatcttggcatataagcagaataatcaccaaaaaaatattacttataatgtaccacaacacaatcattcaagcatactacttgagggcctaagttctcaacctggacactgtagtataagctactgataccactactcactgcttcaccagaatggctgtatatttttcccaccaaaagtagggctattgcaccatacgtttcatggtctctgtaaagaaaagaaatcattgtcttggtttatatttcctcaaaaaacacgtaaattttctacaaattgctttcaagaacttagtgaaaactgaagtttcctaaggaaatcatcaattatttttaatccaacagtacccccatgtacacacacacagtatttgtaaaaacatcaattctgaaatacagctagctaccccctttacctcgtgccgaat

SEQ ID NO: 132976 - DNA, 504 bp, Homo Sapiens
  misc_feature (429)..(437): n is a, c, g, or t
catatgcagcctttcaccacttggccattagttcatgtgttttttaagtcagatattcttatgcagtcatgcattgattaacaacagggatatgttctgagaaatgcgtcattaggcggttttattgtacaaacattgtggatttcataacaagtgtacttacacaaacctattgcttctaggctacaaacctgcacagcatgtcactgtactgaatactgtaggcagttgtaatacagtggtatttgtgtatctaaatgtagaaaaggtgcagtcaaatatggttttataatcttaggggatgttgaccaaaacattatgcagcacttgactatatttattagcagatggaaattgaattgaaggtcgtttcagtgtggttcataatgagtaaccatcgttgccatcaactcctgtattacctaaacnnnnnnnnntgtgtgcaggattaaaatgttctcacctcaccttgcaaataaataattattattcatagttatttac

SEQ ID NO: 132977 - DNA, 1133 bp, Homo Sapiens
aaaaatacaattttgaaatttattgttgaaaatggacacatggaacaaaccaaaccttgttttatcatgtaattttcagaaaatatgtgatccataaagattaaaagaaagttgtattaagtctggcagctttagtattaacttgaaataaaatatggcaagctttccacgtcctcctttatttccacaatccatatgtacgagctagattccagtcagaacttccacaaatacttcactctttggtagcagcggttataaattacgcctttgctaatttgcgttgttcccaaccaggagaaacattaccacaaaaaaagtcagtttcatcctgcagtgttcccgcagcaaccatattaagctggaagaataaagctcctttgtagtagtagcgtctattgaattacaatgtaaatgttgatgcctgcctggaaacgtcaaatgacaacaggtttacagaacgaattcagtggttgtttgcagctctggaatcccaggctgcagagttgagatcgaagaggtgcgtctggccatcttagcgttcattcaaccaaatctcctcactccatcaaaaccacgccactccccacctgcccagctcgtaaaaggatgctcacctgtttgaaaatctgtaatatatctgatgtcttttacacagcaggacacgaaaaagtgtttgttgtggataagagtgttaaaaattcaattacgcaacagaccaaactttgtgcttctttccccctctcagcacaaagtaactttagtcccgtcctcttctgccactgtcaaacagccctgttactgtgggcattaaatgccttgtggcgtactgcgcatttgattctggttgacttgggatacctgagctcggctctcattagctcttccgctcgacccacgatccctagtgtttgcaggtgttgcattcccccgaccccgtgttcttctcttcaaccagtagcctccaccttcccatccctgctttggagaaggaggaaaacgcagcttgagatctactcgaagaactgaccctcagctctcacaggctgccgccgagctgcaagcatgccgccgctccactcccccggccgtaatggccgaattcccgggcatatgtccggtaccgtcgactg

SEQ ID NO: 132978 - DNA, 875 bp, Homo Sapiens
  misc_feature (783)..(783): n is a, c, g, or t
  misc_feature (789)..(789): n is a, c, g, or t
  misc_feature (823)..(823): n is a, c, g, or t
ttttctgttcctatcacatctcactcccagtaggtgttgcatttttggatgaatctaatagttttcctttattttcacttttcacgaggtgagattagatgtctgtgtgaaatgaatgttttactatggtcctacacataatgttaaaattacaaagtaaaataatgaggtacaagatatttattgacaccaaaatacatacaagtatttccgaacaagatgaaaatatctcctggtttctcacacagagacccatactactcggaaggcaggatatgccagttttcctttgtggaaaagtgtatccaggcagcaaacttaatgaggagtgggcagttttgtccttaaaaaactgcagggaagggttctttccagggagtggtagttggtgctccaggtgctggcagggacaggacagctgattgatagaagtgagggctctaacaaagttcactatttacatcaaaatgacttgatgggggctctgggcctctgggccttgttaaaagatgatgctgaaccatgtcttgaaaccccaccagcattaggcttaggtactaagcaagtccggactgtatccctggctcagtgactgaccaatcacaacacgtgcccagttgaatagtgactgtaacagatcaccacttttaatgctcccagaagaaatgagcacacaaaaactagctgagaaaaaccctttcccacatcctcctctgcctatgtgggcactgaggcaactgccctgactgtgaaagttcaccccttgtgaataccactctttanatccanattgcttcattgagatcttaaaaggaatcttganatccagatgattgggtagaaaatgtgacatggaattttactctagcgtcaaa

SEQ ID NO: 132979 - DNA, 812 bp, Homo Sapiens
cagagaaaaattctactggtgaacattttattttcacaaaacaaactttacagattttacaatctcccaaatttcacttatttaaaaataggagagacaaggcaacctagactccaagattgcaggcgtgaaaaaactagtaccagatattcaagttatatatgcaaactgcattttatataccatgaaagtgaaatgtgacaaacactcactagtttcaagtgtaccttataagaaacacatggacatacttgggttttttaaccacatagtctcatatcaataaacatctaagtatctgacatgtatttttccattaaaggtaggcacaactctatgaatatcaaattatatcaatcatttgctttttataatcttgactggaaactgaaaaataagaggaatgtaaagttaagtagccgaaaatgctacttactgcacaaaagcacatcatgaaaaggaatgctagaagtagttctcctcaggaatgggtttttgaaaatttaaaatattattttatcagaaaagttaaagccttcagtgggaaaaccatggtaaatgacatattgactcaatctctaaagccctggcaaattatagattttgtgcaattagtgaccaacatatacatttaagagataatactgactgttgaccagaaccttctgatggttctgaagcatctgctctttagagttacttcagctttacatgtctatgaaatttaagattcctcaatgggatgttatagcttattctgcgctagatacaagtgatatgtatagatttagacaaatgactacttgtcacct

SEQ ID NO: 132980 - DNA, 760 bp, Homo Sapiens
  misc_feature (419)..(541): n is a, c, g, or t
  misc_feature (572)..(681): n is a, c, g, or t
  misc_feature (686)..(702): n is a, c, g, or t
ggagagacaaaacaagaactagagttttaatgataataaaagcaataataataaaagcaataacaataaaaacaagatcagactctcactggggtaggcaagggactgaggaggtgaaaccaacccgtatggtgtcccagcacggcacctgctaaggagggagggtgggaaagcccaggccttcgttgcgggtacaggaggatgcaggagagggctgaggtgggggaggaacaactggtgtactgggagagagatttgggacgagggggaaccatcagcaaaaaatgaagccaggaatcacagtaagggcgcaagggctgaggccagttgtttccataaagaagactcaatcattacaaaaataatttttagtagttaaaaaacacacatagggccaggcatggtggctcacacctttnnnnnnnnnnnnnnnnnnnnnnnnnnnnnnnnnnnnnnnnnnnnnnnnnnnnnnnnnnnnnnnnnnnnnnnnnnnnnnnnnnnnnnnnnnnnnnnnnnnnnnnnnnnnnnnnnnnnnnnnnnntgagcacctgtagtcccagctacttaggagnnnnnnnnnnnnnnnnnnnnnnnnnnnnnnnnnnnnnnnnnnnnnnnnnnnnnnnnnnnnnnnnnnnnnnnnnnnnnnnnnnnnnnnnnnnnnnnnnnnnnnnnnnnnnnaagcnnnnnnnnnnnnnnnnngaccgcgtatgcggccgcaagcttattccctttagtgagggtaattttcgcttagcac

SEQ ID NO: 132981 - DNA, 797 bp, Homo Sapiens
  misc_feature (309)..(360): n is a, c, g, or t
gctgggacccaggtggccaccattgttattgacaggtaaggaagcactggaaatgcaccatcctctccatccccacactttccagagtaaagcaaggatgaggacacccaggcattgtgccaaggctgccattgcaggagggcacagagagaggatgggatagaaaaagcatggaataagcaagaggccactgagacaccaaaggctaaactgcaaactgcagtgtggcttccaaccaagcaagagctggtctcatctgctcatggccaccctgtcagagccatttgctaaacatgttagtagatccannnnnnnnnnnnnnnnnnnnnnnnnnnnnnnnnnnnnnnnnnnnnnnnnnnngagagtagtcctcattcagtgcatagcaatggaaggctaggacaatttagattccttaggtaagagcacaggaggatgctatagaacagtgactgttcattccatcccccaaatgacagcggtgagccacgtgtcagaggctgcaacacagactcagaaactattctacttgcttttttaccactggtgtcagagagacagcttgtaatcctaatatttggtgccagcaggaagaacttcagagcttttgttcttagtggcatatgaaggtaaattcaaatgttttcttcttcggctttaaaacagagcttaaattcttaagcacagccccaaagcatgataataaagtggcttaccctcctgggtgtggagttacacaaactctccctcatctaactcacgtcgggaatcatgatgtggtttcatatgcacgcacc

SEQ ID NO: 132982 - DNA, 694 bp, Homo Sapiens
  misc_feature (56)..(56): n is a, c, g, or t
ctacaggctgcaaaagaggaagaggagaactttagaaaaactatgctagctaaatntgctgaggatgatcgaatagaattaatgaatgctcagaaacaaagaatgaagcagctggaacacaggagggctgtggaaaaacttattgaagagcgtcgccaacaattccttgcagacaaacaacgtgaactagaagagtggcagttgcagcaaaggcggcaaggatttattaatgcaattattgaagaagaaaggctaaaacttcttaaagagcatgctacaaacttactaggctatctccctaaaggagtatttaaaaaagaggatgatattgatctgcttggtgaagagttcaggaaagtatatcaacaaaggagtgaaatttgtgaagagaaatgatatcatcaaaattgggtaaagcatagattttttgtatgttaccactagatgtcagcataacttttgttttacagttcagtggcattaggtatccattgtctgtttggattttgtaaatcatcactgaatttcataacttgtaaacaattatcagatacaaattaattttaatcaagctgttatttttgtactgataatttcaaaatccgatttctacaacactacagagcactgtttgcatccccatcctcaagacagtatatttaccttgactaatacagaactctaccccaaagtg

SEQ ID NO: 132983 - DNA, 733 bp, Homo Sapiens
  misc_feature (570)..(669): n is a, c, g, or t
tttacatttcagagcattacacaattacattttctcattttctgacctgcaaacagataccttaaacggaaattattttgttttaattatcaaattaggtacatccaaaatgcaacaattacacatatgacaattaattcacaaagtataattttactgggacatatcctaagaatttaggaacagccagtcaggagaaatctgaccaaatttagcaatcactatttacaaatccaaaatcaaacctatctaaactcccaaaccagaagcttgaaagtatttattaaatccccactggacgaaagacagtgatgactaacacctatccagtcttgacagttttaatccccaaacactgggctatttccccagtctgtaactgaattgcaaccatctgtttgtcaaacacctaaccatctaacttttacaccattatgcgcatagaaaggctaagtgttcattatttaaaaaacaagtagtcattaaatatccactattcccccagctcaccaagcccttattgcaatcccaaatatgcaatctgtgcacacagtgacaggctgtatttcnnnnnnnnnnnnnnnnnnnnnnnnnnnnnnnnnnnnnnnnnnnnnnnnnnnnnnnnnnnnnnnnnnnnnnnnnnnnnnnnnnnnnnnnnnnnnnnnnnnnagtattaggtacaaatggcaattaacagtccctacaaaaattcaatttcagttgaggctatggc

SEQ ID NO: 132984 - DNA, 1459 bp, Homo Sapiens
  misc_feature (98)..(106): n is a, c, g, or t
  misc_feature (125)..(133): n is a, c, g, or t
  misc_feature (639)..(662): n is a, c, g, or t
  misc_feature (1376)..(1376): n is a, c, g, or t
aaaatgactctattcatactaggtttagcttctcatggttgtagatattacttcagttccggtgctggaaaatatgtacaacatactaacaggattgnnnnnnnnntagaggtttttcttcttgnnnnnnnnnccaaagcaggtaaagagggtagcaaagcatcggaatgatgtgctcaaaaatgcatattcctggtggggatggaggaagaaggcattagtaaaaggttaatcaaacgttacaacttaaccccattcatgtaggaataaatcaagtgagcagttccagacttttgcataatatttttactatgatgctgttttattaatattttctaaatttcaaaacaaaaagtgaatgtttgaaattgctgggtcccgatgttggtggctgttggagttttggaccactcgctagcagtgatttgaagattataattagctaaaatccaaaacaaaaacccaacaacaaaaattgtatggtgcggaacatgcaccttgacaatggtactaacttgttattctatagaacacgttagaatagatctatttttgccagagcaccctccttcagtcctccgattacatttcactagagttccttacgagattgctgtatattcctgggacctttttttnnnnnnnnnnnnnnnnnnnnnnnngattactttttttctatgtgattaatatcttacttgatctgcttttcctaaacctcagtggcttttcccttaggcagggttgggggtgggagggcaacttactggagatgactgttttcagatactttaaaacaaacctttttgtagaaatgcttaatttttaagcggttaggcactgagagtagcagaaatcctgcaaagctttatagttccttagactcaccttgtcgattctctgagtaaagtcttgatttcaataattgtgcttctcatgccctgaatctgctggagaggagtgttgttattttcaggtaacaacattcgttagcacaaatatttcagaccaatattagtgctctccaccccaccttttgttatcattttcatttcatttctctcattctacttcctgccactaaaattgctggagaaacaaaataatgatggaacactatgaacaaaaaggagcatctgaactggtctggttatttagaatccaatgtgttcaaatccttttgttttcttattaagtcagatgctactgtaggtcagataaaattttgtttgcactctgcagtctttggctcaatgtatggaaatgtttgcacctatgtaaagtcacaagctaattacaaattgctacagaacaggagtaagctgaaaactgaatgccatgttttgtttataaggtggggaggggagggaaaataccanaaaactctgttccaagtttggcatttgacattaatgtgaagcagtgggaccatgctggctgctaaactactgtatgaatcgta

SEQ ID NO: 132985 - DNA, 2281 bp, Homo Sapiens
  misc_feature (284)..(295): n is a, c, g, or t
  misc_feature (1531)..(1576): n is a, c, g, or t
  misc_feature (1833)..(2218): n is a, c, g, or t
atctttaaaatatttcaaagttttattaaatatttttattcagttttaagatcacagttaaagtactttagcatgttatacacatgacttacatgtgcaatttttagaaatatcaaattaggtataagattttgaagaaagaaattatataaatgtgtatattgacttttactacacatacatctaagaaagcaataattctgttgtaccattaagtggaaatcatttattacatggcatgtttacaccaactctaaagagaaccaagccaatttctgaaagcnnnnnnnnnnnntgagcgattcagtcatgctgaaactgtcaacagactttagacgtggtggtcaaatgaagctgtggttaatttatgacatgtgagtaagcaattcaaacctacgagaagagtttataatctggtatgtggagtctcaggtgattttattcttttttctgacaaattcctgagagcaagagacttgtttagtgctaatgaaatggagaaaacgttgctgagccagttgctgagctccagatcgcaaaccttccctaccccccgttccacggctcttagagctgaggcactcatgtgaggagtcaggggacatgagcccacccctctggtgggccacagagcgaaatcagtgttaatgcatgaaacatgcatgtctctgtgatttaggttagagcttgtgaggtaagatttgcattgtgggtggaagagttttgaggcattgaattagatccttgttactcagtaaccacctctggcccaagttatcaggaaatctttggagggagtagtaatgttcacaataactagttctgtgcataaaaatcgatttaagcacatgatcagttttgaccactgactgcaaaaagaaaacagcagccatataatttttaaccacaaggtttcctctctcaatttaacagtatgaatcataccaccatagatcaaatttggggacaagaacctgtatttccaatgtggctgtgggacatttttctttttcctgatctcatatacagtacccaaacaaataaaaactttaaggatgtcttacagtattttttctttcactcagcttcttacagctgcagcttcagttactataatatactctacacacttcaaaattacataggaaatacccagaataactaaataaataaaaggctaaagaaaactggaacagtactgcgtctccatctgagacgcaatcttctacttccagcatcgcagagaagggctaggacaatttttttcaaaagatttatatacaggcttgaatccagaaattaaggttaaaagcataaatattgataatttcaactaaattcagaatggtttcagaaagatatgatacaacaatttagaataaaacaaagcagaagagcatcatattttggtttgcttgagatatatataaggtgcaacaactttttctcttgaggatgctgtgggacaaatgttagtgtagatggtatctgctggcagattaaagtacacactatagcaatatgattttcnnnnnnnnnnnnnnnnnnnnnnnnnnnnnnnnnnnnnnnnnnnnnnggtggggtggagagcactaatattggtctgaaatatttgtgctaacgaatgttgttacctgaaaataacaacactcctctccagcagattcagggcatgagaagcacaattattgaaatcaagactttactcagagaatcgacaaggtgagtctaaggaactataaagctttgcaggatttctgctactctcagtgcctaaccgcttaaaaattaagcatttctacaaaaaggtttgttcctcgtgccgaattcttnnnnnnnnnnnnnnnnnnnnnnnnnnnnnnnnnnnnnnnnnnnnnnnnnnnnnnnnnnnnnnnnnnnnnnnnnnnnnnnnnnnnnnnnnnnnnnnnnnnnnnnnnnnnnnnnnnnnnnnnnnnnnnnnnnnnnnnnnnnnnnnnnnnnnnnnnnnnnnnnnnnnnnnnnnnnnnnnnnnnnnnnnnnnnnnnnnnnnnnnnnnnnnnnnnnnnnnnnnnnnnnnnnnnnnnnnnnnnnnnnnnnnnnnnnnnnnnnnnnnnnnnnnnnnnnnnnnnnnnnnnnnnnnnnnnnnnnnnnnnnnnnnnnnnnnnnnnnnnnnnnnnnnnnnnnnnnnnnnnnnnnnnnnnnnnnnnnnnnnnnnnnnnnnnnnnnnnnnnnnnnnnnngacatgtgagcaaagggcagcaaaggcaggaacgttaaaaggcgcgtgctggcgttttcatag

SEQ ID NO: 132986 - DNA, 1145 bp, Homo Sapiens
aatctgggagcactcagttgtggaacccagccaccatgttgtgaagaagccctgtgcagtggtccaagtgaccaggagtcaaagctcccagtcaatagccagcactaacttgtcagcagtgtcatggagcccacttgaaagaggattctaattatgctgcccaagctgtggccacatggaggagagatatacagtccctgctgaaccctgctctaattacagggagacttgaaaaccagtggtggcgagactccaagactattatttttatttccggacaaaaacatctgcttcacacagtgcacggcatcaaatgaagaggaaagaacttgtatcccaaagcctggctttctgtatcatccacaaattaagacagcatctgctgagcccatgctgagcctgtcacagtcaacaactgggaaaccggggcctctactgaaccaggggacaagtagccgaagcacttaaacagcttgatacttgttttttggtacatttgtttatttaaagcacaggaaatgaataaaatgccacctaaaaagtatctgcaatgaataaattatttccagtgaagcactgcagatccacacacaccagtctgctaacctttaccaaggccatgtccggtgggcttgtgcttgtcccagttgactcttccttgagacctttcccttctgtgcaatgaccacagcattagagaccagtcctgcatgcgctggccttcctcgtaggcatggcagaccacgtggatgagcagtgggctggcatgcagtaggcttcaacaaatggcacttcactgtttccagtgaccctgaaatgttttatgtaagtggggcctgggctttaaagaaaagagccagggttcctcaggctgggccccttcactgaggcacagctccaggaaatactggtctcaggagccagcaacttgtccaggagttttgagccctcagttgaaggaaaatggccacgtggtgtccttgcaggcaacagtgatgtcggtgatggtgacaagtagccagcctaaggaaggccaatcccaccttgggtggaatgcagggcacctagtcctgcttggaaggggctgggaggttggggaatgtcgagaatggagggctagggctccacacagtgaattcaaataa

SEQ ID NO: 132987 - DNA, 1468 bp, Homo Sapiens
  misc_feature (367)..(417): n is a, c, g, or t
  misc_feature (782)..(802): n is a, c, g, or t
  misc_feature (844)..(1326): n is a, c, g, or t
gcactccaagtgccatatatctattttattcttcaggaaattatatttttcttttacaagagcacaacaggaaccaaagtaaaagagtaatagatacagcactcaggataaatcatatctttaaaataataataaaaaaatttacaccttgtcctatatcctgttagtattttcataatatggccatgattgaaaaaacaaaaagcaagcatctacaattttttttgataaagactttttatgccaggaatggattaattaccaacaaaatttatactaatcaggctgatgtcaatctatttttgtaatgtatcattaacaaatttattttggaaaagataaaaatattgctccttgataataaatnnnnnnnnnnnnnnnnnnnnnnnnnnnnnnnnnnnnnnnnnnnnnnnnnnngatattctaagacaaaaaaatggttaatcttcagattaataaattaggtcattataataataaattaattttttttaaagttcagcaacctctgtccaagtatttacaacaatacttgaaagttcctttacaaaacagaacacattttcttttcacgttaagcatactgggtatctgtgtctttcacaacaagcatttttaaaagaaaactcaatgcacaaatgggttaattagtataaaagtgctaagggctgtttgaaaagttaccactatagtatacagtcagttatatttgaggcatactacaacaaacttccagcttattgtggacaatattccagtagttgtttcaaaccattgtttgnnnnnnnnnnnnnnnnnnnnngcctacagccgcggccgctccaaccctcgtgccgaattcttnnnnnnnnnnnnnnnnnnnnnnnnnnnnnnnnnnnnnnnnnnnnnnnnnnnnnnnnnnnnnnnnnnnnnnnnnnnnnnnnnnnnnnnnnnnnnnnnnnnnnnnnnnnnnnnnnnnnnnnnnnnnnnnnnnnnnnnnnnnnnnnnnnnnnnnnnnnnnnnnnnnnnnnnnnnnnnnnnnnnnnnnnnnnnnnnnnnnnnnnnnnnnnnnnnnnnnnnnnnnnnnnnnnnnnnnnnnnnnnnnnnnnnnnnnnnnnnnnnnnnnnnnnnnnnnnnnnnnnnnnnnnnnnnnnnnnnnnnnnnnnnnnnnnnnnnnnnnnnnnnnnnnnnnnnnnnnnnnnnnnnnnnnnnnnnnnnnnnnnnnnnnnnnnnnnnnnnnnnnnnnnnnnnnnnnnnnnnnnnnnnnnnnnnnnnnnnnnnnnnnnnnnnnnnnnnnnnnnnnnnnnnnnnnnnnnnnnnnnnnnnnnnnnnnnnnnnnnnnnnnnntcgacgccagtcagagtggggaaccgacagatataagaacaagcgttccctggagctcctctggctcctggtccactgcgctacggtacgtcgcttccccttcggaggtggcttcaaatcagcgtagacccatcggtagtct

SEQ ID NO: 132988 - DNA, 456 bp, Homo Sapiens
tttggatttaaacctttttattgtcagatatttttctttaagcatttattagctttgattgtttcagtggccaaataaggcagcatctgctaagaaaggcacctcatcagaaacaaaatacataaccacgtggtgagatccctgcatgagaccagctgctaactccttgagagcagcaattgtgtcttaatgtacttagtagcacctcaacttgcacataggaacccttcttacaggatgtttattgaatcatcttcattagtcaaaaacgagacactcaaatccttttatttgactcgccctcaccactccatctccccttcttccctccaactccaagccttcatttagcaaaagaacatataccagagggtaagccttagaagactgcactgtgggcagaagagtctagttttagggttgaaatatgctttgagacagggtctggctctgtca

SEQ ID NO: 132989 - DNA, 650 bp, Homo Sapiens
  misc_feature (323)..(353): n is a, c, g, or t
agaaaaaaagatgcacatttatatatttgaaggaagggtagcacatacagatggggattatgagggagtcaaatacatttgtctttttattcacgcttgttgcttctttgttctgaaatataaggaagataaggtcctcagtgaaatgaacaaagttgtttaatatagagtataataaacttagctatcacttccaaacgaaagtaaagcagtccatcaaaccctgaatacttcgccagacacatctggtaagatgaactgaacaacagcttcttttaaaattgtaagtatgctgttagtcaatctaaataagataatttttnnnnnnnnnnnnnnnnnnnnnnnnnnnnnnntctagttctctgggaaaaggaaggaaattgcaggaggcctggagccatcatttgtaaaggggatgttgcggggtgtgatgctgttgaggagattcaccttcaattgcactgctccacagagccctcatataaggccaatcctaatgggctacctcggctttaaaagttaatttcagtaagtcctgtttcaaaagtttgtctttttttgcttctaccttcagtgccactattttccactgcagtgttttgacttcacaaactgcctcctccagagagaacaatgtattgctgaaaatg

SEQ ID NO: 132990 - DNA, 970 bp, Homo Sapiens
  misc_feature (726)..(726): n is a, c, g, or t
tttttcagaatttcattactttttattatacaccaactagtttatattgtagttctttacaaagaaaatgctaagaaaaattataatcacatgttatatggttttaaaataataattccagatttctttacatataagatggaatggtccagcagctatatccactgtcacagactttagttccgttcaatgatatggcacatcctgcaaaattaactagtcacacacaaaaaatgtctcaaatacagtaaaaatgtacacacaaaggtaatttacaatgacaaggaatgtaatttttcttggctgtgcttcagaaatttagggtcagtagccttaatcaaggcacaaagcaggaaaaggtgagcacagctgtctctaggagtgggcaaggtatgtacaatcactgatgaggtatgcatgcacgcaaaggatttaaaactgctcagtctcactacaaaaattgaactgagttaaaaggaaatgctgtggcttccccctactatctggctctggattgagtccacagtcttacttcatcaaatagaaaataaaactgacaaggatctccaaaagtaaatcactatttgtgtaaatgaaacaaaatgcttcattaatcccaagttcttggttgtgcctcctggactagaagcattttgtagacaaaagagtgtttcacaaacattgaatgtaattcaggtgaaggacaaacatttccacagcacttanattcaaacttcaatggccttacagctgacgtgtatgtacatatgaggtccgggtatccttacacaatgcggttaaggacgggtcctccggtgttgctgcgctgtcccccttgaactgaggaattattacccattcataaagcatttgccagaactcattgggcaatacaacaacatctatatctcaagcttacttaaacaatcggaagcggatttcatgttcattaattgaaattggagaaggg

SEQ ID NO: 132991 - DNA, 430 bp, Homo Sapiens
ctttgtacagatcctttttattcagatttatataggcaatttaccaacacagaaaaccagtctagcagctccaaagtaactgtaaaaacggtggtgctgacggtggtgtgccccacacagggcaggtgacctcagacgtggagcagcatctcccgtgggatactatttcagacgtgcactagtgagtgtatactgagaagggattataaaccttccctggcacaacagatacaaaaagagatagaaccaatgatattttgtctaggtacaatatctagatttacagtatctagtttactggcttcacttcgtatagcaatgcacaatagaaaacggatttctttcttcaagggtattcaagaatatagtaaatatgttactatattgatggctatgaaaacagacagagacaaatgagtgaggaggcacg

SEQ ID NO: 132992 - DNA, 267 bp, Homo Sapiens
atctactatataattccttttatataaagtttaaaaacaggcagaactaacagtggtcagaatggtagttatctttaggggagaaaggtgagctctgagaacacaaagagggcttctggggggctggcatgttctgtttcctgatctggatggtagctccaccaggtgtgtttgcttgtgaacattcacgctgtacacttaagatctgttcatttttctataagcatggtatatcttaaaagcttgttgaaaagtaaataattaagt

SEQ ID NO: 132993 - DNA, 2687 bp, Homo Sapiens
  misc_feature (161)..(188): n is a, c, g, or t
  misc_feature (355)..(356): n is a, c, g, or t
  misc_feature (361)..(405): n is a, c, g, or t
  misc_feature (413)..(413): n is a, c, g, or t
  misc_feature (2248)..(2283): n is a, c, g, or t
  misc_feature (2326)..(2339): n is a, c, g, or t
ggtccggaattcccgggatatcgtcgacccacgcgtccggccttcaagccagtgctgcccaaacctcgaggggctccgtccctgcctagcttcatgggtcctcgggccaccgggctgtctgggagccagggcagcctgacgcagctgtttgggggccctgnnnnnnnnnnnnnnnnnnnnnnnnnnnnttcagctgctgacaaacccctggcatttagtggctgggccagtggctgcccatcagggacgctatccgactctggccgaaactcactgtccagcctgcccacctacagcaccggaggtgccgagccaaccaccagctccccaggcgggcacctgccttcccatgggnnccacnnnnnnnnnnnnnnnnnnnnnnnnnnnnnnnnnnnnnnnnnnnnncatgaganacagtggccggtcctcctccagcaagagcacaggctccctagggggccgtgtggctggggggcttttgggcagtggtactcgggcctcccctgacagcagctcctgtggggagcgctcaccaccacccccgcctccacctccttcggatgaggccctgctgcactgtgtcctggaaggaaagctccgagaccgggaggcagagcttcagcagctgcgggacagtctggacgagaatgaggctaccatgtgccaggcatacgaggagcggcagcggcactggcagcgagagcgtgaggccctgcgagaggactgtgcggcccaggcaccagcgggcacagggggcccaacagctgctgcagctgcaggtgttccagctgcagcaggagaagcggcaattgcaggacgacttcgcacagctgctgcaggagcgcgaacagctggagcggcgctgcgccaccttggagcgggagcagcgggagctcgggccgaggcttgaggagaccaagtgggaggtgtgccagaaatcaggcgagatctccctgctgaagcagcagctgaaagagtctcaggcagagctggtgcagaagggcagcgagctggtggctctgcgggtggcgctgcgggaggcccgtgctacgctgccgggtcagtgagggccgtgcgcggggtctacaggaggccgccccgagctcgggagctggagctggaagccctgttcccaggaagctgcagcgacaccgccaggaaagctgagcagctgcgggaagaaagctgggcagttggatgcctgaggcggccggactccgggagccccctgtggcacctgccacccgctgacccattcctcctggcggagagtgatgaggccaaagtgcagcgggcagcagccggggttgggggcagcttgcgggcccaggtggagcgattgcgggtggagctgcagcgggagcggcggcggggtgaggagcagcgggacagctttgagggggagcggctggcctggcaggcagagaaggagcaggtgatccgctaccagaagcagctgcagcacaactacatccagatgtaccggcgcaaccggcagctagagcaggagctgcagcagctcagcctggagctggaggcccgggagctcgctgacctgggcctgggcgagcaggccccctgcatctgcctggaggagatcactgctactgagatctagggccctcagcaaccagctctgtagggagctctgccagaggggcagcagctgcagatccacttaggccccagggtccacggatggccccaaaggctgagggccccaaagccacttgtctcctaggatccaggcctctgggcttctgccaagaactcagggtggccctatgacttggaggagcaagatcagaccgctcaaaggtccccgtgttcactgttacccagaggctcttgttactacccacttcattccccaccgctgccagtgccactgccaaccctgttcacaggcgcttccagcccactccagccaggggagcagggaagaagaaggggctccctcctcttcacattccccccgaccccaaagccagagaaagccagatggcaccagctgctccggatgtgcctgcccacattgggggacagggccgggcctgggctcggttcccaggtttgagctctgcagcctctctcctggagtgagggggctgaagtcagaccaaaggaagaactcagaaatgtcttgtttatttgtgtttgtgaccaagcagcctctcccttcacccaggtttatggcctcgttttcacttgtatatttttcacactgtaaatttcttgtacaaacccnnnnnnnnnnnnnnnnnnnnnnnnnnnnnnnnnnnntaatgtgaatgtgctggataaagagtacaggaacttgtttgannnnnnnnnnnnnnaccaccatttgctggctattctcctccccctcatagagctctcttggggagaaaaggtgatggaggaaggacaaatccagtagaatgtctgaggtcttagtggaccccaacgtgaaatgatctctcaggatttcagggactagaaaagcctttcatccgtttccttgcacagaatgctgcttggggttgaggaatggatgcattgaccccttcagggccctgtctgagagtctgtgtccctggaggcttgggcgactcataagggacagcatgtgagaaagtgcccaccaatcccaagctccagaccttggctttctcaccccctatcctggcttgggaggttgggga
